United States Patent Application Publication US 2011/0183924 A1 - sequence listing, part 7

SEQ ID NO: 15776 - DNA, 1588 bp, Homo sapiens
cccagaacatagagccagggacagtcccctctcagttctcttctaaaggtggttctggcacaacagttgataaagctgtgtccctgaagggctttttagccctgggtgcttcctgtaaaacttgtcagcttccactggatctgcgggactgtgtccctcacaggctggacacccggccctgcggagaggacttgattaaacaaggtataatgtacttctctttcccatccacagatggatctgtctgtagaaactctgttcagcttcatgcaggagcgccagaaaagatacgccaagtatgccgagcagatccagaaagtgaacgagatgtccgccatcctccgccgcatacagatgggcatcgaccagactgtgcccctgctggacaggctcaacagcatgctgcccgagggcgagcggctggagcccttcagcatgaagcccgaccgcgagctcaggctgtagctgccgcccggcctgcctggggctgggagccccagacaccgacaccctgaggacgtgtggagctaaggtcatatcatctgaccaggtctggaggctggcgggaggctccctgaaagtgggtgcgaaggagtccggctggcatgaaaatctgactttgcccagctcttttccttgatgcagtttcccggtgtggaaggaacctaaccagttctcggtgataactgaagctggaacgtgtgaattattaggaattctttgaagaactctgcattgagaattatttttatttagttttttttttttttaattgagagtatatagtccagtccaggtaccggaataaaaatatggagacaaggggaaaatattttacgaagctctgtgttctcaacgccctcatgaacttttcagtaggctgtctggtttatgtgtggtcaacttgaaaaactaattgaatctaggtctctgtattgttcctgtttctaccctgactgtttccgtcacaccaagcccttatctggggcgcgtcttcctgcccaggtggaacactggcattttgttgactgtcaggttaggtgtcccttagtcgtcatcagaagctgaagccttcctttccacaccctcatcagattcatctccactgataaccggtttccttgatgcagacatagtttagctttctttgactgcagagatgtctcattccacagacatttcttgaacccatttgatgtgtccaatattgtgccagggatacaaatatggccgtatagcctcaggccttcatttctgaaaagaaaaaagctcaaaaagctgctgaatttctctgggagtttaggaaaggaagttatttgagtaacaacaaaagtgcttagtgtcgtactttacacatcataggtgttctaatggaagcaaggactggagaagcaaagagtggaatgtgaggagcagacctaggcagacaccttgagactaaaagtcagagctgaagggagtcgctggggccaggacggcatgcaggcctgtaccctgttccctaagttcctgcaagcgtcgggaggtgtgttttcagataccagaaagagccttcagtagattcacaagattaaaattgatgcgctta

SEQ ID NO: 15777 - DNA, 1277 bp, Homo sapiens
tgcgtcccggaaggagcgagcttgcggagcgtgaaccagtgagtgaaagcggcgccgcccgccggccgcaggtgcggcaaagccagtgtcatctgccggttctcttagggctcccggaaagaaggagggctagccgcgtgcgttcgcgccgcgcctccttgcgtttctgttccccaaatagggcctctccttctcccgccgcccaggcccctgcgtgggctggacgcgtcagccccacacattagcctcgctgcggcgcccagactctgctttgcctccccgtcccggtccctggcccctgccctgtcgcccgccgccggagcggtgaccgcccggcccgccgttcttctgctgccaccgctgtcggcaccatgggcagtgagcagagctccgaggccgagagccgacccaacgatctgaactcctcagtgactccttcaccagccaagcatagagccaagatggatgatattgtggttgtagctcagggctcccaggcctcacggaacgtcagcaacgatcccgatgtcatcaagttgcaagagattccaaccttccagccccttttgaaagggctattgagtggccagacttccccaacaaatgccaaattggagaaactggactctcagcaggtgttgcagctctgcctccgatatcaagatcacctgcatcagtgtgcagaggccgttgcttttgaccagaatgctttggttaaacgaatcaaagagagatgaggactcagtgtgtcgtcgtggctgctcttgagttcctgggctcaagtggtcctcctacctcagcctcccaaagtactgagatgacaagcatgaaccaccgcacctggccagcattcctatctgtcagtataagattatattaactagtgttacagaaaccccaaatgatggtggcttatacaaaatgaaagtttattcatctctctcaggcctggtctcctcttacacataaacatcctcatggacccaggctgcttctagctcatgatctgccaactcaaagatgtaaccttcattattctcatggtctacatggggtgcacctgcatttcagcagcagcagagtggaggaggggacagtgaagaagagaagcaacaaagagtgcatgccggctgcctttccaggaaggtgcctggaagctgccaggagagacttctgcatgcacacaccactgattataacttggtcatgtgtcacggcaaggcgagggttttgaggcaagagttgtggagaataaagagttgttcactttctatttg

SEQ ID NO: 15778 - DNA, 2085 bp, Homo sapiens
tgcgtcccggaaggagcgagcttgcggagcgtgaaccagtgagtgaaagcggcgccgcccgccggccgcaggtgcggcaaagccagtgtcatctgccggttctcttagggctcccggaaagaaggagggctagccgcgtgcgttcgcgccgcgcctccttgcgtttctgttccccaaatagggcctctccttctcccgccgcccaggcccctgcgtgggctggacgcgtcagccccacacattagcctcgctgcggcgcccagactctgctttgcctccccgtcccggtccctggcccctgccctgtcgcccgccgccggagcggtgaccgcccggcccgccgttcttctgctgccaccgctgtcggcaccatgggcagtgagcagagctccgaggccgagagccgacccaacgatctgaactcctcagtgactccttcaccagccaagcatagagccaagatggatgatattgtggttgtagctcagggctcccaggcctcacggaacgtcagcaacgatcccgatgtcatcaagttgcaagagattccaaccttccagccccttttgaaagggctattgagtggccagacttccccaacaaatgccaaattggagaaactggactctcagcaggtgttgcagctctgcctccgatatcaagatcacctgcatcagtgtgcagaggccgttgcttttgaccagaatgctttggttaaacgaatcaaagagatggatctgtctgtagaaactctgttcagcttcatgcaggagcgccagaaaagatacgccaagtatgccgagcagatccagaaagtgaacgagatgtccgccatcctccgccgcatacagatgggcatcgaccagactgtgcccctgctggacaggctcaacagcatgctgcccgagggcgagcggctggagcccttcagcatgaagcccgaccgcgagctcaggctgtagctgccgcccggcctgcctggggctgggagccccagacaccgacaccctgaggacgtgtggagctaaggtcatatcatctgaccaggtctggaggctggcgggaggctccctgaaagtgggtgcgaaggagtccggctggcatgaaaatctgactttgcccagctcttttccttgatgcagtttcccggtgtggaaggaacctaaccagttctcggtgataactgaagctggaacgtgtgaattattaggaattctttgaagaactctgcattgagaattatttttatttagttttttttttttttaattgagagtatatagtccagtccaggtaccggaataaaaatatggagacaaggggaaaatattttacgaagctctgtgttctcaacgccctcatgaacttttcagtaggctgtctggtttatgtgtggtcaacttgaaaaactaattgaatctaggtctctgtattgttcctgtttctaccctgactgtttccgtcacaccaagcccttatctggggcgcgtcttcctgcccaggtggaacactggcattttgttgactgtcaggttaggtgtcccttagtcgtcatcagaagctgaagccttcctttccacaccctcatcagattcatctccactgataaccggtttccttgatgcagacatagtttagctttctttgactgcagagatgtctcattccacagacatttcttgaacccatttgatgtgtccaatattgtgccagggatacaaatatggccgtatagcctcaggccttcatttctgaaaagaaaaaagctcaaaaagctgctgaatttctctgggagtttaggaaaggaagttatttgagtaacaacaaaagtgcttagtgtcgtactttacacatcataggtgttctaatggaagcaaggactggagaagcaaagagtggaatgtgaggagcagacctaggcagacaccttgagactaaaagtcagagctgaagggagtcgctggggccaggacggcatgcaggcctgtaccctgttccctaagttcctgcaagcgtcgggaggtgtgttttcagataccagaaagagccttcagtagattcacaagattaaaattgatgcgctta

SEQ ID NO: 15779 - DNA, 1719 bp, Homo sapiens
tgcgtcccggaaggagcgagcttgcggagcgtgaaccagtgagtgaaagcggcgccgcccgccggccgcaggtgcggcaaagccagtgtcatctgccggttctcttagggctcccggaaagaaggagggctagccgcgtgcgttcgcgccgcgcctccttgcgtttctgttccccaaatagggcctctccttctcccgccgcccaggcccctgcgtgggctggacgcgtcagccccacacattagcctcgctgcggcgcccagactctgctttgcctccccgtcccggtccctggcccctgccctgtcgcccgccgccggagcggtgaccgcccggcccgccgttcttctgctgccaccgctgtcggcaccatgggcagtgagcagagctccgaggccgagagccgacccaacgatctgaactcctcagtgactccttcaccagccaagcatagagccaagatggatgatattgtggttgtagctcagggctcccaggcctcacggaacgtcagcaacgatcccgatgtcatcaagttgcaagagattccaaccttccagccccttttgaaagggctattgagtggccagacttccccaacaaatgccaaattggagaaactggactctcagcaggtgttgcagctctgcctccgatatcaagatcacctgcatcagtgtgcagaggccgttgcttttgaccagaatgctttggttaaacgaatcaaagagatggatctgtctgtagaaactctgttcagcttcatgcaggagcgccagaaaagatacgccaagtatgccgagcagatccagaaagtgaacgagatgtccgccatcctccgccgcatacagatgggcatcgaccagactgtgcccctgctggacaggctcaacagcatgctgcccgagggcgagcggctggagcccttcagcatgaagcccgaccgcgagctcaggctgtagctgccgcccggcctgcctggggctgggagccccagacaccgacaccctgaggacgtgtggagctaaggtcatatcatctgaccaggtctggaggctggcgggaggctccctgaaagtgggtgcgaaggagtccggctggcatgaaaatctgactttgcccagctcttttccttgatgcagtttcccggtgtggaaggaacctaaccagttctcggtgataactgaagctggaacgtgtgaattattaggaattctttgaagaactctgcattgagaattatttttatttagttttttttttttttaattgagagtatatagtccagtccaggtaccggaataaaaatatggagacaaggggaaaataaaaaaaaaaaaagaaatagaaaaagtagagaacaacacacaaacaggggggcgggcggcggtccaaaagaatgtactccccgcgagggggggcccccgaagtctacagcgggcgtaacccccacgctttctctgtgggaaccaagcgggggggcccccctaatgaggaggggcagccttataaaagagccgacgggccgacggtgccgggtaggtttaacaaaaaggtgggtgatgtgggggaacaacagtgtcaagccgtgggacatcattgtggagaagagaacacataaatttggagggggggtgaacattatgggggacatgattagcccacagagcatttaaaggctaagagggaaatattagcaatatgaagggataggggggt

SEQ ID NO: 15780 - DNA, 1185 bp, Homo sapiens
tgcgtcccggaaggagcgagcttgcggagcgtgaaccagtgagtgaaagcggcgccgcccgccggccgcaggtgcggcaaagccagtgtcatctgccggttctcttagggctcccggaaagaaggagggctagccgcgtgcgttcgcgccgcgcctccttgcgtttctgttccccaaatagggcctctccttctcccgccgcccaggcccctgcgtgggctggacgcgtcagccccacacattagcctcgctgcggcgcccagactctgctttgcctccccgtcccggtccctggcccctgccctgtcgcccgccgccggagcggtgaccgcccggcccgccgttcttctgctgccaccgctgtcggcaccatgggcagtgagcagagctccgaggccgagagccgacccaacgatctgaactcctcagggctattgagtggccagacttccccaacaaatgccaaattggagaaactggactctcagcaggtgttgcagctctgcctccgatatcaagatcacctgcatcagtgtgcagaggccgttgcttttgaccagaatgctttggttaaacgaatcaaagagatggatctgtctgtagaaactctgttcagcttcatgcaggagcgccagaaaagatacgccaagtatgccgagcagatccagaaagtgaacgagatgtccgccatcctccgccgcatacagatgggcatcgaccagactgtgcccctgctggacaggctcaacagcatgctgcccgagggcgagcggctggagcccttcagcatgaagcccgaccgcgagctcaggctgtagctgccgcccggcctgcctggggctgggagccccagacaccgacaccctgaggacgtgtggagctaaggtcatatcatctgaccaggtctggaggctggcgggaggctccctgaaagtgggtgcgaaggagtccggctggcatgaaaatctgactttgcccagctcttttccttgatgcagtttcccggtgtggaaggaacctaaccagttctcggtgataactgaagctggaacgtgtgaattattaggaattctttgaagaactctgcattgagaattatttttatttagttttttttttttttaattgagagtatatagtccagtccaggtaccggaataaaaatatggagacaaggggaaaata

SEQ ID NO: 15781 - DNA, 3032 bp, Homo sapiens
ccatcatgcatcttcaggtctgctagagcaaaccctgagggctgctttagagagggttatcaagggagacttcttggaggaggtggtttctgactgacttgaatgccaggactgtttgccctgccccctgccatctctccttcccagatggtgctccaagaggcagcttgtggacctggtgatggaaggggtgtggcaggagctgctggacagcgcccagattgagatctgtgtggctgactggtgagtgaggagcggcaccctgccccagagcagcaacaggcttggcagcggctctgcaacaggggctcatttcccgccccatcaaccccacgggtagcggctgtcactgtgcaccctttgtgatgaggctgagaggggaagtgatgcagagccggggaaggtagagctttggagaagccagagcccccactctgcactcctgcccaccctcatcccagcaggctggggtggtccacagggggccactgtggcttgatacccctctgaaacgagacacctcccctgaccaccttgtggatgcccagggtctgaaggggtgggagcatggtgccctgtgagctgaggctcagggagcatagttgggacaggactggcttcagagcctacaggcttaggatgaatgccttcttcccaaaacacccaggttctgccccaaagcattccagctcctccttcaggctgtggctcttccatagaaaatctggtctcttccctggggctctggctcttccctgaagtcatcaggcacctgccctgcattgtggttcttccccagagcatcctttcccgtcccccaactacctacccaaaagcctccagaatcaaccgcaggaccacccaggctcctcccccaggaccacccaggctcctcccctgctctggctccaccccaggaccacccagactcctcccccaggctctggctccaccccagggtcacccaggcttctcctccaggttctggttccaccccaggaccacccaggctcctcccccaggaccacccaggcccctcccccaggctctggttccaccccaggaccacccaggctcctcccccaggaccacccaggctcctcccctgctctggctccaccccaggaccacccagactcctcccccaggaccacccaggcccctcccccaggctctggctccactccaggaccacccagactcctcccccaggaccacccaggaccctcccccaggctctggctccaccccagggtcacccaggctcctcccccaggctctggctccaccccaggaccacccaggctcctcccccaggctctggctcctccccaggaccacccaggctcctcccccaggctctggttccaccccagaaccaccaaggctcctcccctagaggttcccaggccaggacgtctccaaatgtggtccagatgtgcaggaccttcatcaagatggagccagccctcagcctcccgccccgaaacccagagagctggctgggtgacgggggcatagaggctgactgctgcctggcaggtggggcgctcgagagaactgcggctgcgtctaccagctccgggtccgccttctggatgtgtatgaaaaggaagtggtcaagttctcagcctcacctgacccggtccttcagtggactgagaggggctgccgacaggtctcccacgtcttcaccaactttggcaagggcatccgctacgtatcttttgagcagtacgggagagacgtgagttcctgggtggggcactacggcgcccttgtgacccactccagtgtgagggtcaggatccgtctgtcctagcgactggactactgcctgacgttgtcagtcaagaccagccttgcagccaggtgcagtggctcacacctgtggaatcccagcacttcaggaggccgaggtgggaggatcacttggagctcgggagttcaagaccagcctgggcaacatagtgaaaccgtctccacaaataatttttaaaaaattagccaggcatggtggtgccgcctgtagtcccagctactcaggaggcttgggtgggaggattgcctgagaccaggaggttgaggctgcagtgagccgtgatttcaccaccactccagcctgggtgagaaagcaagaccctatatcaatgaaaaaaaaaaaaaaaaagaccagctttgcagccagaagccagaggatacccagggacagtagggctcccaggtggctggttctcagcacaccttccatgaatctgcttgctgctgcttcagtgtggtggccatcgtgctgtgtgacaaaccaggctgttcacagcttcctcagccccccagaaggggagtgtcaggaagagacatttagttcatttgcctgcaaattttcttctcctgcaaggatctcggtggactcagtcacaaaacaaaggctaaaccaggatttataagagagggcttataaatccctctgccgacgcagggagcagagacttgccggcatgttttgggggtaatgatcgtgggcagggagcagaggtccgctgaggcagtctgtccttgagactaacaaagtcatctgctgtttggggaaatctctggtgttgggaacaggcccccaaatctggccataaactggccccaaaactggccataaacaaaatctctgcagcactgtgacatgtttgtgatggccatgacccccaccctgaaggttgtgggtttactggaacgagggcgaggaacacctggcccacccagggcggaaaaccgcttaaaggggttcctgaaccacaaaccatagcataagtgatctgtgccttaacgacatgttcctgctgcagataactagccagacccatccctttatttcagcccatccctttatttcctgtaagaaatgtttttagttaatctataatctatagaaataatgcttatcactggcttgctgtcaataaatatgtgggtaaatctctgttcaaggctctcagctctgaaggccgtgagacccctgatttcccactccacaccctata

SEQ ID NO: 15782 - DNA, 2978 bp, Homo sapiens
ccatcatgcatcttcaggtctgctagagcaaaccctgagggctgctttagagagggttatcaagggagacttcttggaggaggtggtttctgactgacttgaatgccaggactgtttgccctgccccctgccatctctccttcccagatggtgctccaagaggcagcttgtggacctggtgatggaaggggtgtggcaggagctgctggacagcgcccagattgagatctgtgtggctgactggtgagtgaggagcggcaccctgccccagagcagcaacaggcttggcagcggctctgcaacaggggctcatttcccgccccatcaaccccacgggtagcggctgtcactgtgcaccctttgtgatgaggctgagaggggaagtgatgcagagccggggaaggtagagctttggagaagccagagcccccactctgcactcctgcccaccctcatcccagcaggctggggtggtccacagggggccactgtggcttgatacccctctgaaacgagacacctcccctgaccaccttgtggatgcccagggtctgaaggggtgggagcatggtgccctgtgagctgaggctcagggagcatagttgggacaggactggcttcagagcctacaggcttaggatgaatgccttcttcccaaaacacccaggttctgccccaaagcattccagctcctccttcaggctgtggctcttccatagaaaatctggtctcttccctggggctctggctcttccctgaagtcatcaggcacctgccctgcattgtggttcttccccagagcatcctttcccgtcccccaactacctacccaaaagcctccagaatcaaccgcaggaccacccaggctcctcccccaggaccacccaggctcctcccctgctctggctccaccccaggaccacccagactcctcccccaggctctggctccaccccagggtcacccaggcttctcctccaggttctggttccaccccaggaccacccaggctcctcccccaggaccacccaggcccctcccccaggctctggttccaccccaggaccacccaggctcctcccccaggaccacccaggctcctcccctgctctggctccaccccaggaccacccagactcctcccccaggaccacccaggcccctcccccaggctctggctccactccaggaccacccagactcctcccccaggaccacccaggaccctcccccaggctctggctccaccccagggtcacccaggctcctcccccaggctctggctccaccccaggaccacccaggctcctcccccaggctctggctcctccccaggaccacccaggctcctcccccaggctctggttccaccccagaaccaccaaggctcctcccctagaggttcccaggccaggacgtctccaaatgtggtccagatgtgcaggaccttcatcaagatggagccagccctcagcctcccgccccgaaacccagagagctggctgggtgacgggggcatagaggctgactgctgcctggcaggtggggcgctcgagagaactgcggctgcgtctaccagctccgggtccgccttctggatgtgtatgaaaaggaagtggtcaagttctcagcctcacctgacccggtccttcagtggactgagaggggctgccgacaggtctcccacgtcttcaccaactttggcaagggcatccgctacgtatcttttgagcagtacgggagagacgtgagttcctgggtggggcactacggcgcccttgtgacccactccagtgtgagggtcaggatccgtctgtcctagcgactggactactgcctgacgttgtcagtcaagaccagccttgcagccaggtgcagtggctcacacctgtggaatcccagcacttcaggaggccgaggtgggaggatcacttggagctcgggagttcaagaccagcctgggcaacatagtgaaaccgtctccacaaataatttttaaaaaattagccaggcatggtggtgccgcctgtagtcccagctactcaggaggcttgggtgggaggattgcctgagaccaggaggttgaggctgcagtgagccgtgatttcaccaccactccagcctgggtgagaaagcaagaccctatatcaatgaaaaaaaaaaaaaaaaagaccagctttgcagccagaagccagaggatacccagggacagtagggctcccaggtggctggttctcagcacaccttccatgaatctgcttgctgctgcttcagtgtggtggccatcgtgctgtgtgacaaaccaggctgttcacagcttcctcagccccccagaaggggagtgtcaggaagagacatttagttcatttgcctgcaaattttcttctcctgcaaggatctcggtggactcagtcacaagcagggagcagagacttgccggcatgttttgggggtaatgatcgtgggcagggagcagaggtccgctgaggcagtctgtccttgagactaacaaagtcatctgctgtttggggaaatctctggtgttgggaacaggcccccaaatctggccataaactggccccaaaactggccataaacaaaatctctgcagcactgtgacatgtttgtgatggccatgacccccaccctgaaggttgtgggtttactggaacgagggcgaggaacacctggcccacccagggcggaaaaccgcttaaaggggttcctgaaccacaaaccatagcataagtgatctgtgccttaacgacatgttcctgctgcagataactagccagacccatccctttatttcagcccatccctttatttcctgtaagaaatgtttttagttaatctataatctatagaaataatgcttatcactggcttgctgtcaataaatatgtgggtaaatctctgttcaaggctctcagctctgaaggccgtgagacccctgatttcccactccacaccctata

SEQ ID NO: 15783 - DNA, 2217 bp, Homo sapiens
ccgccacgccccgggagaggaccgaccgcccagaccgccggtcccggggccccctgggccacgccgatcacggggagcccctcgactgcctcccagaacaaagtgggaaagggaagcttagcccgccgctgccgcctccgagcagcccgccaggactctggctactggagatgggcgcccggctatcgcggcgacggctgccggcggacccatccctggccctggacgcgctgcccccggagctgctggtgcaggtgctgagccacgtgccgccacgctccttggtcacgcgatgccgcccagtgtgccgcgcctggcgcgacatagtggacgggcccactgtgtggctgctgcagctggcccgcgaccgcagcgccgagggccgcgcactctacgcagtggctcaacgctgcctgcccagcaacgaagacaaggaggagttcccgctgtgcgccctggcgcgctactgtctgcgcgcgcccttcggccgcaatctcatcttcaactcctgcggagagcagggcttcagaggctgggaggtggagcatggcgggaacggctgggccatagaaaagaacctaacaccggtgcctggggctccttcgcagacctgcttcgtgacctctttcgaatggtgctccaagaggcagcttgtggacctggtgatggaaggggtgtggcaggagctgctggacagcgcccagattgagatctgtgtggctgactggtggggcgctcgagagaactgcggctgcgtctaccagctccgggtccgccttctggatgtgtatgaaaaggaagtggtcaagttctcagcctcacctgacccggtccttcagtggactgagaggggctgccgacaggtctcccacgtcttcaccaactttggcaagggcatccgctacgtatcttttgagcagtacgggagagacgtgagttcctgggtggggcactacggcgcccttgtgacccactccagtgtgagggtcaggatccgtctgtcctagcgactggactactgcctgacgttgtcagtcaagaccagccttgcagccaggtgcagtggctcacacctgtggaatcccagcacttcaggaggccgaggtgggaggatcacttggagctcgggagttcaagaccagcctgggcaacatagtgaaaccgtctccacaaataatttttaaaaaattagccaggcatggtggtgccgcctgtagtcccagctactcaggaggcttgggtgggaggattgcctgagaccaggaggttgaggctgcagtgagccgtgatttcaccaccactccagcctgggtgagaaagcaagaccctatatcaatgaaaaaaaaaaaaaaaaagaccagctttgcagccagaagccagaggatacccagggacagtagggctcccaggtggctggttctcagcacaccttccatgaatctgcttgctgctgcttcagtgtggtggccatcgtgctgtgtgacaaaccaggctgttcacagcttcctcagccccccagaaggggagtgtcaggaagagacatttagttcatttgcctgcaaattttcttctcctgcaaggatctcggtggactcagtcacaaaacaaaggctaaaccaggatttataagagagggcttataaatccctctgccgacgcagggagcagagacttgccggcatgttttgggggtaatgatcgtgggcagggagcagaggtccgctgaggcagtctgtccttgagactaacaaagtcatctgctgtttggggaaatctctggtgttgggaacaggcccccaaatctggccataaactggccccaaaactggccataaacaaaatctctgcagcactgtgacatgtttgtgatggccatgacccccaccctgaaggttgtgggtttactggaacgagggcgaggaacacctggcccacccagggcggaaaaccgcttaaaggggttcctgaaccacaaaccatagcataagtgatctgtgccttaacgacatgttcctgctgcagataactagccagacccatccctttatttcagcccatccctttatttcctgtaagaaatgtttttagttaatctataatctatagaaataatgcttatcactggcttgctgtcaataaatatgtgggtaaatctctgttcaaggctctcagctctgaaggccgtgagacccctgatttcccactccacaccctata

SEQ ID NO: 15784 - DNA, 1104 bp, Homo sapiens
ccgccacgccccgggagaggaccgaccgcccagaccgccggtcccggggccccctgggccacgccgatcacggggagcccctcgactgcctcccagaacaaagtgggaaagggaagcttagcccgccgctgccgcctccgagcagcccgccaggactctggctactggagatgggcgcccggctatcgcggcgacggctgccggcggacccatccctggccctggacgcgctgcccccggagctgctggtgcaggtgctgagccacgtgccgccacgctccttggtcacgcgatgccgcccagtgtgccgcgcctggcgcgacatagtggacgggcccactgtgtggctgctgcagctggcccgcgaccgcagcgccgagggccgcgcactctacgcagtggctcaacgctgcctgcccagcaacgaagacaaggaggagttcccgctgtgcgccctggcgcgctactgtctgcgcgcgcccttcggccgcaatctcatcttcaactcctgcggagagcagggcttcagaggctgggaggtggagcatggcgggaacggctgggccatagaaaagaacctaacaccggtgcctggggctccttcgcagacctgcttcgtgacctctttcgaatggtgctccaagaggcagcttgtggacctggtgatggaaggggtgtggcaggagctgctggacagcgcccagattgagatctgtgtggctgactggtggggcgctcgagagaactgcggctgcgtctaccagctccgggtccgccttctggatgtgtatgaaaaggaagtggtcaagttctcagcctcacctgacccggtccttcagtggactgagaggggctgccgacaggtgggtccagactagcttccagctccccccgacccgctaaaggcacacacgcccagcctctcgtctgctcggtttcccttctgtcactcctggatatctataatcataacagctaagaagtatcgagcccttcttacatcccaagccctgtgtcaagacgcttacatatcgattcatttcattagcaaaaccccttaatgttcaacaaacactgattgagcacctactgtgtgctgggcac

SEQ ID NO: 15785 - DNA, 2403 bp, Homo sapiens
ccgccacgccccgggagaggaccgaccgcccagaccgccggtcccggggccccctgggccacgccgatcacggggagcccctcgactgcctcccagaacaaagtgggaaagggaagcttagcccgccgctgccgcctccgagcagcccgccaggactctggctactggagatgggcgcccggctatcgcggcgacggctgccggcggacccatccctggccctggacgcgctgcccccggagctgctggtgcaggtgctgagccacgtgccgccacgctccttggtcacgcgatgccgcccagtgtgccgcgcctggcgcgacatagtggacgggcccactgtgtggctgctgcagctggcccgcgaccgcagcgccgagggccgcgcactctacgcagtggctcaacgctgcctgcccagcaacgaagacaaggaggagttcccgctgtgcgccctggcgcgctactgtctgcgcgcgcccttcggccgcaatctcatcttcaactcctgcggagagcagggcttcagaggctgggaggtggagcatggcgggaacggctgggccatagaaaagaacctaacaccggtgcctggggctccttcgcagacctgcttcgtgacctctttcgaatggtgctccaagaggcagcttgtggacctggtgatggaaggggtgtggcaggagctgctggacagcgcccagattgagatctgtgtggctgactggtgagtgaggagcggcaccctgccccagagcagcaacaggcttggcagcggctctgcaacaggggctcatttcccgccccatcaaccccacgggtagcggctgtcactgtgcaccctttgtgatgaggctgagaggggaagtgatgcagagccggggaaggtagagctttggagaagccagagcccccactctgcactcctgcccaccctcatcccagcaggctggggtggtccacagggggccactgtggcttgatacccctctgaaacgagacacctcccctgaccaccttgtggatgcccagggtctgaaggggtgggagcatggtgccctgtgagctgaggctcagggagcatagttgggacaggactggcttcagagcctacaggcttaggatgaatgccttcttcccaaaacacccaggttctgccccaaagcattccagctcctccttcaggctgtggctcttccatagaaaatctggtctcttccctggggctctggctcttccctgaagtcatcaggcacctgccctgcattgtggttcttccccagagcatcctttcccgtcccccaactacctacccaaaagcctccagaatcaaccgcaggaccacccaggctcctcccccaggaccacccaggctcctcccctgctctggctccaccccaggaccacccagactcctcccccaggctctggctccaccccagggtcacccaggcttctcctccaggttctggttccaccccaggaccacccaggctcctcccccaggaccacccaggcccctcccccaggctctggttccaccccaggaccacccaggctcctcccccaggaccacccaggctcctcccctgctctggctccaccccaggaccacccagactcctcccccaggaccacccaggcccctcccccaggctctggctccactccaggaccacccagactcctcccccaggaccacccaggaccctcccccaggctctggctccaccccagggtcacccaggctcctcccccaggctctggctccaccccaggaccacccaggctcctcccccaggctctggctcctccccaggaccacccaggctcctcccccaggctctggttccaccccagaaccaccaaggctcctcccctagaggttcccaggccaggacgtctccaaatgtggtccagatgtgcaggaccttcatcaagatggagccagccctcagcctcccgccccgaaacccagagagctggctgggtgacgggggcatagaggctgactgctgcctggcaggtggggcgctcgagagaactgcggctgcgtctaccagctccgggtccgccttctggatgtgtatgaaaaggaagtggtcaagttctcagcctcacctgacccggtccttcagtggactgagaggggctgccgacaggtgggtccagactagcttccagctccccccgacccgctaaaggcacacacgcccagcctctcgtctgctcggtttcccttctgtcactcctggatatctataatcataacagctaagaagtatcgagcccttcttacatcccaagccctgtgtcaagacgcttacatatcgattcatttcattagcaaaaccccttaatgttcaacaaacactgattgagcacctactgtgtgctgggcac

SEQ ID NO: 15786 - DNA, 528 bp, Homo sapiens
tctcccatactaccttcatgcctgccccacattccctcagaggtgtcttccctgataaattatcttgtatgtctaatcccatcttggatgcatctcaattggtaaaaactaacataccaggcttgattctttgcacttagctttttttctttctctcccacaagtagtcagtagccatgttctagtgttctatgtgttacctctttttccatatgtatggaaaaaggaaggtactgttgaggtgcacttcctatgtgccaggccctgtgctcaatactttacctgtatctcatttaagccacacaataaccctgtcaggtagacattatttccattttggcaatgaaaagacagaagcttagcgtggtgtaaaatctttcctggtgtcatatggctagtgacaggtggatctgagatttgattctaggactatttgacctcaaggctaatgataatggtagtaatatggtagctgacattggttcctctgtgtgtggcatcttgtttcattgactgtattaaaccttt

SEQ ID NO: 15787 - DNA, 318 bp, Homo sapiens
tgtagataaaacatttcaagtagaaggaagaatcatgtagcttgctccatggtcaagtttgactctttaaacaaaataaattgttgactgcttccaatttttatcatatgtattgatgattgaataactgctttacatacaattacagtcatctttcttaccattttaaaatactattgcagattaagtctttgtttttaacatcagttcattggtatgcatttttaaaatagatatttcatttatttaaaaaatatttattgagtatcttctaggtatgagacactattcttggaactgagtatacagcagtgaaca

SEQ ID NO: 15788 - DNA, 1892 bp, Homo sapiens
gctcattttggaacatgaagttggcactctgaggagcctaaccttctgttaggcttcctttggggcagttggtttgcagtgatccttaataaaatagtttgcagtattttgtaggaaggatggctgtgtactcatgtgcagggaaaattaaactgctgcaagagtttggcaaaaccgccaccactttactattaatatgtctttactatttttatatgtgttttgtgggtcagcgtgttcaattttaaataggaatacactagccttacaacggaatttcttcttgtggaataaaaactgataataacctttcatcttcaagaatctgatgactgagttttgtaggaatgtacccaacagttggaccagagcctggccagttcccaccaattggagtaagctatttaattgagggttaagaagctcgatagttttttcaatctgttatcagaaaaatattatctaaagacactgatagcagctgactggtaaaactgaaagttggccttagtaaatggaactagtaaaaaatagataaaaatatgtaaaaccttttatgtcctgtcaaggaaaaaaaaataagcaaacttgatttgttttaaaattgtaaatattcattgcaaaacctaaattatacaaaatctatttcgatttgaatctcttaacatatgaaaagccacatcttaagtgcattatgctctgtaaggcatgttattagccagctttgctgaaaaatgtattcttctacagctcagaaagaggagtaaaattgctctagaaatttttgatctcagccactttgcatccaaagaggaacccaactccccactcacaatcccccacacacattttaattataagagttcaacattttccacagatatcattaagccaagcaaggaaactcctctctgtaaaaacaacaaaaaagttgcaatgtaaatagttattttagctattttctttgtgattagaggataagattttgttatttcttttggtacttagtcctttaactatctgaaaatggctcactttgacctgtttctttggtcagccaaactgaagtgaggggcctctgtttatatatagaatcttgtatatgtaactttacttatgtgggaccaatggccagtatattctaatggacacaaatctcccaatccttatgtaggattatctgttcaccttgccatgtccatcttgcaatgagacctaacttgcacctgcctgtttttctgcatgattggactccaaagactattaccaatgatgagaattgtcttgtgtcagtgtttataaaatggacttaaagcacacacacatgcatacccacattcacatgcacccttacagttctagatcaaccctggaaggcaaaaccatgtacgtccagtttctttgcaaggtctgagcagtgagaactaaattcagtcagtctaatgggtaaaatgcaacctcagtgatgcttaataaggatttgaaatcgttcaagtcatttctgtgttctttctcacaccctttcctttctattttgtcttcttttattttcaaaatgtctgtggaacaagaggatgaatcgggggagaacttctgcttcttttgactctttttaggtaatatggagtcaatatattatgatttctgtttcttatggattattaaaatcagaggaaatctgcttctctcaacataaaaccaaatccaaacccagacattgttggagtttgcctgttgacaatggttatgatgctgctcgttgtcttgagttgcatgtaacgacagtagctctgaagggtgtcatgatttcattttggcaactggtaaaagaaacttgtagtgtggtctgattgtgccagggaataaataagaaataaggaatgaactacttt

SEQ ID NO: 15789 - DNA, 448 bp, Homo sapiens
ctcagagcttcaccttctcatctctgaggccacagtggggtgggaccatggggttgggggagctgttcctgacttctgctgtcgtgacccagaaccccttggtctacagaagctttgaaatactgggagagaggaaataagaatgttgtaagctcaattaatgaggttagaaaaccatgagctagcctgggagtctccttcttttgaggcaatatgcatgtatgagaaaaaactgtgttcctaattccaaatgatttagaaacttattctttcatctagagattacctagcctctaaaatactgtaagttgggtacctgatgggtagattatcttttattagggcatttgacttgcacttctagtctttaattgcacgaaactgaagaacagattagccatttaagagttatgcagttcacattatattacactaaagtatttagctc

SEQ ID NO: 15790 - DNA, 5430 bp, Homo sapiens
gggtgtcggcgttggagttgtgaattcgctgcgtttccatgaaatcctgcggagtgtcgctcgctaccgccgccgctgccgccgccgctttcggtgatgaggaaaagaaaatggcggcgggaaaagcgagcggcgagagcgaggaggcgtcccccagcctgacagccgaggagagggaggcgctcggcggactggacagccgcctctttgggttcgtgagatttcatgaagatggcgccaggacgaaggccctactgggcaaggctgttcgctgctatgaatctctaatcttaaaagctgaaggaaaagtggagtctgatttcttttgtcaattaggtcacttcaacctcttattggaagattatccaaaagcattatctgcataccagaggtactacagtttacagtctgactactggaagaatgctgcctttttatatggtcttggtttggtctacttccattataatgcatttcagtgggcaattaaagcatttcaggaggtgctttatgttgatcccagcttttgtcgagccaaggaaattcatttacgagttgggcttatgttcaaagtgaacacagactatgagtctagtttaaagcattttcagttagctttggttgactgtaatccctgcactttgtccaatgctgaaattcaatttcacattgcccacttatatgaaacccagaggaaatatcattctgcaaaagaagcttatgaacaacttttgcagacagagaatctttctgcacaagtaaaagcaactgtcttacaacagttaggttggatgcatcacactgtagatctcctgggagataaagccaccaaggaaagctatgctattcagtatctccaaaagtccttggaagcagatcctaattctggccagtcctggtatttcctcggaaggtgctattcaagtattgggaaagttcaggatgcctttatatcttacaggcagtctattgataaatcagaagcaagtgcagatacatggtgttcaataggtgtgctatatcagcagcaaaatcagcccatggatgctttacaggcctatatttgtgctgtacaattggaccatggccatgctgcagcctggatggacctaggcactctctatgaatcctgcaaccagcctcaggatgccattaaatgctacttaaatgcaactagaagcaaaagttgtagtaatacctctgcacttgcagcacgaattaagtatttacaggctcagttgtgtaaccttccacaaggtagtctacagaataaaactaaattacttcctagtattgaggaggcgtggagcctaccaattcccgcagagcttacctccaggcagggtgccatgaacacagcacagcagaatacttctgacaattggagtggtggacatgctgtgtcacatcctccagtacagcaacaagctcattcatggtgtttgacaccacagaaattacagcatttggaacagctccgcgcaaatagaaataatttaaatccagcacagaaactgatgctggaacagctggaaagtcagtttgtcttaatgcaacaacaccaaatgagaccaacaggagttgcacaggtacgatctactggaattcctaatgggccaacagctgactcatcactgcctacaaactcagtctctggccagcagccacagcttgctctgaccagagtgcctagcgtctctcagcctggagtccgtcctgcctgccctgggcagcctttggccaatggacccttttctgcaggccatgttccctgtagcacatcaagaacgctgggaagtacagacactattttgataggcaataatcatataacaggaagtggaagtaatggaaacgtgccttacctgcagcgaaacgcactcactctacctcataaccgcacaaacctgaccagcagcgcaaaggagccgtggaaaaaccaactatctaactccactcaggggcttcacaaaggtcagagttcacattcggcaggtcctaatggtgaacgacctctctcttccactgggccttcccagcatctccaggcagctggctctggtattcagaatcagaacggacatcccaccctgcctagcaattcagtaacacagggggctgctctcaatcacctctcctctcacactgctacctcaggtggacaacaaggcattaccttaaccaaagagagcaagccttcaggaaacatattgacggtgcctgaaacaagcaggcacactggagagacacctaacagcactgccagtgtcgagggacttcctaatcatgtccatcagatgacggcagatgctgtttgcagtcctagccatggagattctaagtcaccaggtttactaagttcagacaatcctcagctctctgccttgttgatgggaaaagccaataacaatgtgggtactggaacctgtgacaaagtcaataacatccacccagctgttcatacaaagactgataactctgttgcctcttcaccatcttcagccatttcaacagcaacaccttctccaaaatccactgagcagacaaccacaaacagtgttaccagccttaacagccctcacagtgggctacacacaattaatggagaagggatggaagaatctcagagccccatgaaaacagatctgcttctggttaaccacaaacctagtccacagatcataccatcaatgtctgtgtccatataccccagctcagcagaagttctgaaggcatgcaggaatctaggtaaaaatggcttatctaacagtagcattttgttggataaatgtccacctccaagaccaccatcttcaccataccctcccttgccaaaggacaagttgaatccacctacacctagtatttacttggaaaataaacgtgatgctttctttcctccattacatcaattttgtacaaatccgaacaaccctgttacagtaatacgtggccttgctggagctcttaagttagacctgggacttttctctactaaaactttggtggaagctaacaatgaacatatggtagaagtgaggacacagttgttgcagccagcagatgaaaactgggatcccactggaacaaagaaaatctggcattgtgaaagtaatagatctcatactacaattgctaaatatgcacagtaccaggcctcctcattccaggaatcattgagagaagaaaatgaaaaaagaagtcatcataaagaccactcagatagtgaatctacatcgtcagataattctgggaggaggaggaaaggaccctttaaaaccataaagtttgggaccaatattgacctatctgatgacaaaaagtggaagttgcagctacatgagctgactaaacttcctgcttttgtgcgtgtcgtatcagcaggaaatcttctaagccatgttggtcataccatattgggcatgaacacagttcaactatacatgaaagttccagggagcagaacaccaggtcatcaggaaaataacaacttctgttcagttaacataaatattggcccaggtgactgtgaatggtttgttgttcctgaaggttactggggtgttctgaatgacttctgtgaaaaaaataatttgaatttcctaatgggttcttggtggcccaatcttgaagatctttatgaagcaaatgttccagtgtataggtttattcagcgacctggagatttggtctggataaatgcaggcactgttcattgggttcaggctattggctggtgcaacaacattgcttggaatgttggtccacttacagcctgccagtataaattggcagtggaacggtacgaatggaacaaattgcaaagtgtgaagtcaatagtacccatggttcatctttcctggaatatggcacgaaatatcaaggtctcagatccaaagctttttgaaatgattaagtattgtcttctaagaactctgaagcaatgtcagacattgagggaagctctcattgctgcaggaaaagagattatatggcatgggcggacaaaagaagaaccagctcattactgtagcatttgtgaagtggaggtttttgatctgctttttgtcactaatgagagtaattcacgaaagacctacatagtacattgccaagattgtgcacgaaaaacaagcggaaacttggaaaactttgtggtgctagaacagtacaaaatggaggacctgatgcaagtctatgaccaatttacattagctcctccattaccatccgcctcatcttgatattgttccatggacattaaatgagaccttttctgctattcaggaaataacccagttctgcaccactggtttttgtagctatctcgtaaggctgctggctgaaaactgtgtctatgcaaccttccaagtgcggagtgtcaaccaactggacgggagagagtactgctcctactccaggactctcacaaagctgatgagctgtacttcagaaaaaaataataatttccatgttttgtatatatctgacaaaactggcaacatcttacagactactgacttgaagacaacctcttttatatttctctatttctgggctgatgaatttgttttcatctgtcttttcccccttcagaattttccttggaaaaaaaatactagcctagctggtcatttctttgtaaggtagttagcaattttaagtctttctttggtcaacttttttttaatgtgaaaagttaggtaagacacttttttactgcttttatgtttttctgtcttgttttgagaccatgatggttacacttttggttcctaaataaaatttaaaaaattaacagccaagtcacaaaggtaatggattgcacatagactaaggaataaacttcagatttgtgatttttgtttctaatcttgatgtaaatttacactattataatacatatttattgcttgaaaatatttgtgaatggaatgctgttattttttccagatttacctgccattgaaattttaaggagttctgtaatttcaaacactactcctattacattttctatgtgtaaataaaactgcttagcattgtacagaaacttttattaaaattgtttaatgtttaaagagtttctattgtttgagtttaaaaaagactttatgtacagtgcccagttttgttcattttgaaatctgataaatatatttatatatacttatgtatgtatatataatatatatagaaatctggatatatatgtataaatctttagaacttaaatttttctcgtttagttcacatctatggtagatttttgaggtgtctactgtaaagtattgcttacaaaaagtatgattatttttaaagaaatatatatggtatgtatcctcaagacctaaaatgtcagactggtttattgttaagttgcaattactgcaatgacagaccaataaacaattgctgccaaaaaaaaaa

SEQ ID NO: 15791 - DNA, 5328 bp, Homo sapiens
gggtgtcggcgttggagttgtgaattcgctgcgtttccatgaaatcctgcggagtgtcgctcgctaccgccgccgctgccgccgccgctttcggtgatgaggaaaagaaaatggcggcgggaaaagcgagcggcgagagcgaggaggcgtcccccagcctgacagccgaggagagggaggcgctcggcggactggacagccgcctctttgggttcgtgagatttcatgaagatggcgccaggacgaaggccctactgggcaaggctgttcgctgctatgaatctctaatcttaaaagctgaaggaaaagtggagtctgatttcttttgtcaattaggtcacttcaacctcttattggaagattatccaaaagcattatctgcataccagaggtactacagtttacagtctgactactggaagaatgctgcctttttatatggtcttggtttggtctacttccattataatgcatttcagtgggcaattaaagcatttcaggaggtgctttatgttgatcccagcttttgtcgagccaaggaaattcatttacgagttgggcttatgttcaaagtgaacacagactatgagtctagtttaaagcattttcagttagctttggttgactgtaatccctgcactttgtccaatgctgaaattcaatttcacattgcccacttatatgaaacccagaggaaatatcattctgcaaaagaagcttatgaacaacttttgcagacagagaatctttctgcacaagtaaaagcaactgtcttacaacagttaggttggatgcatcacactgtagatctcctgggagataaagccaccaaggaaagctatgctattcagtatctccaaaagtccttggaagcagatcctaattctggccagtcctggtatttcctcggaaggtgctattcaagtattgggaaagttcaggatgcctttatatcttacaggcagtctattgataaatcagaagcaagtgcagatacatggtgttcaataggtgtgctatatcagcagcaaaatcagcccatggatgctttacaggcctatatttgtgctgtacaattggaccatggccatgctgcagcctggatggacctaggcactctctatgaatcctgcaaccagcctcaggatgccattaaatgctacttaaatgcaactagaagcaaaagttgtagtaatacctctgcacttgcagcacgaattaagtatttacaggctcagttgtgtaaccttccacaaggtagtctacagaataaaactaaattacttcctagtattgaggaggcgtggagcctaccaattcccgcagagcttacctccaggcagggtgccatgaacacagcacagcagaatacttctgacaattggagtggtggacatgctgtgtcacatcctccagtacagcaacaagctcattcatggtgtttgacaccacagaaattacagatgagaccaacaggagttgcacaggtacgatctactggaattcctaatgggccaacagctgactcatcactgcctacaaactcagtctctggccagcagccacagcttgctctgaccagagtgcctagcgtctctcagcctggagtccgtcctgcctgccctgggcagcctttggccaatggacccttttctgcaggccatgttccctgtagcacatcaagaacgctgggaagtacagacactattttgataggcaataatcatataacaggaagtggaagtaatggaaacgtgccttacctgcagcgaaacgcactcactctacctcataaccgcacaaacctgaccagcagcgcaaaggagccgtggaaaaaccaactatctaactccactcaggggcttcacaaaggtcagagttcacattcggcaggtcctaatggtgaacgacctctctcttccactgggccttcccagcatctccaggcagctggctctggtattcagaatcagaacggacatcccaccctgcctagcaattcagtaacacagggggctgctctcaatcacctctcctctcacactgctacctcaggtggacaacaaggcattaccttaaccaaagagagcaagccttcaggaaacatattgacggtgcctgaaacaagcaggcacactggagagacacctaacagcactgccagtgtcgagggacttcctaatcatgtccatcagatgacggcagatgctgtttgcagtcctagccatggagattctaagtcaccaggtttactaagttcagacaatcctcagctctctgccttgttgatgggaaaagccaataacaatgtgggtactggaacctgtgacaaagtcaataacatccacccagctgttcatacaaagactgataactctgttgcctcttcaccatcttcagccatttcaacagcaacaccttctccaaaatccactgagcagacaaccacaaacagtgttaccagccttaacagccctcacagtgggctacacacaattaatggagaagggatggaagaatctcagagccccatgaaaacagatctgcttctggttaaccacaaacctagtccacagatcataccatcaatgtctgtgtccatataccccagctcagcagaagttctgaaggcatgcaggaatctaggtaaaaatggcttatctaacagtagcattttgttggataaatgtccacctccaagaccaccatcttcaccataccctcccttgccaaaggacaagttgaatccacctacacctagtatttacttggaaaataaacgtgatgctttctttcctccattacatcaattttgtacaaatccgaacaaccctgttacagtaatacgtggccttgctggagctcttaagttagacctgggacttttctctactaaaactttggtggaagctaacaatgaacatatggtagaagtgaggacacagttgttgcagccagcagatgaaaactgggatcccactggaacaaagaaaatctggcattgtgaaagtaatagatctcatactacaattgctaaatatgcacagtaccaggcctcctcattccaggaatcattgagagaagaaaatgaaaaaagaagtcatcataaagaccactcagatagtgaatctacatcgtcagataattctgggaggaggaggaaaggaccctttaaaaccataaagtttgggaccaatattgacctatctgatgacaaaaagtggaagttgcagctacatgagctgactaaacttcctgcttttgtgcgtgtcgtatcagcaggaaatcttctaagccatgttggtcataccatattgggcatgaacacagttcaactatacatgaaagttccagggagcagaacaccaggtcatcaggaaaataacaacttctgttcagttaacataaatattggcccaggtgactgtgaatggtttgttgttcctgaaggttactggggtgttctgaatgacttctgtgaaaaaaataatttgaatttcctaatgggttcttggtggcccaatcttgaagatctttatgaagcaaatgttccagtgtataggtttattcagcgacctggagatttggtctggataaatgcaggcactgttcattgggttcaggctattggctggtgcaacaacattgcttggaatgttggtccacttacagcctgccagtataaattggcagtggaacggtacgaatggaacaaattgcaaagtgtgaagtcaatagtacccatggttcatctttcctggaatatggcacgaaatatcaaggtctcagatccaaagctttttgaaatgattaagtattgtcttctaagaactctgaagcaatgtcagacattgagggaagctctcattgctgcaggaaaagagattatatggcatgggcggacaaaagaagaaccagctcattactgtagcatttgtgaagtggaggtttttgatctgctttttgtcactaatgagagtaattcacgaaagacctacatagtacattgccaagattgtgcacgaaaaacaagcggaaacttggaaaactttgtggtgctagaacagtacaaaatggaggacctgatgcaagtctatgaccaatttacattagctcctccattaccatccgcctcatcttgatattgttccatggacattaaatgagaccttttctgctattcaggaaataacccagttctgcaccactggtttttgtagctatctcgtaaggctgctggctgaaaactgtgtctatgcaaccttccaagtgcggagtgtcaaccaactggacgggagagagtactgctcctactccaggactctcacaaagctgatgagctgtacttcagaaaaaaataataatttccatgttttgtatatatctgacaaaactggcaacatcttacagactactgacttgaagacaacctcttttatatttctctatttctgggctgatgaatttgttttcatctgtcttttcccccttcagaattttccttggaaaaaaaatactagcctagctggtcatttctttgtaaggtagttagcaattttaagtctttctttggtcaacttttttttaatgtgaaaagttaggtaagacacttttttactgcttttatgtttttctgtcttgttttgagaccatgatggttacacttttggttcctaaataaaatttaaaaaattaacagccaagtcacaaaggtaatggattgcacatagactaaggaataaacttcagatttgtgatttttgtttctaatcttgatgtaaatttacactattataatacatatttattgcttgaaaatatttgtgaatggaatgctgttattttttccagatttacctgccattgaaattttaaggagttctgtaatttcaaacactactcctattacattttctatgtgtaaataaaactgcttagcattgtacagaaacttttattaaaattgtttaatgtttaaagagtttctattgtttgagtttaaaaaagactttatgtacagtgcccagttttgttcattttgaaatctgataaatatatttatatatacttatgtatgtatatataatatatatagaaatctggatatatatgtataaatctttagaacttaaatttttctcgtttagttcacatctatggtagatttttgaggtgtctactgtaaagtattgcttacaaaaagtatgattatttttaaagaaatatatatggtatgtatcctcaagacctaaaatgtcagactggtttattgttaagttgcaattactgcaatgacagaccaataaacaattgctgccaaaaaaaaaa

SEQ ID NO: 15792 - DNA, 5237 bp, Homo sapiens
gggtgtcggcgttggagttgtgaattcgctgcgtttccatgaaatcctgcggagtgtcgctcgctaccgccgccgctgccgccgccgctttcggtgatgaggaaaagaaaatggcggcgggaaaagcgagcggcgagagcgaggaggcgtcccccagcctgacagccgaggagagggaggcgctcggcggactggacagccgcctctttgggttcgtgagatttcatgaagatggcgccaggacgaaggccctactgggcaaggctgttcgctgctatgaatctctaatcttaaaagctgaaggaaaagtggagtctgatttcttttgtcaattaggtcacttcaacctcttattggaagattatccaaaagcattatctgcataccagaggtactacagtttacagtctgactactggaagaatgctgcctttttatatggtcttggtttggtctacttccattataatgcatttcagtgggcaattaaagcatttcaggaggtgctttatgttgatcccagcttttgtcgagccaaggaaattcatttacgagttgggcttatgttcaaagtgaacacagactatgagtctagtttaaagcattttcagttagctttggttgactgtaatccctgcactttgtccaatgctgaaattcaatttcacattgcccacttatatgaaacccagaggaaatatcattctgcaaaagaagcttatgaacaacttttgcagacagagaatctttctgcacaagtaaaagcaactgtcttacaacagttaggttggatgcatcacactgtagatctcctgggagataaagccaccaaggaaagctatgctattcagtatctccaaaagtccttggaagcagatcctaattctggccagtcctggtatttcctcggaaggtgctattcaagtattgggaaagttcaggatgcctttatatcttacaggcagtctattgataaatcagaagcaagtgcagatacatggtgttcaataggtgtgctatatcagcagcaaaatcagcccatggatgctttacaggcctatatttgtgctgtacaattggaccatggccatgctgcagcctggatggacctaggcactctctatgaatcctgcaaccagcctcaggatgccattaaatgctacttaaatgcaactagaagcaaaagttgtagtaatacctctgcacttgcagcacgaattaagtatttacaggctcagttgtgtaaccttccacaaggtagtctacagaataaaactaaattacttcctagtattgaggaggcgtggagcctaccaattcccgcagagcttacctccaggcagggtgccatgaacacagcacagcagaatacttctgacaattggagtggtggacatgctgtgtcacatcctccagtacagcaacaagctcattcatggtgtttgacaccacagaaattacagatgagaccaacaggagttgcacaggtacgatctactggaattcctaatgggccaacagctgactcatcactgcctacaaactcagtctctggccagcagccacagcttgctctgaccagagtgcctagcgtctctcagcctggagtccgtcctgcctgccctgggcagcctttggccaatggacccttttctgcaggccatgttccctgtagcacatcaagaacgctgggaagtacagacactattttgataggcaataatcatataacaggaagtggaagtaatggaaacgtgccttacctgcagcgaaacgcactcactctacctcataaccgcacaaacctgaccagcagcgcaaaggagccgtggaaaaaccaactatctaactccactcaggggcttcacaaaggtcagagttcacattcggcaggtcctaatggtgaacgacctctctcttccactgggccttcccagcatctccaggcagctggctctggtattcagaatcagaacggacatcccaccctgcctagcaattcagtaacacagggggctgctctcaatcacctctcctctcacactgctacctcaggtggacaacaaggcattaccttaaccaaagagagcaagccttcaggaaacatattgacggtgcctgaaacaagcaggcacactggagagacacctaacagcactgccagtgtcgagggacttcctaatcatgtccatcagatgacggcagatgctgtttgcagtcctagccatggagattctaagtcaccaggtttactaagttcagacaatcctcagctctctgccttgttgatgggaaaagccaataacaatccatttcaacagcaacaccttctccaaaatccactgagcagacaaccacaaacagtgttaccagccttaacagccctcacagtgggctacacacaattaatggagaagggatggaagaatctcagagccccatgaaaacagatctgcttctggttaaccacaaacctagtccacagatcataccatcaatgtctgtgtccatataccccagctcagcagaagttctgaaggcatgcaggaatctaggtaaaaatggcttatctaacagtagcattttgttggataaatgtccacctccaagaccaccatcttcaccataccctcccttgccaaaggacaagttgaatccacctacacctagtatttacttggaaaataaacgtgatgctttctttcctccattacatcaattttgtacaaatccgaacaaccctgttacagtaatacgtggccttgctggagctcttaagttagacctgggacttttctctactaaaactttggtggaagctaacaatgaacatatggtagaagtgaggacacagttgttgcagccagcagatgaaaactgggatcccactggaacaaagaaaatctggcattgtgaaagtaatagatctcatactacaattgctaaatatgcacagtaccaggcctcctcattccaggaatcattgagagaagaaaatgaaaaaagaagtcatcataaagaccactcagatagtgaatctacatcgtcagataattctgggaggaggaggaaaggaccctttaaaaccataaagtttgggaccaatattgacctatctgatgacaaaaagtggaagttgcagctacatgagctgactaaacttcctgcttttgtgcgtgtcgtatcagcaggaaatcttctaagccatgttggtcataccatattgggcatgaacacagttcaactatacatgaaagttccagggagcagaacaccaggtcatcaggaaaataacaacttctgttcagttaacataaatattggcccaggtgactgtgaatggtttgttgttcctgaaggttactggggtgttctgaatgacttctgtgaaaaaaataatttgaatttcctaatgggttcttggtggcccaatcttgaagatctttatgaagcaaatgttccagtgtataggtttattcagcgacctggagatttggtctggataaatgcaggcactgttcattgggttcaggctattggctggtgcaacaacattgcttggaatgttggtccacttacagcctgccagtataaattggcagtggaacggtacgaatggaacaaattgcaaagtgtgaagtcaatagtacccatggttcatctttcctggaatatggcacgaaatatcaaggtctcagatccaaagctttttgaaatgattaagtattgtcttctaagaactctgaagcaatgtcagacattgagggaagctctcattgctgcaggaaaagagattatatggcatgggcggacaaaagaagaaccagctcattactgtagcatttgtgaagtggaggtttttgatctgctttttgtcactaatgagagtaattcacgaaagacctacatagtacattgccaagattgtgcacgaaaaacaagcggaaacttggaaaactttgtggtgctagaacagtacaaaatggaggacctgatgcaagtctatgaccaatttacattagctcctccattaccatccgcctcatcttgatattgttccatggacattaaatgagaccttttctgctattcaggaaataacccagttctgcaccactggtttttgtagctatctcgtaaggctgctggctgaaaactgtgtctatgcaaccttccaagtgcggagtgtcaaccaactggacgggagagagtactgctcctactccaggactctcacaaagctgatgagctgtacttcagaaaaaaataataatttccatgttttgtatatatctgacaaaactggcaacatcttacagactactgacttgaagacaacctcttttatatttctctatttctgggctgatgaatttgttttcatctgtcttttcccccttcagaattttccttggaaaaaaaatactagcctagctggtcatttctttgtaaggtagttagcaattttaagtctttctttggtcaacttttttttaatgtgaaaagttaggtaagacacttttttactgcttttatgtttttctgtcttgttttgagaccatgatggttacacttttggttcctaaataaaatttaaaaaattaacagccaagtcacaaaggtaatggattgcacatagactaaggaataaacttcagatttgtgatttttgtttctaatcttgatgtaaatttacactattataatacatatttattgcttgaaaatatttgtgaatggaatgctgttattttttccagatttacctgccattgaaattttaaggagttctgtaatttcaaacactactcctattacattttctatgtgtaaataaaactgcttagcattgtacagaaacttttattaaaattgtttaatgtttaaagagtttctattgtttgagtttaaaaaagactttatgtacagtgcccagttttgttcattttgaaatctgataaatatatttatatatacttatgtatgtatatataatatatatagaaatctggatatatatgtataaatctttagaacttaaatttttctcgtttagttcacatctatggtagatttttgaggtgtctactgtaaagtattgcttacaaaaagtatgattatttttaaagaaatatatatggtatgtatcctcaagacctaaaatgtcagactggtttattgttaagttgcaattactgcaatgacagaccaataaacaattgctgccaaaaaaaaaa

SEQ ID NO: 15793 - DNA, 2439 bp, Homo sapiens
ggtcgcaccactgcactccagcctggtcaacaggagtcaaaccttgtctcaaaaaattaaaaacatgaaacttagtttcaaaacacaaataatactattcaatctagatatgaactttttttcagttgtatggtggaaaggattgccagttgtagaacactaaactagactgctttttgcttaatctataggaagaaaatgaaaaaagaagtcatcataaagaccactcagatagtgaatctacatcgtcagataattctgggaggaggaggaaaggaccctttaaaaccataaagtttgggaccaatattgacctatctgatgacaaaaagtggaagttgcagctacatgagctgactaaacttcctgcttttgtgcgtgtcgtatcagcaggaaatcttctaagccatgttggtcataccatattgggcatgaacacagttcaactatacatgaaagttccagggagcagaacaccaggtcatcaggaaaataacaacttctgttcagttaacataaatattggcccaggtgactgtgaatggtttgttgttcctgaaggttactggggtgttctgaatgacttctgtgaaaaaaataatttgaatttcctaatgggttcttggtggcccaatcttgaagatctttatgaagcaaatgttccagtgtataggtttattcagcgacctggagatttggtctggataaatgcaggcactgttcattgggttcaggctattggctggtgcaacaacattgcttggaatgttggtccacttacagcctgccagtataaattggcagtggaacggtacgaatggaacaaattgcaaagtgtgaagtcaatagtacccatggttcatctttcctggaatatggcacgaaatatcaaggtctcagatccaaagctttttgaaatgattaagtattgtcttctaagaactctgaagcaatgtcagacattgagggaagctctcattgctgcaggaaaagagattatatggcatgggcggacaaaagaagaaccagctcattactgtagcatttgtgaagtggaggtttttgatctgctttttgtcactaatgagagtaattcacgaaagacctacatagtacattgccaagattgtgcacgaaaaacaagcggaaacttggaaaactttgtggtgctagaacagtacaaaatggaggacctgatgcaagtctatgaccaatttacattagctcctccattaccatccgcctcatcttgatattgttccatggacattaaatgagaccttttctgctattcaggaaataacccagttctgcaccactggtttttgtagctatctcgtaaggctgctggctgaaaactgtgtctatgcaaccttccaagtgcggagtgtcaaccaactggacgggagagagtactgctcctactccaggactctcacaaagctgatgagctgtacttcagaaaaaaataataatttccatgttttgtatatatctgacaaaactggcaacatcttacagactactgacttgaagacaacctcttttatatttctctatttctgggctgatgaatttgttttcatctgtcttttcccccttcagaattttccttggaaaaaaaatactagcctagctggtcatttctttgtaaggtagttagcaattttaagtctttctttggtcaacttttttttaatgtgaaaagttaggtaagacacttttttactgcttttatgtttttctgtcttgttttgagaccatgatggttacacttttggttcctaaataaaatttaaaaaattaacagccaagtcacaaaggtaatggattgcacatagactaaggaataaacttcagatttgtgatttttgtttctaatcttgatgtaaatttacactattataatacatatttattgcttgaaaatatttgtgaatggaatgctgttattttttccagatttacctgccattgaaattttaaggagttctgtaatttcaaacactactcctattacattttctatgtgtaaataaaactgcttagcattgtacagaaacttttattaaaattgtttaatgtttaaagagtttctattgtttgagtttaaaaaagactttatgtacagtgcccagttttgttcattttgaaatctgataaatatatttatatatacttatgtatgtatatataatatatatagaaatctggatatatatgtataaatctttagaacttaaatttttctcgtttagttcacatctatggtagatttttgaggtgtctactgtaaagtattgcttacaaaaagtatgattatttttaaagaaatatatatggtatgtatcctcaagacctaaaatgtcagactggtttattgttaagttgcaattactgcaatgacagaccaataaacaattgctgccaaaaaaaaaa

SEQ ID NO: 15794 - DNA, 2220 bp, Homo sapiens
gggtgtcggcgttggagttgtgaattcgctgcgtttccatgaaatcctgcggagtgtcgctcgctaccgccgccgctgccgccgccgctttcggtgatgaggaaaagaaaatggcggcgggaaaagcgagcggcgagagcgaggaggcgtcccccagcctgacagccgaggagagggaggcgctcggcggactggacagccgcctctttgggttcgtgagatttcatgaagatggcgccaggacgaaggccctactgggcaaggctgttcgctgctatgaatctctaatcttaaaagctgaaggaaaagtggagtctgatttcttttgtcaattaggtcacttcaacctcttattggaagattatccaaaagcattatctgcataccagaggtactacagtttacagtctgactactggaagaatgctgcctttttatatggtcttggtttggtctacttccattataatgcatttcagtgggcaattaaagcatttcaggaggtgctttatgttgatcccagcttttgtcgagccaaggaaattcatttacgagttgggcttatgttcaaagtgaacacagactatgagtctagtttaaagcattttcagttagctttggttgactgtaatccctgcactttgtccaatgctgaaattcaatttcacattgcccacttatatgaaacccagaggaaatatcattctgcaaaagaagcttatgaacaacttttgcagacagagaatctttctgcacaagtaaaagcaactgtcttacaacagttaggttggatgcatcacactgtagatctcctgggagataaagccaccaaggaaagctatgctattcagtatctccaaaagtccttggaagcagatcctaattctggccagtcctggtatttcctcggaaggtgctattcaagtattgggaaagttcaggatgcctttatatcttacaggcagtctattgataaatcagaagcaagtgcagatacatggtgttcaataggtgtgctatatcagcagcaaaatcagcccatggatgctttacaggcctatatttgtgctgtacaattggaccatggccatgctgcagcctggatggacctaggcactctctatgaatcctgcaaccagcctcaggatgccattaaatgctacttaaatgcaactagaagcaaaagttgtagtaatacctctgcacttgcagcacgaattaagtatttacaggctcagttgtgtaaccttccacaaggtagtctacagaataaaactaaattacttcctagtattgaggaggcgtggagcctaccaattcccgcagagcttacctccaggcagggtgccatgaacacagcacagcagaatacttctgacaattggagtggtggacatgctgtgtcacatcctccagtacagcaacaagctcattcatggtgtttgacaccacagaaattacagatgagaccaacaggagttgcacaggtacgatctactggaattcctaatgggccaacagctgactcatcactgcctacaaactcagtctctggccagcagccacagcttgctctgaccagagtgcctagcgtctctcagcctggagtccgtcctgcctgccctgggcagcctttggccaatggacccttttctgcaggccatgttccctgtagcacatcaagaacgctgggaagtacagacactattttgataggcaataatcatataacaggaagtggaagtaatggaaacgtgccttacctgcagcgaaacgcactcactctacctcataaccgcacaaacctgaccagcagcgcaaaggagccgtggaaaaaccaactatctaactccactcaggggcttcacaaaggtcagagttcacattcggcaggtcctaatggtgaacgacctctctcttccactgggccttcccagcatctccaggcagctggctctggtattcagaatcagaacggacatcccaccctgcctagcaattcagtaacacagggggctgctctcaatcacctctcctctcacactgctacctcaggtggacaacaaggattgccgagagcccccagaagctgggagaggggcctggaacagcttctcacccagaaaaagccaaccctgcatgacgggtggtgagcacctcgtccttggaggcatttaagcagagaggctggggggatgctgtggcaccgagccgtccacg

SEQ ID NO: 15795 - DNA, 510 bp, Homo sapiens
atgatgtgaatatattgttggtgatactggttactgacaatttggtggaggtttttaaatttagctattactttggtccgtttacataattgtgatttaggttaatagaaaaaatttgattataaaatgtaggtgaaatttgatgctactaataaatactatagccccataagtatttcctggcatctgcagaaattaaataaataagtgaaatttcagtcctttcacacttaattctttctcggatgggatgacatagcagttagattcagggcttcagcgtatggttctgcaaacttggcacatagctcaggttgtgcagaggccctagttttttatgggaactggatacagtgccgtaaaatgctttaccttcttcctttaaaaaaaaaaagcacttaaaatattatcccaaatataattttcattttttaactacatttatgtattcatgaagacctgggacttttctctactaaaactttggtggaagctaacaatgaacatatg

SEQ ID NO: 15796 - DNA, 116 bp, Homo sapiens
tcataaccgcacaaacctgaccagcagcgcaaaggagccgtggaaaaaccaactatctaactccactcaggtaataggaggactagcttccttgttggcttttcacataaatgttt

SEQ ID NO: 15797 - DNA, 386 bp, Homo sapiens
  misc_feature (172)..(172): n is a, c, g, or t
  misc_feature (203)..(203): n is a, c, g, or t
  misc_feature (258)..(258): n is a, c, g, or t
cctccaaatgtagaggtgctcttggagactctagcatattagtcttgttctcttacacgttttgtcttctatgaagatgggagccaattcccagggggcatggggcaataccagaaaattaccttgagggattttatgctaagaaggaaatgatgtcctgtgtcccttaaanccaagaggtcctagcaggcctggtggctgtnaagccaatgtttcaaaatgatgatttgacttgcttattcacaaaatttgtttggnatttgagacataattcatttaattagtagcaaacaggatggtaatttggaatatgtgaaagtgattggttctctctgaaacctcaaggaacagcatctttcactcaatgagaaggttaaaacaaaagc

SEQ ID NO: 15798 - DNA, 300 bp, Homo sapiens
acatagtgatgacaagaagaccaccagtagttggtacacttattctaggattctctgctgtccttaacctgtcatttttcttgcttgtgcctgggtgttctctttcattttcttttcttttgagacagagtcttgctctgtcacccaggctggagtgcagtggtgtgatctcggctcactgcaacctctgcctcccatgttcaggagaattacttgaacctgggaggcggaggttgcagtagaccgagattggccactgcactccagcctgggcgacaggagtcgtccccaccaaatgca

SEQ ID NO: 15799 - DNA, 251 bp, Homo sapiens
ggaaaattatttgaatatgagcttgtgtttttgtatatctatagactttaaaatctcattttaattaaaactagtaatgaatgccatgatattttaaatatagtccaaaatagagggcttagtgtatgtttcatttggttggcaaatgatgtttcttcaaagcctgaggaccaaaaaaacctgcaaaattctcagaggcatgagtgtctcacagagttaaaaagtttttagcacagccataataaagaatg

SEQ ID NO: 15800 - DNA, 401 bp, Homo sapiens
gcacgccagtgttcccagctactctggaggcttaagacaggagaatcacttgagccggagaggtggaggttgcagtgagctgaaattgtgccactgcactccagcctgggcgacagactgactctgtccccctgccagcgcccccaccaaaaatgactcatgtttatggtgaggctcttgtaggtcttagcagtcttgctgtatgatttttttctttccttattaagtcaagagcgttcactttttcacttaaaggaagcactttatggcttctctttggcatttctgaattggcagcaccactactcttgtggtttggagccattgttaaataaaatcagggtgacttgaacacaagcactgtaataatgtaacagttgatccacccctactccctcaaa

SEQ ID NO: 15801 - DNA, 399 bp, Homo sapiens
atacaactcagttacatttagtatattcacaatgttgtgtaaccatcactacttttctgtttccagaacgttttcaccccagacagaaactctgtaaccagccaggcgcagtggctcaggtctgtaatcctagcactttggaaggccgaggggggtggatcaactgaggtcaggagttcgagaccagtctagccaacatggtgaaccccgtctctactaaaaatacaaaaattagtcaggcgtggtggcgggtgcctgtagtcccactactcgggagcctgagccagaagaattgcttgaacccagggggcagaggttgcagtgagccaagatcgcgccactttactccagcctaggtgaaaaagcaagactctgtctcaaaaaaaaaaaaaaaagaaa

SEQ ID NO: 15802 - DNA, 376 bp, Homo sapiens
aaaatgaaaagcaagaagttaaaacatactaccacacaaagtccttatacacaaaaaagaaaggaagaaggtatatagaggacttacaaagtaaccacaaaacaaataacaaaacggcagttataaattcttacctattaattgcattgaatgtacatggactaaattctccaattaaaagacatgaaatagctgaatgggttaaaaaacaaggcccaactctaagttcctacaagtaattgtacttcacctgtaaaattacacctgcactagaaatgaatggagagaaaaaggtattccatgcaaacagagggcaaaaaagagcaggagctgctatggtgatatccaataaaatagatttcacatcaatactgta

SEQ ID NO: 15803 - DNA, 414 bp, Homo sapiens
gaaaaacatctgacaaattcaaattgagggacattctgtaaaatatctgaccagagtcttattaaaactgtcaagagaagtctgagaagctgacagtccagaaaaggctaaggagacatgatgacaaaatgtgatatggtatcctggataggatcttgggaagagaaaaggggcgttagggaaaaattaaaggggatcaagaaagaaggacagagtgagaccttacttctctaaaaaataataaatagtaagtaaaaattacctttgtaatattcttttttattagaatacgatgaacatctcttagtgtcaataaattcccatctacaacccagttgttaatgacttatcctattgtttggatatatgaaacttaaacggtctaattattagacctttgttaagtttccttta

SEQ ID NO: 15804 - DNA, 307 bp, Homo sapiens
gacaatatgtgattccttttatagcctgtgaacaaattgaaaataggagttatgtctcttacctggtacacaataagtacttcacttatgtttgttaaatgaataaattaatggcatataaatagctgtgcttccatattagaattagagcataaaataagacagtaaatgcctaactcctaggagatgtttcatttcaggaaaaatgttactgctgccttctgctagtccacaggagtgcctgattctaagtgaatgtgaattgtactggccaggacatagagaagcagaaggactctcaccactg

SEQ ID NO: 15805 - DNA, 445 bp, Homo sapiens
aacaactccaagttccattttagaatgttaaagatctaaaaaatgtttccaaattaatttttctctcaaaggtttgctgatgcgcaccagactgtaaataattgccctaactgatggccaggcccttattctcagaaggggatataggtgtctttgtgggatgggtatccttaagcaggatctgtgctcctaagaacagcagcaacaggcagtgcagggaccttctgttgaattctacctgtaaaccacagcctgtctggaaggtctgactccaggccactcagccttggcaagcatgtacttccgaaagcgcctggcagaaatgggagctgatagacaggcgcacatggcagggggagatccttgtgcagtggcttgacactaactagaccagagaccatttcccatgttctttttcataacaccagaagcaccaaggaaagag

SEQ ID NO: 15806 - DNA, 277 bp, Homo sapiens
tctgtggtggtctggctttgatgtatgtatatgtgggcaggaatgtgtgtgcgtgtgtgtgtgcatgtgtgagctcctgtgtgtgtgttcatcacgtatccattgtgtctccaaggtcttatcaacagcaacaaaaggcctcctttgagatcaatcacattcattcgatgtttgttttctactacctgatacttactgctttctctttgtcgccgttaattttgtttgtcatatgtcagaccaggatgagtggggcacatacagattcagctcattt

SEQ ID NO: 15807 - DNA, 410 bp, Homo sapiens
tcggcaggggctttttaatgacccaggcggtcccctactttgcagagggctccggggggccagtgcccactaccagcaccttgattcttcctccagagtacagttcttggggctacccctatgaggccccaccgtcttatgagcagagctgcggcggcgtggaacccagcctgacccctgagagctgaccccgtgctgccttctccaggcaggcctggcctctgccctgggactggggcgcccagggcctcgtgccttctctcttggcctagcctggcccactcaggacctgcccagcctctgccagctcctctggcatccgccctcttctccctggggctggggtgggggtggcagggagctgggacctggagagacaactcctgtaaataaaacactttatttgtaga

SEQ ID NO: 15808 - DNA, 565 bp, Homo sapiens
ctgctggccaccttgagttctgtgcctggtgcgccggagccctgccctcaggatggcagccctgcctcacacccgctgcaccctcccttgtgcatttcaacaggtgccactgtcccctactttgcagagggctccggggggccagtgcccactaccagcaccttgattcttcctccagagtacagttcttggggctacccctatggtgagtcgacagccagggcttggcagggaggggacgccaagagccccacgcagaccctgctttcttcccgcagaggccccaccgtcttatgagcagagctgcggcggcgtggaacccagcctgacccctgagagctgaccccgtgctgccttctccaggcaggcctggcctctgccctgggactggggcgcccagggcctcgtgccttctctcttggcctagcctggcccactcaggacctgcccagcctctgccagctcctctggcatccgccctcttctccctggggctggggtgggggtggcagggagctgggacctggagagacaactcctgtaaataaaacactttatttgtaga

SEQ ID NO: 15809 - DNA, 862 bp, Homo sapiens
agaaccagtcaggcaaggacaccagccctgtggtggccagtctgctgcagaaagtgtcctataaggccaagcgctggatccacgacgtacggaccattgcggaggtggagggtgcgggcgtcaaggcctggcggcgggcgcagtggcacgagcagatcctggtgcctgccttgccccagtcggccctgccgggctgcagcctcatccacatcgactactacttacaggtctctctgaaggcgccggaagctactgtgaccctcccggtcttcattggcaatattgctgtgaaccatgccccagtgagcccccggccaggcctggggctgcctcctggggccccacccctggtggtgccttccgcaccaccccaggaggaggctgaggctgaggctgcggctggcggcccccacttcttggaccccgtcttcctctccaccaagagccattcgcagcggcagcccctgctggccaccttgagttctgtgcctggtgcgccggagccctgccctcaggatggcagccctgcctcacacccgctgcaccctcccttgtgcatttcaacaggtgccactaggccccaccgtcttatgagcagagctgcggcggcgtggaacccagcctgacccctgagagctgaccccgtgctgccttctccaggcaggcctggcctctgccctgggactggggcgcccagggcctcgtgccttctctcttggcctagcctggcccactcaggacctgcccagcctctgccagctcctctggcatccgccctcttctccctggggctggggtgggggtggcagggagctgggacctggagagacaactcctgtaaataaaacactttatttgtaga

SEQ ID NO: 15810 - DNA, 926 bp, Homo sapiens
ggctggtccgtctgctgcagaaagtgtcctataaggccaagcgctggatccacgacgtacggaccattgcggaggtggagggtgcgggcgtcaaggcctggcggcgggcgcagtggcacgagcagatcctggtgcctgccttgccccagtcggccctgccgggctgcagcctcatccacatcgactactacttacaggtctctctgaaggcgccggaagctactgtgaccctcccggtcttcattggcaatattgctgtgaaccatgccccagtgagcccccggccaggcctggggctgcctcctggggccccacccctggtggtgccttccgcaccaccccaggaggaggctgaggctgaggctgcggctggcggcccccacttcttggaccccgtcttcctctccaccaagagccattcgcagcggcagcccctgctggccaccttgagttctgtgcctggtgcgccggagccctgccctcaggatggcagccctgcctcacacccgctgcaccctcccttgtgcatttcaacaggtgccactgtcccctactttgcagagggctccggggggccagtgcccactaccagcaccttgattcttcctccagagtacagttcttggggctacccctatgaggccccaccgtcttatgagcagagctgcggcggcgtggaacccagcctgacccctgagagctgaccccgtgctgccttctccaggcaggcctggcctctgccctgggactggggcgcccagggcctcgtgccttctctcttggcctagcctggcccactcaggacctgcccagcctctgccagctcctctggcatccgccctcttctccctggggctggggtgggggtggcagggagctgggacctggagagacaactcctgtaaataaaacactttatttgtaga

SEQ ID NO: 15811 - DNA, 563 bp, Homo sapiens
  misc_feature (18)..(18): n is a, c, g, or t
  misc_feature (62)..(62): n is a, c, g, or t
  misc_feature (67)..(67): n is a, c, g, or t
  misc_feature (80)..(80): n is a, c, g, or t
  misc_feature (82)..(82): n is a, c, g, or t
  misc_feature (92)..(92): n is a, c, g, or t
caccccaaggagacacantttcgacacgacggacagacaccactgacgtggacacaacactntgagnttactgatgacantnaaaaaagaangagagacacatgaccctacaggagtggacagacacactgacactaaacaacccgctgcaccctcccttgtgcatttcaacaggtgccactgtcccctactttgcagagggctccggggggccagtgcccactaccagcaccttgattcttcctccagagtacagttcttggggctacccctatgaggccccaccgtcttatgagcagagctgcggcggcgtggaacccagcctgacccctgagagctgaccccgtgctgccttctccaggcaggcctggcctctgccctgggactggggcgcccagggcctcgtgccttctctcttggcctagcctggcccactcaggacctgcccagcctctgccagctcctctggcatccgccctcttctccctggggctggggtgggggtggcagggagctgggacctggagagacaactcctgtaaataaaacactttatttgtaga

SEQ ID NO: 15812 - DNA, 715 bp, Homo sapiens
gtggagctgggaatgagggttggttcaggccaggtcctgaaggcctcggctgagctggtgtgtggcaaggagcagaaaatcctcaggttgtgagcctgccgtgtgagcgatctgggtttgatctgtttggagaaagaagtagattaaggctaataaactaatgaggggcctgatgtagtggtccaggcctcatgtccgtgtctagatggcagatggagaaggcagacactggggtggttgtgtggaacctgagaaagtgggccggcctgctgagagctggcatgatttgggggattgcccatagcccctttgactctcattttcctaataatttgtttccctgtgcccacaagggtgggcttgggggtgattgtgaatagcctagatgtgtgtaatgcattaaaaaaaaaaaaagccacctctatccaaattatcgacagcgtggtggagtaagagggaccctggccaggttctgggcatgtctgtcttctgctttgggccttagtttcccctttagtgaaaatggcagagggtaggggaacatcggaccagtgcctgaggtgtgctagcacgcccccgtgactgccgcctttgtttccaggagtttgaggatcaagcatgcagggcagggtggctccattcttggcaagtggagcggaaaataccagtgtcttgcagcaagtcccagagggtgtgggatgggtgtgtgtgtgta

SEQ ID NO: 15813 - DNA, 452 bp, Homo sapiens
gggtgtgagatgggcagtaccctgcaggtgtcatgtgctactgagttaccccgttatttaattaatgcagcctgaggccaaccccaaagcttctaaggcagcagggaaatcacctgtgctacagtctgttcctgaccctctgtcctgcttcatagatgaggtaacgaggcgcttggcccccctgacaagggttcggccatgacaccacgcatgttggctctggagggagcagccagaagagggtgtggtgggccacatgctgtcaggcgtccccaccaggccaggctggtgagcacagagggtgacagctggtcccaccgtgaagggacctagctggctctgcctgtctgcagccgacactcacctcctgggcccttgattggcttgtcagggcactgcaccccagctgctttctgtgttttttctcatcccccccacccagtccttgtgtt

SEQ ID NO: 15814 - DNA, 231 bp, Homo sapiens
cagcatccctggcctcccccgagccagatggtggggactgtccccgccctcagtggtgaggaccagaaatggctccagacattgcctcgtgccctggggaagattcacccaccacacttcctgtaaactggtcactcggcctggaggtggatttcgtaagccacttcctgttgcttcatccccagctgctttctgtgttttttctcatcccccccacccagtccttgtgtt

SEQ ID NO: 15815 - DNA, 521 bp, Homo sapiens
gaaacaaaatgatgcctatataattgcctcatggaaaagattccctatcatgttacagaaacatagtccactatgtaatgaccttggtggatgatagcgtccagattcctcttcagtatggtgtgtggttggttgttagtttgtacagaatgaatgatggcctctgtttgcctgccagccaaatgtgggacactcagaaaagcaaatttttcacatcagacagatctggattcagattttgggcttacttcattctgcctttgccactttggtcaatttaattacctttagttttatcacctgtaagatgggaatactgtttcttgattcataatgttattgtcaagatgaagtaaaagagttaatagaaaagacttccacgctgctggaaaaaatagtagtcactcaattctttgccattttcagcttgtcttattgttgagctaaacaaaattcccaaggagatttgtaaatttattgaacacattttattgaagaggtggtaggagctttggttcagc

SEQ ID NO: 15816 - DNA, 564 bp, Homo sapiens
ctaaaattccaatatgctacagtttctagaataaatagttggataatagataatgaatgaaaaatatcttaccagctttgttatgctatctcccacagtgcacaggtggaataaattcacaggaaacatggaaggagaaggaagcagaagggcttaaaatttaaagattgtttactcacaagtatttcttttagcagaattcatgccaagtgaagagtgagtttaagtcgaccaaaagtcatataactgatgtgatataattgcatagcatacatagtgagaatgaaggtattcagggaaattattcaggagtgccacaaataaaataaataaataaatctaatgcttgtagtttgtaagtgatctggtactatgtctactcagatatctggatatgaccagcctttgtttttgctgtcaagtgacagaaacatataaacatactatttttcctctctgatgtgtctgtactaaaaaattgggaatttttggaacatcttattgacctctgtgtctaaatgttatttataaataaaacacatacagctttgaaatatcttaagc

SEQ ID NO: 15817 - DNA, 524 bp, Homo sapiens
ttaaatactagggactgatatcactgttgatagtgcagagaaaccctccataattaagttttctgtaaaagccttcgtgttttctgagcagaatgtacgaggtgtgccatcccaaaaccagctgctaccctgtccttttaatgtaagtcactctcctttgctgtggccttgctgatgtctgataagtattgtcagtgtgcaaaaggctttatttcagaatgttttatttatagcaaaccaagtctgaaagttttaagaacacagtctttgtgggtggatgttattaactgtcattgttgttgcccagagccatgggttttttaaccccaaattatccacatggtgtgtatatgaattctttgaactcttaaggtttttgtgagaaaaggactgtgaaatcaaaacaatgaggcacttgtgggtgcactacatagattctgacagtgttgtgattctgataggatttttaaaaatgacaacattcacaaaacttactactttctaaaaagtaacatgtctgttaa

SEQ ID NO: 15818 - DNA, 328 bp, Homo sapiens
aggattattaactaaaatccatttaattagagcattggttgtttgaggaacttatgaccttaaggaagaaaaatagagttggaccacagttagtagtatttgtatcctttgtaggttttatttaactgtttactagaataaaacaataagacaatatgacaaataaagtgaaaatgattacacaatttaactgtgtgtttatcagtagcataacattacctttcttagacccgtttttggttctacatcccccaaattttaatgacatgttcctttcatttttcaaattaacatgattactaagggttttatgtgtatatgtgtgttg

SEQ ID NO: 15819 - DNA, 427 bp, Homo sapiens
gcccaaagtgagaacttacatccctgttttcccacttgaatgttgccttttccaaaaccacccatgacctgccccacccccacaacccatgcccatcaaaaccccaggctcagccagcagagagagagaagcagctggacatcagagagaagaggcttgacttcaggggaacagccttttcagctccctttcccgctgagagccactttcttcggcaataaaatcccccacatttaccatcttccattcgtttgtgcgaccccattcctcctggacactggacaagagcttgggtgccatgagtgcaagtgccaaagtctgtcacgctgacccaccactgggcggttaatacttgagctgtctggaccgcagagctacaagagtactgtaaaccttcctctgggtgacagagggagactgtctcaaa

SEQ ID NO: 15820 - DNA, 507 bp, Homo sapiens
gcctcagaatcccatgttttaaaaaagtttgtctcctacactgcatttatagttttattaatcaggcacatagaattaccatttcggagcttgtgatcaccatatgtagttatcactccaagctgcttaaattccagtctaaaacaaacaaaacattctaattattctgtgctaccctgacaggggtaagtgaaaactttccattcaggtttgtaagaacgagctcccagacctccacctcttccccttgctgcctctgaggactcttggaggtctagggaggccagtttgggttttcttgctcaagaaagtagccaccccacccaatttggaaggattaaagcttgtcctagttttgcttcattgttgtacttctagcatgctaaagagctaaaaaatgggaggaagaaaatacaacagaaggcaccattccagtaccaaactgaaaagaaacacaaaaacaagagagcagcatgtttttaacagcttgcgtggaaaaaatattga

SEQ ID NO: 15821 - DNA, 402 bp, Homo sapiens
atagagagtcctggaaagaatggtaaatgtcaaccaattcaaatagttttaacagatgaagaaacaagaccagagaggttacatgccttatccagggtcacacagatagtcaatgtcagagagagaacttagactcctggtttctcactcgtagcgcttaacttttctcatttctcactgtaaaaacatctcaaatagtctgccctttatttaaaaagagatgaagtgagcatctgtagaagcccagaaggttttagaacataaagcagatagaagatcaatttcctctctgacaatgattccttgcaaagagttgggattattttggttcaattaaaattactatgctccttttatgagaaatatattaagaaaggagataaattggtaccacatgagtaa

SEQ ID NO: 15822 - DNA, 335 bp, Homo sapiens
taaagttacccagtatgcattgggtagctgggtgacctcttatgtacccttggaggccagggccaagagaccatcccgtcatggggtgaagaggggccttggcagagaggttgcagaggaggctcctgggggaggactcctcttcccaagcttttcaggtcctgggatcctggggtccagggtgggcagcccaggccttaccttagccccagtcacccagtctacagagcgtcttacatgctgctgtgcatctgacatggttgtgggcaccctggagatcccagcagcattgcagacggcatccttgtccacaaggatattataatttgcgtaaa

SEQ ID NO: 15823 - DNA, 277 bp, Homo sapiens
ggttggtaaagatagtggtctgacttcctacaagtctgacttgtggatagtaggctggcttcctgtgctggttgctgctattgtgcgtcagagttctgtttttctacatggtctagccattgtctgtttgtatattcagcctctcccaggcaagggccactgtcagtcacttcacccctgatgtatatggaagccatttggtccttcactgtcaggtgtctctgctccaaagcagagtggaagagcctaggcaacacagggagaccctgtttctaca

SEQ ID NO: 15824 - DNA, 423 bp, Homo sapiens
gattgtatcagtaataaagtctcccagtaaagaaaacctcaggattgcacgggttttctactgaattctaccaaacctttaaagaactaacatgaattcttctcagacaattccaaaagactgaagagaaaggaattctccctaactcattctgtgaggcaagcagtatcttgataccaaaaccagataaggacacaataacagcaaaaaagaaaactacaggccaatctccctgatgaacatagatgcagaatcctcagaaacaaaacacacacacagacacacaaactagcaatctgaatccaatcgcacatcaaaaagataatacaccataatcaagtgggatttatcccagggattcaaggatggttcaacatatacaaatcaataaatgtgatacatcacattaacagaaggaaggac

SEQ ID NO: 15825 - DNA, 727 bp, Homo sapiens
aacatattccttcccatatctctcatgattgtccctctgtaatttcaaaatgaatgaaattcatgtgaatgtaggttgagagggcactgaagacctgaatctacactagtaatctcaagaaagattattcattctatctcagagttaccggcaagcatataaaatgctacttggataatatctacatgaatattgcatgctacatggttgataacactatttccattattgggcagaatctcagtgtttactttcaattcctaggatatgtgatcgtgaatcagatcacatataaaaagtctggattgtcagtagtattagatctgatcaaggtaggaattacaattgcatgcaggtagcaagcaagaaagcagaaactactgttccctttattttaacattgtacagacaatacagaaatgtacctgttggcggccgggtgcagtggctcacgcctgtaatcccagcacttcgggaggccgaggcgggtggatcacgaggtcaggagatcaagaccatcctggctaacacggtgaaaccccgtctctactaaaaaaaaagtacaaaaaattagccgggcgtggtggcgggcacctgtagtcccagctacacgggaggctgaggcaggagaatggcatgaacctgggaggcagagcttgcagtgagtggagatgcgccactgcactccagcctgggcgacagagcgagactccgcctcaaaaaaaaa

SEQ ID NO: 15826 - DNA, 159 bp, Homo sapiens
tctggcttctgccctgcaaatcccacacctcttgaccttcctgacctgcctgtctcctcaactcagtgaggctgctgactccgccttccctctgcttccaggccgttcactgggctctccttgttggtttctgttctcctagaaattattgtactgcat

SEQ ID NO: 15827 - DNA, 728 bp, Homo sapiens
gttaattggccaagaaattgcaagctgggggaaaaattataaatactgggaaataaaggattcttcatagggaacgaaacagggtttgttaatgatttatgggaattatgtgaagggccacattatgcatcaacaataccctccagcctatatttcaagcacatgcagttttttgccgcagtgcttctgctgcaaagacctacccccacttctcttagcctgtctgtccccactccatacccccgacctttcatccagctggcctgtgcttgctaaagctccctttatcctttcccagctccctttccatgttggagtaggttccccccttccatgctctcatagcaccctgcaaccttattaggctgtaattattacatagttagattgatctccaactagattgtcatctctttggtggagagattacgttcttgtgtatcttcagtgcctgacacagaagtgtttctaaaagtaacatctgcacacccctcaaacagaatcacaaggggcgaggccaagaaatctgctctccaagtgataacttaaactttttaacatgctcttcaggtgacacttaaacttgtttgaaaacctctgtgtcataaaactaaatattagctggatgaatgtatttgtatctttttctgtgttggcctttgtgaggagaaatgctgtctatgcaccaaatcagagctgaaaaattctagtgttttgttaaaaaaaaa

SEQ ID NO: 15828 - DNA, 1795 bp, Homo sapiens
attggaaacagtatgcatgaagacatgaaggcaagaaacagcaaaacaaatactgaagcatgaagattcctggggtggggggaaagcagcaagaaaaggtagagaggaaccagattggaagagggtcgtaaatgcatggctacagaattcagatttgttttgtaggacagtgtggttcccaaactggctgtataccacaaacaggtacggcattctgggccccggcccctaaaacattcattaagtctggggtgaagatttggaatcttgaatgcttataaaggttaccacatgactagggtacagccagatttggaaaccatagcttgaaggcagtgagggagccatgaaatggtttttaatagggggactccagatcagatgtgaacttaacctgtttctggctggctagccaaccagcatggaaaacagattaggttagatgttcatgctgtatgtgcccgtgcctgtagcttccctgttaatcagcttcttacactactatatttgcttattttgtctctgaataagctttaggcaccacaagggtgggcctggggatattttgcttaccagtatagcccctgcaaaaaagcacagtgcctgacacaaaacaggcacccagtaaagtttttgaatgaatgaatgcatgagtgaatccatttgtgagagagcgaatggagatgacaagattagctaggagactggaaaaagaccaggaggcctgcactagggcaaaggccagtaggaatagattggaggtgttaaggtgtgaactgttaaggtaagatgataacttaatgactgattattggatgtggagggtgactgagaggatagaatgagtacccatgaatagccatgattcctaccctgtcccagtcatctctttccttatccatctctgaaacaatctgcttacatcctcctcagcaactggaattcctcaagttagttagacattctgtgtgctgtgtggtctctcactgcccccccactccccacccctccacaagccattgattcattcatccagttcaataaatcttggctaagcacctccagtgtgcagtaaggctcttccaagccaggactctgactccctctttcctacctcaagagatgtttttgagggctttcccaggtaagagtcacatctcttatacaataacttatagtgagatacccagaatgtcagacttgtaagggaagactgcccaaaccccttctgaggtcctcagaggggaattaacttcctaaggtccgactgctaggaagtgttggagccagaaatggaacctaggtttcctttctatgtcatctctggagtcttgatcttgatctatcccattgtagatcaggacaggcagaggtggtcagggagaaggtgggacttaggttgaaccttgaaggtcaatgtattggacaggtcaaacaagatggttgccaattacactgcccccttctggaaacccttagcaaacctgccatgcttgcagtcccttctaaggggtttccttagcataagttgccatgctctgtaccatgtgacctcacaatcctggccacagatagctagatgtggatagtgtctggttcaagggcaaccaatctctaggctggccagtggcctgttagctggactggcataaggacttcaccttacaggggtggcatgtatcaaatggcaaatgtatgaaacaaccagatctttcagggaggcagaatgtgagctattcagaagaagtgaacgttaattagaatttaatgaggcattagtggtggtggatgaggg

SEQ ID NO: 15829 - DNA, 311 bp, Homo sapiens
gcccaaggggatggagagagatgtagcaatagctggttggtggagcattcagaacacacacaactttattgattaagttccacgtattatatgggtatggatagtggcaagtcaaatcaattacaatagtaacatcaaagatcactaaccacaggtcactatcacagatacaataacaatgaataagtctgaaatattgtgagaattagtaaaatgtgacacagagacataaagtgagcacatatttttgaaaaaatgatgtcaatagacttgtttgatgcaggattgccacaaacttccaatttgaaaac

SEQ ID NO: 15830 - DNA, 530 bp, Homo sapiens
ttggctttgaaaccaagcagacaggtgtttgaatccccactctgccaccttacagctgtgtggccttaggcaggtggttgtgagaatttaaatggcataagcatataaaagcatttggcgtagagtctggcacatagtagtgctcactaaatggtagtcattaaagatacaacctgggacagtggcagctagtttaacaaaccaccacaccccatagcacctctcacctgggtgcaagttccccaggccacactgcagtagctgctcgctgagggtgtccccggatatataagaagcctctctgagggccacagaggttttttgatggcagatggtttaaaacatcatttttatattaagttgtataaaatatactacgttataaaatgcaaagtttgcatcattttagagctaaaacttaaggccacaaaagaatctgctattttcttattaataaaaaatcctatttttatataatgcaaataatgaagatgaagtaacctattatttaattaaacatgtcttttttt

SEQ ID NO: 15831 - DNA, 390 bp, Homo sapiens
gtgctaatttgggaaacctttatctaaacaataattatcaatggccactcaagcagtaagataaaaaagaagtttgatggggatatttatgatgggtggaacaagctgttaacacctgaccgaaactcaacccactgattgaccttaaatgggaaactgatattaggtgcctcctgtggggatataataggaattacgtggtatcttcctgtgaaatatgccatcccaaatggtttagccagcatccatgaagcttctagatctaggccgggtgcagtggctcacgtctgtaatcccagcactttgggagtcctaggcaggcagggcagatcacaaggtcagaagatggagaccatcctggctaacacggtgaaatctcgtctctactaa

SEQ ID NO: 15832 - DNA, 367 bp, Homo sapiens
actttatgacagactaggggtacttaatgcctgagttgataatcacattattacttcttacactttgtttatagaatctagaaggagttaaacagaaaagtatttttctgttccttccttatgatttagaaaatagaaaaagtcttcgctaaagcctttaatagccttattcttagtgatgatgatgattatattaatagcaatgatggccagtatttgtcatgagctcactgttttgaatatttgactggcattatttaatcttcactacagttcttgaggtataatcagcccttcatatttgagagtcacacatttgcagattcagccaagcacagattggaaatattcaggaaaagaaaccaat

SEQ ID NO: 15833 - DNA, 462 bp, Homo sapiens
ttatcattttgttaattagccaagcttctgctgttgactccagataaagagagttaaagcacttggggtgaccacctaagtagattttttcatggtgaacaaatggaagcaacagaaacagctcagacttttgaaaagtgatgaaaaaggcccatgatgccctgctccttgaaaatgaagaagaggatgacttagccctgcagggcttttttctttgcatgttcttaccaaccctcaggggagattcagtctactagctggcttccccacgtggacctcacttctgtggcaagtaactgggagtaatttacctttctgggttctcttacaacccccttagctatgtaggtgatttcaggcccaagggggaagatatcagataagccagaacattttgattctactgaccgagtttcctcacctccctccctttgtttctgataaatacatacgttaaggtca

SEQ ID NO: 15834 - DNA, 1093 bp, Homo sapiens
ctgacctcaagtgatctgcctgccttggcctcccctagggctgggattataagaatgagccaccagaacccagccaaacttccccccaccccgcctttttgttttgttttggttttttctaatctcctgaagtcattctttgagttgtcatgtagattaatgggtttctcaaactactagaaaactagttgaagaaataaacaggcagtttgtgaatattaaacagaacagtggtgctgagcatggctaaagcatctctgcattcacagggagaggagcggaagaccttctggtgtgggctgggcagcaattcacttgaaggagaaacagcccgggtgtggagaggcggctgtccttggagggatcctttctaaggagctgagaaatcaacgtagagcttcctctatctgattctctaacaactgcagaccttccatgagtcaagctttgtgtcaaaaggacaaattaaaaggacctataaaaggcatcaccaagcccagtggacagatgccccaggctgcacattctgtcagtgctgttctggaaaaggcccaaacacatgctgaaacatggaagaactcatttatgtatctcatttgatctcatcacaacctgagacacaggtcataatagagacttcggggctcattttatacccggtgaaccagccaactttcatgcagttgagaaaagtataagaagccagccctcgggaaccaccaggagccaggagcaccccggccccgcagggccccaagttcagcctgccccaacccctctggtgcagagttcctgggacaccatctgcagccccgccacgcccctcaaagtcaagggcacaggcggctggggcttccccgcccgcccgacgacttcctgctgccccagcagccgccacagtcaccaccacggcccctggacgacccagagctcctgctgccgccccctgacttcatggaggcgccccaggacttcgtgccccctccccctgctgtcgccaagaggcctcctatgccccacccccacaagaggcacgaagcatcaatgttcagatgccgcaaatgaataaaataaatgaataaaagttcaacgt

SEQ ID NO: 15835 - DNA, 989 bp, Homo sapiens
ctgacctcaagtgatctgcctgccttggcctcccctagggctgggattataagaatgagccaccagaacccagccaaacttccccccaccccgcctttttgttttgttttggttttttctaatctcctgaagtcattctttgagttgtcatgtagattaatgggtttctcaaactactagaaaactagttgaagaaataaacaggcagtttgtgaatattaaacagaacagtggtgctgagcatggctaaagcatctctgcattcacagggagaggagcggaagaccttctggtgtgggctgggcagcaattcacttgaaggagaaacagcccgggtgtggagaggcggctgtccttggagggatcctttctaaggagctgagaaatcaacgtagagcttcctctatctgattctctaacaactgcagaccttccatgagtcaagctttgtgtcaaaaggacaaattaaaagaactcatttatgtatctcatttgatctcatcacaacctgagacacaggtcataatagagacttcggggctcattttatacccggtgaaccagccaactttcatgcagttgagaaaagtataagaagccagccctcgggaaccaccaggagccaggagcaccccggccccgcagggccccaagttcagcctgccccaacccctctggtgcagagttcctgggacaccatctgcagccccgccacgcccctcaaagtcaagggcacaggcggctggggcttccccgcccgcccgacgacttcctgctgccccagcagccgccacagtcaccaccacggcccctggacgacccagagctcctgctgccgccccctgacttcatggaggcgccccaggacttcgtgccccctccccctgctgtcgccaagaggcctcctatgccccacccccacaagaggcacgaagcatcaatgttcagatgccgcaaatgaataaaataaatgaataaaagttcaacgt

SEQ ID NO: 15836 - DNA, 438 bp, Homo sapiens
cctgctgtgtccagctggtttcttactttcctcctacctatgctatgcccagttctgtttcctcttcttcttcccccaggctggctgaaaactaagtttcaaaatacaaaatgcatgctacagatttcattgctgtagatgaaatgctgacagcttttctatttaaactctggttgttctcttcacatggaaggtaaaaccagcaagcagctgactacattccatccagccgtcccccaaaacccatgttctcaaccattcgcattgttccaataactgctcttttaaaaagagaaaacaggctaggtacggtggctcacgcctgtaatcccagcactttgggaggcttgagctccagagttccagacctgcctgggcaacagaacaagggctcatctctactagaagtcaaaaaattagccagctgtggtggcgtgc

SEQ ID NO: 15837 - DNA, 389 bp, Homo sapiens
gctactactactaaattcgcggccgtacgacggttatccagttttcccagcattatttatagaagagattgtccttttctcagaatatatggtctattctggagaatgttccatgtgctgaggaaaggaatgtgtattcttcagcagttggataaccatatgtagaagaatgaaactacataagtatctcttaccacatacaaaaaaaatcacatcaaaatggatttaaaaatctaagacctgaaactacaaaaagaaaacagtagagaaatactctaggacattggtctggggaaagtttttttttgtctaagatctcaaaagcagaggcaacaaaaacaaaaacagacaaatggaaccaggctaaaaagtttcagaagagtgtggtg

SEQ ID NO: 15838 - DNA, 409 bp, Homo sapiens
ccctgccacatcctcccctgaggttccttccatgctgcactgccttcctttagccagtgacagagcctggtgcccttcctggactgaaaccgatggaatccttccgaggggagtggcattcggcttgcctcctgcctaaatctgcttttatccatttgtagcaactttatgctgtaacaaaaggcggaaggaaaccaagagttctcttagcaagtcagactccttcccaagatggcaatcacagaacacctcgcaggatctcgcaggccacggtgaaggagaatgctttatgttgatgttgtccattctctctctcttctctttgcttttttttgacctaaataagctgcaaacatgttaatttaccaatattgataaaccacatgaagaaatcaggcattttacgtta

SEQ ID NO: 15839 - DNA, 331 bp, Homo sapiens
tttctggaatggggctctcataacctactgttcaacaagctactctttagaggtatgatggatctccccacaaagtctggttcaggtgtcaagacctacacaccaagaaatgatgagaagaattatcattcacatgagactttctggggcaagcagagtggctaccaaacaggtcttaaaatggcttgagaaatccagccaatattgaatgcacaagccacgaaccccattgccagactgcttgttacatggcaggtacacaattatatttataatataaaaaatgaatgattgagcaaataaaaataaaaacaactaagagtggagaatg

SEQ ID NO: 15840 - DNA, 506 bp, Homo sapiens
cagctggaagttgtttctggagatggagctttatgttttcccaaggttgtaacatggctgctgctctgcaagctcacatccactatccaggctgaagccagaagaagtgggaagagaaaaaccaaaggacagtgccctctgtaaaccacttttaaaaaacgtttctcagcagctactctttagaggtatgatggatctccccacaaagtctggttcaggtgtcaagacctacacaccaagaaatgatgagaagaattatcattcacatgagactttctggggcaagcagagtggctaccaaacaggtcttaaaatggcttgagaaatccagccaatattgagatttgaagttcaggatagaaaacagcatcaatattatcagaatgcacaagccacgaaccccattgccagactgcttgttacatggcaggtacacaattatatttataatataaaaaatgaatgattgagcaaataaaaataaaaacaactaagagtggagaatg

SEQ ID NO: 15841 - DNA, 536 bp, Homo sapiens
acacatttacctcgttttctttcaaggcaacaggcgctgtagatcttagtaccctgcccatagacccaagcacttttctcatttcttctgacagttcgagtcacttctcacagttgacttcctcaccaaataataagggggtgaagaagactcggcctacctactactcagtaatcctgctgtccagtcgactggagaagagagatttgttcacctctactagttttatttgttcttagtagttgtagaatttaaattggttttaatgaaatgttccttttatgaaattttaaataaaagccatttagtgtatatttagtatagcaagaagcatgtgaataagctccatataacctgacattgcgcatcttacagcatcctcttggtcagatgtctaataaaaagattgttattttcaaatttatcatagttcctgcaacttgcactttttaaagctgtgtttgtgagaatttatagactgcatatcgctatacttgatggaaattaaactatttttattttgaaagaaaaaaaaa

SEQ ID NO: 15842 - DNA, 528 bp, Homo sapiens
ttttgcgggggcagcatgagcagactcaggaagaaaatgctggccttgagatagatagctcttcagaggatccagattaaactaagttcgagtcacttctcacagttgacttcctcaccaaataataagggggtgaagaagactcggcctacctactactcagtaatcctgctgtccagtcgactggagaagagagatttgttcacctctactagttttatttgttcttagtagttgtagaatttaaattggttttaatgaaatgttccttttatgaaattttaaataaaagccatttagtgtatatttagtatagcaagaagcatgtgaataagctccatataacctgacattgcgcatcttacagcatcctcttggtcagatgtctaataaaaagattgttattttcaaatttatcatagttcctgcaacttgcactttttaaagctgtgtttgtgagaatttatagactgcatatcgctatacttgatggaaattaaactatttttattttgaaagaaaaaaaaa

SEQ ID NO: 15843 - DNA, 581 bp, Homo sapiens
catattgaaagtgtaaatccatacatttaagttaaattaaatagcaagttctgtactacttatgtaatttaactggtgacagaataatctattttcaataaaaataacttgttaaccctctgtctcacagtttgtgtcacaatgattatccttttatcagatctgagtagcaccaaaagactgacaagcctctggacacccaggacaacagggtcatatgcccatagcgaggttgaggtgcatgagatgatgaaatcgacccagtagatgaccacaaagaaactcactagcagcaggatggtctgagtggcacttttctctggggaaggtcttggggagaggctggtgctgtgaaagtatcagaatttcttctggtgcctgaacaaaaggaccactctgtatgcacttgaaagcagcattgttcctataagaaaaacatatctggagtaagaaacagagtaagaaacagtcttctgatgatggagttcatggtggaaaagtgaacagtctttactggtatgcagaagattgctcagggtcacattagaagaccccacagtgcacaagatgagattactact

SEQ ID NO: 15844 - DNA, 2129 bp, Homo sapiens
ccctccttccgggtgagcctctgaacagggctgtctccttctgggtgagcctctctgaaccgggctgcctccttccgggtgtgtctctctgaacggggctcactccttccagggtccctccttcccggtgagcctctctgactggggctgcctccttccgggtgagcctctctgactggggctgcctccttccgggtgagcctctctgactggggctgcctccttccgggtgagcctctctgaacagggcacgagagcagactctgaaccaggaagtagccgtgtctagcgctctacaagacacataggagaggtggcatccatggccctgaaacgacaagcccatgttgccagcgcattatcaccaagtcacttggcaagcgtttagcagactactggtgcctggatgatctgtaccgggagatggtgagatgctatgtggaaatcgttgagaagcttccagaacgccggccagacccagctaccattgaaggctgtgctcagctaaagcccaataactaccttctcgcctggcacacaccgttcaatgaaaaaggctcagggtttggagcggccaccaaggccatgtgcatcggcctgcggtactggaagcctgagcggctggagaccctcatcgaggtcagcgtggagtgcggccggatgacccacaaccatcccacaggcttcctgggctccctgtgcacggccctgtttgtgtcgttcgccgcacaaggaaagcccctggtccagtgggggagagacatgctgcgggcggtgcctctggcagaagagtactgcaggaagaccatccggcacacggcagaataccaggagcactggttttactttgaagctaaatggcaattttatttggaggagaggaaaatcagtaaagactcagaaaataaagccatcttccccgacaattatgatgcagaagagagggaaaagacctacaggaagtggagctcggaaggtcgagggggaagacgaggccacgatgcccccatgatagcctatgacgccctccttgcagcaggaaacagctggactgagctgtgtcaccgggccatgtttcatggaggggagagcgcggccacgggcaccattgcaggctgcctgttcgggttgctgtacggcctggacctcgttcccaaaggcttgtaccaggacctggaggacaaggagaagctggaggacctgggcgcggctctctaccgcctgtccacagaggagaagtaaagccatttctgccactttccccctagagagccgattccaccccggggcccgtagggccctctcgcagcccctgggtgagggtgtctctgtgaggctccactgcggtctgtgcctgactggccacatctaactctctgtttccaatttcagaatcctaactgttgcataaaatacattgtttgtcctgcgagaatattttccgtcctccaccatcaacattgacactgcgtagatttgccgcacttggacctccatgcgtggcactcacccgcagtctcctggacaggcgctgtattttattctgtcgcagagctaatgctgtttactcactcacttcaacaacactaactgcggtggtggcctccagcaggcccccccgctgcagaccctctgtcctgcctctgcctccaggcatgcgtttccccgtgaggccaatgcacctccccccaccccccaccctcccatgtccacagtgggtcgtgtgttcctggacagagaaacagtccacactggggcctgcgggacacatatagcagcatattttgctcttaaccccacccacctttttaatcacactagattttaagatcaatccctttttgaaacaactcacggagaaaaccagaacataaatggcctcctgccagctccggcgtctctctgtggtctgccttagtgggccaagtccaaatgcagagaaggcctttcccttccgcgcctgccccatcgggctcgctgacgaggaagcgctgtccctgtgatgaggttctctctcagagagtcttggaaaagagaccacttgctcttgtttaaaataaatttggacgtgatttttccatgcagcatctggtgtgaataaaacagcagttgactgatgtttaaaaaaa

SEQ ID NO: 15845 - DNA, 2713 bp, Homo sapiens
gggccggatgggaggttctagtgaagcctgcggtttgctgacgactttccccctcagtgcagtccaattatttgggagccgttaaacaccgcatgctgagaagacaccgtcattgttcacacaggagctagatagactttgttccctctacactgcattttttaaaagttttctatcaaaaacacatttcataatcgaaaagttttctaaatgataaaaccgcatgtcacagattaatctcaacattatgttgagtgaaggaagccagacaccgaaggccacacattgtatttgaaatgtccaggaaaggcagaactgtagagacagcagatgggttgttgcccgaggggtgagggcacgccccgcagcgggcggcagtgacaggcacgcctgcacacatctgctcccgcatcaccccacgccacacacggggaagtgtgcgcactccttccagggacagcgagaggagcccctgctctgtcaacgctctgaatgtgctgcggctgccggcagaagctagcaggctcctctgctgaggagctggtgcctgtccagacgcagaagaaaactgacacctcccacgtgggggacagaaaggtcctctcattggtgccacctgcagagatagacaaggagcgcctggccatcagaggacgctcctgacagtgacagcgtgactactataaaagtcaggcgggctgaggaggagacaaaggccaggacgctccgcagctgttggggaagaggagctgcctcctgggatggagaaatttaaggctgcgatgttgctggggagcgtcggcgatgctcttggctacagaaatgtctgcaaggagaacagcactgtaggcatgaagatccaggaggagctgcaacgttccgggggcctggaccacctcgtactctcgccaggagaatggcccgtgagtgacaacaccatcatgcacatcgcaaccgccgaggccctcaccacagactactggtgcctggatgatctgtaccgggagatggtgagatgctatgtggaaatcgttgagaagcttccagaacgccggccagacccagctaccattgaaggctgtgctcagctaaagcccaataactaccttctcgcctggcacacaccgttcaatgaaaaaggctcagggtttggagcggccaccaaggccatgtgcatcggcctgcggtactggaagcctgagcggctggagaccctcatcgaggtcagcgtggagtgcggccggatgacccacaaccatcccacaggcttcctgggctccctgtgcacggccctgtttgtgtcgttcgccgcacaaggaaagcccctggtccagtgggggagagacatgctgcgggcggtgcctctggcagaagagtactgcaggaagaccatccggcacacggcagaataccaggagcactggttttactttgaagctaaatggcaattttatttggaggagaggaaaatcagtaaagactcagaaaataaagccatcttccccgacaattatgatgcagaagagagggaaaagacctacaggaagtggagctcggaaggtcgagggggaagacgaggccacgatgcccccatgatagcctatgacgccctccttgcagcaggaaacagctggactgagctgtgtcaccgggccatgtttcatggaggggagagcgcggccacgggcaccattgcaggctgcctgttcgggttgctgtacggcctggacctcgttcccaaaggcttgtaccaggacctggaggacaaggagaagctggaggacctgggcgcggctctctaccgcctgtccacagaggagaagtaaagccatttctgccactttccccctagagagccgattccaccccggggcccgtagggccctctcgcagcccctgggtgagggtgtctctgtgaggctccactgcggtctgtgcctgactggccacatctaactctctgtttccaatttcagaatcctaactgttgcataaaatacattgtttgtcctgcgagaatattttccgtcctccaccatcaacattgacactgcgtagatttgccgcacttggacctccatgcgtggcactcacccgcagtctcctggacaggcgctgtattttattctgtcgcagagctaatgctgtttactcactcacttcaacaacactaactgcggtggtggcctccagcaggcccccccgctgcagaccctctgtcctgcctctgcctccaggcatgcgtttccccgtgaggccaatgcacctccccccaccccccaccctcccatgtccacagtgggtcgtgtgttcctggacagagaaacagtccacactggggcctgcgggacacatatagcagcatattttgctcttaaccccacccacctttttaatcacactagattttaagatcaatccctttttgaaacaactcacggagaaaaccagaacataaatggcctcctgccagctccggcgtctctctgtggtctgccttagtgggccaagtccaaatgcagagaaggcctttcccttccgcgcctgccccatcgggctcgctgacgaggaagcgctgtccctgtgatgaggttctctctcagagagtcttggaaaagagaccacttgctcttgtttaaaataaatttggacgtgatttttccatgcagcatctggtgtgaataaaacagcagttgactgatgtttaaaaaaa

SEQ ID NO: 15846 - DNA, 417 bp, Homo sapiens
ggttcacatttgactttacggtccttactctgttttccttgataaggttttaagcacctcaatctcaaaatctaaaggaagacttttagggattaaacaacctgagatggaaagagatggctgtgtcatttggggggaaattcaaagtaaagagcactttttcctaatttcatataagaaatgcttgagtagaggtaatcctcaaatgactcataacaaagcaagtccataatgtactatagctacagtccttactttagaaacatagggaacttctactataatttttacaattactgtacttggagtaattcctttcggaattgctacagttctaagacaaacaaatgaaaattaatttaaaagaaaaactggctagcttaataccataaataaaaagatgttcagcttttcctg

SEQ ID NO: 15847 - DNA, 3861 bp, Homo sapiens
  misc_feature (803)..(803): n is a, c, g, or t
  misc_feature (806)..(806): n is a, c, g, or t
  misc_feature (831)..(831): n is a, c, g, or t
  misc_feature (841)..(841): n is a, c, g, or t
  misc_feature (857)..(857): n is a, c, g, or t
  misc_feature (2154)..(2154): n is a, c, g, or t
  misc_feature (2309)..(2309): n is a, c, g, or t
  misc_feature (2566)..(2566): n is a, c, g, or t
  misc_feature (3084)..(3084): n is a, c, g, or t
  misc_feature (3312)..(3312): n is a, c, g, or t
  misc_feature (3557)..(3557): n is a, c, g, or t
  misc_feature (3759)..(3759): n is a, c, g, or t
aattcgcggccgcgcgacacggctgcgagaagcgacagaagggggaaaacggcgttgatacagtggaaggcttgtggtgttgctggcccttgatcgctggaaggattccgaggtgtagttttcgaagcgggagttttgttcgcattgggcgcttagcgtctgttactgtcgctaacgggagattgtcaacgtgtttgcattgggccatttgcatcagttgggaccgttgttactgacctcctaggttgtgtgttgcgtttacacgcttaaatccgggtttcacggtctcttagtactcgcgtatttaagctcatcgcgcgtaccttacttctacgcgttcacgtcggttcgtccgggcctatcagcgccgctgcttttaaattggccgtgtgcgctttacgtttgcacctttacgtcggatcactggggtccatcagcgccgtagtttttgagctggccgggcgtgctttcgagcgcttagttgctttcggtttcacttggttgcggcgtgacgatcattgcactcacttcagtcgccatcggtctccgtaatctgactgccctttgctattacttgcttcactcacatacgatatgcggacggtcctatttaagttgagcgcccatacttcactatcccaagtgggactgctttttcatttacgtgtctctatccgaggcagtataaacatctttccattcaagtttaccgcatgtgtttcactatcgagagtcggactgcttttggatttacgtggctttgtgggatgcggtatgaagatcgttgcattcaagtttaccgnctntacttcactgcagaatctgactgcngtcagatctntatgacagattgttgnattcgttttctgcgggtacgtcactatccagtctactttttccattgacgtggctgagtcatatgtagtatgactgtcagagacgttggaacctgaagcgaccccattttgagtgagggctagaaaaatgaggccgggacttacgggcctgcattctcagaaggatattcctagctttcagatgcttacggttaagggaacaaattaatgtttactgaagagacccgagcgtccagatagctggatatctggagaacaaaggcgttcctaattttgctttaaaggtagtaatagggattcttgcaaaatgtaataattaaagttaattctttatcacaaacccttgtagcagagcacctctccccatgtatacaagcattgtacctagggtggatacgttccttctcttagtttcgggaacgcccttctctgtctatggagtagctgttctttcaccactttactttcttgataaacttgcttttattttgcaccgcggactcgccctgagttatttcttgcgcgagacccaagaaccctctctttgggtctggatcggggcccttttcctgtgacgtatttctggccaccacagatgggactatagtgctttggggaagtgttggggtcctataacatatttctggcgaacgacggaaggggcgatactgaagaaactcccccaacccaaaggaagtagactgcagcactgattggacgactttgggtaagtggtggagtgcccgggtaaagaatgggattgggttagaggcccaacttaatggagttagagtctttcctaaaagagagtgggttagaggcccctcttaataaaaggcaaggacacttgaccgacctcgggttagaggcccgaccgaggagggttagaggcccctcccagtaaagcccctctcggctaaaaaacaggtttgacaccgcaggctatgctctttgtattagtctgcctcgtcctccttgtcttggttgctgtctccgtttcagtgtcattttcaggagacttcatttaactggtcttagggattttaactgattcttctcctatgtccctcccgatttctgtccgtttgcttgtgaaacactgggaaccaaaagcattggaggatccggctctaaaattgctgattgagatttgatatttaacagctatgagcagtaagattcgatagatgtggttgtgttttgttgctgctgtgctgagtgtgattgagaagcactaggatggaaatcaggggacttttctccttgctgttttgtttggttttgcacactaaaaaanctcctttgtagctaagtgcggtggctcacacctgtaatcccagcactttgggaggccgaggcaggcagatcacctgaaatcaggagttcgagaccatcctggccaacgtgttgaaaccccgtctctactaaaaatacaaacattacccgggtgtngtggcagacatctgtaatcccagcttcttgggatgctgagtcaggagaatcgctttaatctaggagtcagagtttgcagttagctgagattgcaccactgcactccagcagtcttctcaacagagcgagactctgtctcaaaagaaaataaaaaaactttcttttcttggattcgggcaaaccgtgtttgctttgcttttccaatcctcactgctgttattggttactctggttgttcccatctaaatcctcttcanttattttgccttattcgacatttttttcaaagtccatgttgtggtttatctaagattcatagctcagctcacttatgttatttggataatgtgaatcatgtttgatgagaggaaaagaagaaaaagatttagacatactaggtgatcctttaatgcaagccctgctgtggttcagcaggcatttttgggtggagcggaacccctttctgtcagctctgaaggttcgtatgtgtcagttctttctccctgtagtccacctgaaagttcttgagaacccttcgtcccttctccttacccagctagtcccactctgtacccaccattcccacaaagaacttagcccaccgagtactacttatagtgcagcctgctatcaacctccaaagggaaatctttgtccacttaggtggcaaatcgggaagagggcactgtgagagtacatgttcccttttctccgtctggtttgaccctatatatagagaaggttggtcatttctctgaagatccaggaaaatttntagatgagtttgagaaatcaactctgacctatagtttaacttgggaggatctgcatgttttgttgtctctgtgttgtacagtggaggagaaacaatgcattttggggacagctaggacccatgcagatgaggtattggctcgcaacccgtaccatactatgtatcaggcaggaagtatagcagttccagatcaagatgcagagtggaattatcaaaggcgcagtgagnacttggggaggagagatcatatggtcacttgttcgttggaagggatgaagaaatgtatgaaaaagcctgttatctatgaacaggttaaggaagattctcaggataaagatgagaatccaggtttgtttcaagggcatttagttgaagcaatcgggaagtataatatcactgatcctgcctcaaaggagagacaaacccttttgggaggacattttatgacccagtctgcccctgatatccccagnaaactacaaaaagcagctatgggagccgggcgtggtggctcaagcctgtaatcccagcactttgggaggctgaggggggtggatcacttgaggtcaggagttcaagaccagcctggccagcatggtgaaaccccttctctactaaaaatacaaaaattagctggggatggtgacaagtgcctgtaatctcacctacttgggnggctgaggcaggagaattgcttgaacccatgaggtggaagttgcagtgagcccagatcacgctattgcactccagcctgggtgacagagcgagactgtgtct

SEQ ID NO: 15848 - DNA, 3719 bp, Homo sapiens
  misc_feature (661)..(661): n is a, c, g, or t
  misc_feature (664)..(664): n is a, c, g, or t
  misc_feature (689)..(689): n is a, c, g, or t
  misc_feature (699)..(699): n is a, c, g, or t
  misc_feature (715)..(715): n is a, c, g, or t
  misc_feature (2012)..(2012): n is a, c, g, or t
  misc_feature (2167)..(2167): n is a, c, g, or t
  misc_feature (2424)..(2424): n is a, c, g, or t
  misc_feature (2942)..(2942): n is a, c, g, or t
  misc_feature (3170)..(3170): n is a, c, g, or t
  misc_feature (3415)..(3415): n is a, c, g, or t
  misc_feature (3617)..(3617): n is a, c, g, or t
aattcgcggccgcgcgacacggctgcgagaagcgacagaagggggggccatttgcatcagttgggaccgttgttactgacctcctaggttgtgtgttgcgtttacacgcttaaatccgggtttcacggtctcttagtactcgcgtatttaagctcatcgcgcgtaccttacttctacgcgttcacgtcggttcgtccgggcctatcagcgccgctgcttttaaattggccgtgtgcgctttacgtttgcacctttacgtcggatcactggggtccatcagcgccgtagtttttgagctggccgggcgtgctttcgagcgcttagttgctttcggtttcacttggttgcggcgtgacgatcattgagttaaaggttactgcactcacttcagtcgccatcggtctccgtaatctgactgccctttgctattacttgcttcactcacatacgatatgcggacggtcctatttaagttgagcgcccatacttcactatcccaagtgggactgctttttcatttacgtgtctctatccgaggcagtataaacatctttccattcaagtttaccgcatgtgtttcactatcgagagtcggactgcttttggatttacgtggctttgtgggatgcggtatgaagatcgttgcattcaagtttaccgnctntacttcactgcagaatctgactgcngtcagatctntatgacagattgttgnattcgttttctgcgggtacgtcactatccagtctactttttccattgacgtggctgagtcatatgtagtatgactgtcagagacgttggaacctgaagcgaccccattttgagtgagggctagaaaaatgaggccgggacttacgggcctgcattctcagaaggatattcctagctttcagatgcttacggttaagggaacaaattaatgtttactgaagagacccgagcgtccagatagctggatatctggagaacaaaggcgttcctaattttgctttaaaggtagtaatagggattcttgcaaaatgtaataattaaagttaattctttatcacaaacccttgtagcagagcacctctccccatgtatacaagcattgtacctagggtggatacgttccttctcttagtttcgggaacgcccttctctgtctatggagtagctgttctttcaccactttactttcttgataaacttgcttttattttgcaccgcggactcgccctgagttatttcttgcgcgagacccaagaaccctctctttgggtctggatcggggcccttttcctgtgacgtatttctggccaccacagatgggactatagtgctttggggaagtgttggggtcctataacatatttctggcgaacgacggaaggggcgatactgaagaaactcccccaacccaaaggaagtagactgcagcactgattggacgactttgggtaagtggtggagtgcccgggtaaagaatgggattgggttagaggcccaacttaatggagttagagtctttcctaaaagagagtgggttagaggcccctcttaataaaaggcaaggacacttgaccgacctcgggttagaggcccgaccgaggagggttagaggcccctcccagtaaagcccctctcggctaaaaaacaggtttgacaccgcaggctatgctctttgtattagtctgcctcgtcctccttgtcttggttgctgtctccgtttcagtgtcattttcaggagacttcatttaactggtcttagggattttaactgattcttctcctatgtccctcccgatttctgtccgtttgcttgtgaaacactgggaaccaaaagcattggaggatccggctctaaaattgctgattgagatttgatatttaacagctatgagcagtaagattcgatagatgtggttgtgttttgttgctgctgtgctgagtgtgattgagaagcactaggatggaaatcaggggacttttctccttgctgttttgtttggttttgcacactaaaaaanctcctttgtagctaagtgcggtggctcacacctgtaatcccagcactttgggaggccgaggcaggcagatcacctgaaatcaggagttcgagaccatcctggccaacgtgttgaaaccccgtctctactaaaaatacaaacattacccgggtgtngtggcagacatctgtaatcccagcttcttgggatgctgagtcaggagaatcgctttaatctaggagtcagagtttgcagttagctgagattgcaccactgcactccagcagtcttctcaacagagcgagactctgtctcaaaagaaaataaaaaaactttcttttcttggattcgggcaaaccgtgtttgctttgcttttccaatcctcactgctgttattggttactctggttgttcccatctaaatcctcttcanttattttgccttattcgacatttttttcaaagtccatgttgtggtttatctaagattcatagctcagctcacttatgttatttggataatgtgaatcatgtttgatgagaggaaaagaagaaaaagatttagacatactaggtgatcctttaatgcaagccctgctgtggttcagcaggcatttttgggtggagcggaacccctttctgtcagctctgaaggttcgtatgtgtcagttctttctccctgtagtccacctgaaagttcttgagaacccttcgtcccttctccttacccagctagtcccactctgtacccaccattcccacaaagaacttagcccaccgagtactacttatagtgcagcctgctatcaacctccaaagggaaatctttgtccacttaggtggcaaatcgggaagagggcactgtgagagtacatgttcccttttctccgtctggtttgaccctatatatagagaaggttggtcatttctctgaagatccaggaaaatttntagatgagtttgagaaatcaactctgacctatagtttaacttgggaggatctgcatgttttgttgtctctgtgttgtacagtggaggagaaacaatgcattttggggacagctaggacccatgcagatgaggtattggctcgcaacccgtaccatactatgtatcaggcaggaagtatagcagttccagatcaagatgcagagtggaattatcaaaggcgcagtgagnacttggggaggagagatcatatggtcacttgttcgttggaagggatgaagaaatgtatgaaaaagcctgttatctatgaacaggttaaggaagattctcaggataaagatgagaatccaggtttgtttcaagggcatttagttgaagcaatcgggaagtataatatcactgatcctgcctcaaaggagagacaaacccttttgggaggacattttatgacccagtctgcccctgatatccccagnaaactacaaaaagcagctatgggagccgggcgtggtggctcaagcctgtaatcccagcactttgggaggctgaggggggtggatcacttgaggtcaggagttcaagaccagcctggccagcatggtgaaaccccttctctactaaaaatacaaaaattagctggggatggtgacaagtgcctgtaatctcacctacttgggnggctgaggcaggagaattgcttgaacccatgaggtggaagttgcagtgagcccagatcacgctattgcactccagcctgggtgacagagcgagactgtgtct

SEQ ID NO: 15849 - DNA, 3876 bp, Homo sapiens
  misc_feature (818)..(818): n is a, c, g, or t
  misc_feature (821)..(821): n is a, c, g, or t
  misc_feature (846)..(846): n is a, c, g, or t
  misc_feature (856)..(856): n is a, c, g, or t
  misc_feature (872)..(872): n is a, c, g, or t
  misc_feature (2169)..(2169): n is a, c, g, or t
  misc_feature (2324)..(2324): n is a, c, g, or t
  misc_feature (2581)..(2581): n is a, c, g, or t
  misc_feature (3099)..(3099): n is a, c, g, or t
  misc_feature (3327)..(3327): n is a, c, g, or t
  misc_feature (3572)..(3572): n is a, c, g, or t
  misc_feature (3774)..(3774): n is a, c, g, or t
aattcgcggccgcgcgacacggctgcgagaagcgacagaagggggaaaacggcgttgatacagtggaaggcttgtggtgttgctggcccttgatcgctggaaggattccgaggtgtagttttcgaagcgggagttttgttcgcattgggcgcttagcgtctgttactgtcgctaacgggagattgtcaacgtgtttgcattgggccatttgcatcagttgggaccgttgttactgacctcctaggttgtgtgttgcgtttacacgcttaaatccgggtttcacggtctcttagtactcgcgtatttaagctcatcgcgcgtaccttacttctacgcgttcacgtcggttcgtccgggcctatcagcgccgctgcttttaaattggccgtgtgcgctttacgtttgcacctttacgtcggatcactggggtccatcagcgccgtagtttttgagctggccgggcgtgctttcgagcgcttagttgctttcggtttcacttggttgcggcgtgacgatcattgagttaaaggttactgcactcacttcagtcgccatcggtctccgtaatctgactgccctttgctattacttgcttcactcacatacgatatgcggacggtcctatttaagttgagcgcccatacttcactatcccaagtgggactgctttttcatttacgtgtctctatccgaggcagtataaacatctttccattcaagtttaccgcatgtgtttcactatcgagagtcggactgcttttggatttacgtggctttgtgggatgcggtatgaagatcgttgcattcaagtttaccgnctntacttcactgcagaatctgactgcngtcagatctntatgacagattgttgnattcgttttctgcgggtacgtcactatccagtctactttttccattgacgtggctgagtcatatgtagtatgactgtcagagacgttggaacctgaagcgaccccattttgagtgagggctagaaaaatgaggccgggacttacgggcctgcattctcagaaggatattcctagctttcagatgcttacggttaagggaacaaattaatgtttactgaagagacccgagcgtccagatagctggatatctggagaacaaaggcgttcctaattttgctttaaaggtagtaatagggattcttgcaaaatgtaataattaaagttaattctttatcacaaacccttgtagcagagcacctctccccatgtatacaagcattgtacctagggtggatacgttccttctcttagtttcgggaacgcccttctctgtctatggagtagctgttctttcaccactttactttcttgataaacttgcttttattttgcaccgcggactcgccctgagttatttcttgcgcgagacccaagaaccctctctttgggtctggatcggggcccttttcctgtgacgtatttctggccaccacagatgggactatagtgctttggggaagtgttggggtcctataacatatttctggcgaacgacggaaggggcgatactgaagaaactcccccaacccaaaggaagtagactgcagcactgattggacgactttgggtaagtggtggagtgcccgggtaaagaatgggattgggttagaggcccaacttaatggagttagagtctttcctaaaagagagtgggttagaggcccctcttaataaaaggcaaggacacttgaccgacctcgggttagaggcccgaccgaggagggttagaggcccctcccagtaaagcccctctcggctaaaaaacaggtttgacaccgcaggctatgctctttgtattagtctgcctcgtcctccttgtcttggttgctgtctccgtttcagtgtcattttcaggagacttcatttaactggtcttagggattttaactgattcttctcctatgtccctcccgatttctgtccgtttgcttgtgaaacactgggaaccaaaagcattggaggatccggctctaaaattgctgattgagatttgatatttaacagctatgagcagtaagattcgatagatgtggttgtgttttgttgctgctgtgctgagtgtgattgagaagcactaggatggaaatcaggggacttttctccttgctgttttgtttggttttgcacactaaaaaanctcctttgtagctaagtgcggtggctcacacctgtaatcccagcactttgggaggccgaggcaggcagatcacctgaaatcaggagttcgagaccatcctggccaacgtgttgaaaccccgtctctactaaaaatacaaacattacccgggtgtngtggcagacatctgtaatcccagcttcttgggatgctgagtcaggagaatcgctttaatctaggagtcagagtttgcagttagctgagattgcaccactgcactccagcagtcttctcaacagagcgagactctgtctcaaaagaaaataaaaaaactttcttttcttggattcgggcaaaccgtgtttgctttgcttttccaatcctcactgctgttattggttactctggttgttcccatctaaatcctcttcanttattttgccttattcgacatttttttcaaagtccatgttgtggtttatctaagattcatagctcagctcacttatgttatttggataatgtgaatcatgtttgatgagaggaaaagaagaaaaagatttagacatactaggtgatcctttaatgcaagccctgctgtggttcagcaggcatttttgggtggagcggaacccctttctgtcagctctgaaggttcgtatgtgtcagttctttctccctgtagtccacctgaaagttcttgagaacccttcgtcccttctccttacccagctagtcccactctgtacccaccattcccacaaagaacttagcccaccgagtactacttatagtgcagcctgctatcaacctccaaagggaaatctttgtccacttaggtggcaaatcgggaagagggcactgtgagagtacatgttcccttttctccgtctggtttgaccctatatatagagaaggttggtcatttctctgaagatccaggaaaatttntagatgagtttgagaaatcaactctgacctatagtttaacttgggaggatctgcatgttttgttgtctctgtgttgtacagtggaggagaaacaatgcattttggggacagctaggacccatgcagatgaggtattggctcgcaacccgtaccatactatgtatcaggcaggaagtatagcagttccagatcaagatgcagagtggaattatcaaaggcgcagtgagnacttggggaggagagatcatatggtcacttgttcgttggaagggatgaagaaatgtatgaaaaagcctgttatctatgaacaggttaaggaagattctcaggataaagatgagaatccaggtttgtttcaagggcatttagttgaagcaatcgggaagtataatatcactgatcctgcctcaaaggagagacaaacccttttgggaggacattttatgacccagtctgcccctgatatccccagnaaactacaaaaagcagctatgggagccgggcgtggtggctcaagcctgtaatcccagcactttgggaggctgaggggggtggatcacttgaggtcaggagttcaagaccagcctggccagcatggtgaaaccccttctctactaaaaatacaaaaattagctggggatggtgacaagtgcctgtaatctcacctacttgggnggctgaggcaggagaattgcttgaacccatgaggtggaagttgcagtgagcccagatcacgctattgcactccagcctgggtgacagagcgagactgtgtct

SEQ ID NO: 15850 - DNA, 642 bp, Homo sapiens
aattcgcggccgcgcgacacggctgcgagaagcgacagaagggggaaaacggcgttgatacagtggaaggcttgtggtgttgctggcccttgatcgctggaaggattccgaggtgtagttttcgaagcgggagttttgttcgcattgggcgcttagcgtctgttactgtcgctaacgggagattgtcaacgtgtttgcattgggccatttgcatcagttgggaccgttgttactgacctcctaggttgtgtgttgcgtttacacgcttaaatccgggtttcacggtctcttagtactcgcgtatttaagctcatcgcgcgtaccttacttctacgcgttcacgtcggttcgtccgggcctatcagcgccgctgcttttaaattggccgtgtgcgctttacgtttgcacctttacgtcggatcactggggtccatcagcgccgtagtttttgagctggccgggcgtgctttcgagcgcttagttgctaaaaaaaataacttcagccgtctttgccctggggacttaggattgcagccgcttttgaattctgccataattcagcatatttggccaaattccccattcgtttcgcattggccaattataggcccactgtttccatttctgggatcctttgtttcc

SEQ ID NO: 15851 - DNA, 177 bp, Homo sapiens
agataaaaacatcttagagttgcaacttccagttcatgatgattaagaaattatctatctaccttttttttttttaattgagttggagtcttgctcttttgcccaggctggagtgcagtgagccgagatcacgccattgcactccagccgggggagacaagagcgagacttcgtctt

SEQ ID NO: 15852 - DNA, 312 bp, Homo sapiens
atgtctgggcgcggcaaaggcgggaagggtctgggcaaaggaggcgctaagcgccaccgcaaagttctgcgcgacaacattcagggcatcaccaagcccgccatccgacgcctggcacggcgtggaggcgttaagcgcatctcaggccttatatacgaggagacacgcggagttcttaaagtgtttttggagaatgtaatccgcgatgcagttacctacacggagcacgccaaacgcaagacagtcacagccatggacgtggtttacgcgctcaagcgccagggccgcaccctgtatggctttggcggctga

SEQ ID NO: 15853 - DNA, 505 bp, Homo sapiens
aatctgatcctgtctttctcctcctaaaaccctccaacaggcctacagcttctgcctgcaaactcctgccccaagcatggcctcctagacaccctagaatccacccctgctggcccctcacaagatgcctctcctgtcccacctccccatcgcagcccaggctctcactgaacgtgcaccctggttagccctccatctcctcaactgcataaagaatttctggccaggcacggtggctcacgcctgtaatcccagcacttcgggaggccgaggcaggcggatcacaaggtcaggagattgagaccagcctgaccaacatgcagaaaccccggctttactaaaaatacaaaattagccgggcgtggtagcgggtgcctgtagtcccagctactcgggaggctgaggcaggagaatggcgtgaaactgggaggtggagcttgcagtgagccgagatcgtgccactgcactccactccagcctgggtgacagagtgagactcggtctc

SEQ ID NO: 15854 - DNA, 8014 bp, Homo sapiens
  misc_feature (4008)..(4008): n is a, c, g, or t
  misc_feature (4741)..(4741): n is a, c, g, or t
  misc_feature (4814)..(4814): n is a, c, g, or t
  misc_feature (4982)..(4982): n is a, c, g, or t
  misc_feature (8014)..(8014): n is a, c, g, or t
cgtaccggcgtctccatggcgaccgcgttggctgggtggcctccattgtcgggctgctgctctcagcggcggggctcgccagcgcttcagtgggcggggacgcggcaggtgactccagaccaaggaggatgagctgctgtccctggaagagaacggatggagggaagcagctcctacgaagttccctctgtggctgctgctgatctggaggagggtgctggtcagactaggagcttgcctgccaccccctccaaagatgttcacaagggtgttggaggcatcatcttttcctcctcaccgattttagacttgagtgaaagtggtctgtgccgtttggaggaggtctttagaatccccagccttcaacaattgcatctgcaaaggaatgccctgtgtgtgattcctcaagatttctttcagttgcttccgaacctgacttggctggacctccggtacaatagaattaaagcgcttccttctgggattggagctcaccagcatttgaaaactttgcttttagaaagaaatcctatcaaaatgttacctgtggagctggggagcgtaaccacgctgaaagcactgaacctaagacactgccctctggaattccctcctcagctcgttgtgcagaagggattggtggctatccagcgcttcctgcggatgtgggcagtagaacactctctccccagaaatccaacttctcaagaggctccaccggttagagagatgaccctccgtgacctcccgagcccaggactggagttgtctggagaccacgcgtctaaccaaggagctgtgaacgctcaggacccagagggggctgtgatgaaagagaaggccagctttctcccacctgtggaaaagccagacctgagtgaactcaggaagtctgcggactcctcagagaactggcccagcgaggaggagatcaggcgcttttggaagctgaggcaggagattgttgagcacgtgaaggcagacgttctgggagatcagctcttgacgagggaattacctccaaatctcaaggcggccttgaacattgagaaagaactaccaaagccaagacacgttttcagaaggaagacagcctcctccaggagcatcttacccgacctcttgtcaccgtaccaaatggcgatccgagcaaaaagactggaagagagccgagcggcggcgctccgagagctccaggagaagcaggctctgatggagcagcagagacgagagaaaagggcactgcaggagtggagagagcgagcccagaggatgaggaagaggaaggaagagctcagcaaactcctgcctccgcggaggagcatggtggcatcaaagattccctctgccacagatctgacagataacaggaaagtaccactgaatccgcctggaaaaatgaaaccaagcaaagagaaatcgccacaagcaagtaaagaaatgagtgccctgcaggagagaaatttagaagagaagataaaacagcacgtcctccaaatgcgtgagcaaagaagattccatggccaggccccactggaggagatgaggaaggctgccgaggatctggaaattgccacagagctacaggatgaagtattgaagctaaaattgggattaaccttgaacaaagatcgtcgacgggcggccctcactggaaacctttcgcttggcctgccggcagcacagcctcaaaatacattttttaacacaaaatatggagaatcaggaaatgttcgcagataccagtgacaccaggtggctggactgatggagacgtcttcagacaggagccgctcagtcttctttcccgggcgtcgcctcctgtgtggtgccggaagagcgccaggttcagtgttaccctgagggctgatttcgcgcagcctgttgttttccttagacaggtccacgtccctctcctgaggctgtggaagatttcagccgtattaaaagaaaggacactgtgagcacgtggtctcgccttcccttcttcctgcaggttcccgccaagccatgtgacagagtgctcacactcaggcacttgcctctctcctgtcctggagcccttgttacaaaagtactcacagctttccttcacttagttatttgagtgtgggagaggagaccaggtcacccgattcccgccaagccggaagtccctgcagcaccacctttggctaggagggaggggtgacagccaaaaagggcttcgggggagtggttaccctgctccctgcccagtgacaagccctcctttcccctgggggccctcctttcccctgctccctgcccagctacggggccctcctttcagccttgaccccttcctggttgctaccactcaggctgccactcagtggactccaccccagggacacggcagggtctgcagacctccccatgctagatcagccgtatttcatgctctgtctgcccaggctgtgtagattctgtgtgacttagtctcttgtgctgagtgtttgcttggatcttgaaaacatctttggtttgatttctttaacagaggtgagactattcagactttgtttatttttgtgttaattttggtaaatatggtttcagtgagtttcctcatttcatccaagttgtgcaatgtatcagcataaagttcctcttattttcagtatctttaggatccgtaataatgtcccctcttttattcttgacctggtgttcttcatcattcttgctatggatttatcaattttgttcctcttttccaaaagccccaggttttggcttcactggatttgctgtttgtcttctgtctcatgggtctctgcgccctgcacttcgtactttccgagagtttaactggtgcttagagagaaatgcatcacttccaaacccatgtattagagaagaagggcgtgaaatttatcacctaagctttccattcaggaagctagaaaaggtgtcagtgacctgttgcggcccagcggctggagcagcagacgtttgccatttctcacgcctgagggcaggcgttggagcagctcagccggcgttgctggtcagggtctcccgtgaggctggagtcagccgtgggttgagctgctctcctctgaaggtttaactgggcttggggctcagcttccaaggtgctcacctggttgttgatcagagagcgtgtccgttgtgatcccagtcctttgaaactgtgaagcctcgccccgcggcctgccgcaggatatgttttggtaaatgtagactgtgcacttgagaagaatgtattttgagttgttgggtacattgttttgtgtgtgtcaggtgacattgactaatcctgttgctcagagctcctgtacccttactgactgacttaagcctggtttctcagttactgagagaggcctgtgaacagttctagctatgatcatgaacatgtgttttcttcttagttatgtgagtttttgctatacgtgttttggggctattttgtcagatgcctacaaatttaggattgttttatcttcctgtcgaactgaccttgtcattattatgaactatttctcttcgcctctccttttcacttcttgccttctgtggattttgtctgatactaatccaggcacactgctgctgttttggtcagcgttttcataatgcatcttcttccctccttctactgtactggatttaaagcgcaccttatagagacatcatatactcgggactccttttctttctctagctgccagttctgtgtttcagttacagtgtttggccctcacatttaaggtgcgtgtgcgtacggcggattccgtgcccatctcatgtttttattccctttattcttcttttgctgctttctgatagtgatcaatttttttatttatatctcttgtattagagttttagtaatatcttttaatattattctcttgggtgttgccttagagatttcatacatgcccttgagttcattagcatttcctgaatgagccaatgaccctgagaaggtccctcccatctgccagttccctgccnttgatgctgttgctctcgtccgcctcccttccacaggtaagcacgcaagacacaggtaccgtgtgccccaacggtgtcttgactcgctgttcctagacatcagtgtttgcttcactttacccatcccgatgctcttccttcctgcagcttcatgctccaatgagggctgattttcatttagctaaataacttttttttaagtatttctttgtatcatggttatgctttgactggccgtaagttctctcagcttttgtttgtctgaaaataaatttagttcgcctttattctgcacaggacagaattctaggtggatgatttttgccattcccagaactttaaagatgggctccactgtcttctggctcccatgtgttttgttaaaaattcagtgttcaggccgggtgctgtggctcacgcctgtaatcccagcactttgggaggccgaggcgagtggatcacgaggtcaggagatcgagaccatcctggctaacacggtgaaaccccgtctctactaaaaaatacaaaaaattagccgggcgtggtggctgtagtcgcagctactcaggaggctgaggcgggagaatggcgtgaacccaggagacggagcttgcagtgagccgagatcgcgccactgcactccagcctgggcgacagagcgagactccgtctcaaaaaaaaaaaaaaaagattcaatgttcattgttatttgttgctcctttgaaggtaatgngtcttttttctttgtcttaaaattgtttctccttatctttggttttcagcagtctgtgctgtgcctggatgtnattttctttttacgtatttttcttggaatatacagaactcaaatctgggagttagcatctttcatcagttttggaaaattcttagccattttttttttttttactattttttcccctgttctccctcttctccctgagacttcagttttgtgtgtgtgtgcacatgtntgtatgcattcgtgcgtacgagtgtgtgcatgtgtgcgcccgtgtgtatgtgcatatgtgagtgtgtgtggctgtaacctgcacgtctcttctgtcatgtgttctatttttcattcctctctgtacatcaggctagatgcctcctgtctacgtggttttagatttacgaatcctgtcttctgttgtgtcccacagaaaaacccatgaggttttttaacattaaaaacagcagctttatgatagagaaaaaaacacaaacatagacgattgtaccattgcactcagaagaaacatcccaggccctgagcagcgtgtctttcctcggccgagtcaggcttcctggtgagcctcagggagtgcatggtctcagatgccatccttctcttctccagcatttccactcacctccgtgttcttggggagtgcgtggtgtcagatcccatcctgctcctctccagagtttccggtcacctccgtgttctcagggagtgcgtggtcttggatgccatcctgctcatctccagcatttcctctcacctccgtgttctcggggagtgcgtggtgtcagatcccatcctgctcatctccagcatttcctctcacctctgtgttctcggggagtgcgtggtgtcagatcccatcctgctcctctccagcatttcctctcacctccgtgttctcggggagtgcgtggtgtcagatcccatcctgctcctctccagagtttcctctcacctccgtgttctcggggagtgcgtggtctcagatcccatcctgctcctctccagagtttcctctcacctccgtgttctcagggagtgcgtggtcttggatgccatcctgctcatctccagcatttcctctcacctccgtgttctcggggagtgcgtggtgtcagatcccatcctgctcctctccagcatttcctctcacctccgagctctcggggagtgcgtggtctcagatcccatcctgctcctctccagagtttcctctcacctccgtgttctcgttctcatctctgccggaattccacatctgctcgtgcatgccatccaccttttccactagatccttttacatcatcattataatgatttttttttaataagtgttttctttcagttttaaatttcagatgttgtgtttttcaggtctaaggtgtctggtaattttttgtggatgccgattctctgttgaaattctccatcttttcatttcctttatatctcttttcttcttttttctataatatattacatttttctaataagtttttagtgagtgtccagcattgtataagttgacccttgaacaagagtttgaattataagggtccacttataagtggatttttaaaaaaatatatattgcaaaaatttttggaaatttgcaacaatttgaaaaactttgcagatgagccacatagcctagaaatatctgaaaaaagaaaaagttatgtcatgaatgcataaaatatacagaccatacatggaccattcacagtagagagaaatgtcgccgtaaagatgcagcattggccgagtgcagtggctcacgcctgtaatcccagcactttgggaggccgaggtgggcagatcacctaaggtcaggagttcaagaccagcctggccaacatggagaaaccccgtgactactaaaaataaaaaattagccaggcatggtggcacatgcctgtaactccagctacttgggaggctgaggcaggagaatcacttgaacccggaaggcagaggttgcagtgagccgagatcacgccattgcactccagcctgggcaacaagagcaaaactctgtctcaaaaaaaaaaaaatgcagcattaaattataactgcatgaaattaactgcagtccacagtgtgctgctggaataattacaaagccacctcctgttgctattgcagtgagcgcaagcatgtcaaggatccgcttaaaacatcgtgtggtgctaatctctgcacgagcggttcatgtcttcagtacattgtgtatcacggtaaaaagtgatctgttttaactggacatggtggcacacgcctgcagtcccagctactcaggaggctgaggcaggaggatcccttgagcccaggaggtcgaggctgcagtgagctgtgattgcaccactgcactcaagcctgggcaacagagtgagaccccaacttgaaaaaaaggggacatcgggatgttcttgtgtatttttcatgttgagcgcaatactgtaaaccttgaagaacactttgggacccatagagtgccaccagtcatgccaaagagctcctgagaagcagagaaaagtcatgacatttcaagaaaaagttgaatttcttgatatgttccgtagattgaggtttacagctgcggttgcctaccaattcaagataaatgaatccagcgtaaggaccatagtaaaaaaataaggaaatttgtgagcaggcacaaaagccttaacactttctgtgaaatacctttttatcttgtattgggaatgcagcttttatgtgggtataggattgctgtgtgtgatggttcatattaaatgtcaacttgattagattgaagaatgtaaagtattgtttctgggtgttgccagaagagattaacatttgagtcagtggactgggagaagacccaccacagtgtgggcaggcaccatccagtcggctgccagcatggctggaaaaagcaggcagaagaaggtggctgaagctgactggctgagtcttctggccttcatctctctcccatgctggatgcttcctgcccttgaacatcagactccaagttctttagcttttggactcttggacctacactggtgttttgccaggggctctcgggccttcggccacagactgaaggctgcactgtcggcttccctcctttagaggtttggggactcagactgagctactactggcttccttgcccctcagtttgcagacagcctattgtgggacttcaccctgtgatcctgtgcctcagttctccttaataaactccatttcatatgn

SEQ ID NO: 15855 - DNA, 7952 bp, Homo sapiens
  misc_feature (3946)..(3946): n is a, c, g, or t
  misc_feature (4679)..(4679): n is a, c, g, or t
  misc_feature (4752)..(4752): n is a, c, g, or t
  misc_feature (4920)..(4920): n is a, c, g, or t
  misc_feature (7952)..(7952): n is a, c, g, or t
cgtaccggcgtctccatggcgaccgcgttggctgggtggcctccattgtcgggctgctgctctcagcggcggggctcgccagcgcttcagtgggcggggacgcggcaggtgactccagaccaaggaggatgagctgctgtccctggaagagaacggatggagggaagcagctcctacgaagttccctctgtggctgctgctgatctggaggagggtgctggtcagactaggagcttgcctgccaccccctccaaagatgttcacaagggtgttggaggcatcatcttttcctcctcaccgattttagacttgagtgaaagtggtctgtgccgtttggaggaggtctttagaatccccagccttcaacaattgcatctgcaaaggaatgccctgtgtgtgattcctcaagatttctttcagttgcttccgaacctgacttggctggacctccggtacaatagaattaaagcgcttccttctgggattggagctcaccagcatttgaaaactttgcttttagaaagaaatcctatcaaaatgttacctgtggagctggctcgttgtgcagaagggattggtggctatccagcgcttcctgcggatgtgggcagtagaacactctctccccagaaatccaacttctcaagaggctccaccggttagagagatgaccctccgtgacctcccgagcccaggactggagttgtctggagaccacgcgtctaaccaaggagctgtgaacgctcaggacccagagggggctgtgatgaaagagaaggccagctttctcccacctgtggaaaagccagacctgagtgaactcaggaagtctgcggactcctcagagaactggcccagcgaggaggagatcaggcgcttttggaagctgaggcaggagattgttgagcacgtgaaggcagacgttctgggagatcagctcttgacgagggaattacctccaaatctcaaggcggccttgaacattgagaaagaactaccaaagccaagacacgttttcagaaggaagacagcctcctccaggagcatcttacccgacctcttgtcaccgtaccaaatggcgatccgagcaaaaagactggaagagagccgagcggcggcgctccgagagctccaggagaagcaggctctgatggagcagcagagacgagagaaaagggcactgcaggagtggagagagcgagcccagaggatgaggaagaggaaggaagagctcagcaaactcctgcctccgcggaggagcatggtggcatcaaagattccctctgccacagatctgacagataacaggaaagtaccactgaatccgcctggaaaaatgaaaccaagcaaagagaaatcgccacaagcaagtaaagaaatgagtgccctgcaggagagaaatttagaagagaagataaaacagcacgtcctccaaatgcgtgagcaaagaagattccatggccaggccccactggaggagatgaggaaggctgccgaggatctggaaattgccacagagctacaggatgaagtattgaagctaaaattgggattaaccttgaacaaagatcgtcgacgggcggccctcactggaaacctttcgcttggcctgccggcagcacagcctcaaaatacattttttaacacaaaatatggagaatcaggaaatgttcgcagataccagtgacaccaggtggctggactgatggagacgtcttcagacaggagccgctcagtcttctttcccgggcgtcgcctcctgtgtggtgccggaagagcgccaggttcagtgttaccctgagggctgatttcgcgcagcctgttgttttccttagacaggtccacgtccctctcctgaggctgtggaagatttcagccgtattaaaagaaaggacactgtgagcacgtggtctcgccttcccttcttcctgcaggttcccgccaagccatgtgacagagtgctcacactcaggcacttgcctctctcctgtcctggagcccttgttacaaaagtactcacagctttccttcacttagttatttgagtgtgggagaggagaccaggtcacccgattcccgccaagccggaagtccctgcagcaccacctttggctaggagggaggggtgacagccaaaaagggcttcgggggagtggttaccctgctccctgcccagtgacaagccctcctttcccctgggggccctcctttcccctgctccctgcccagctacggggccctcctttcagccttgaccccttcctggttgctaccactcaggctgccactcagtggactccaccccagggacacggcagggtctgcagacctccccatgctagatcagccgtatttcatgctctgtctgcccaggctgtgtagattctgtgtgacttagtctcttgtgctgagtgtttgcttggatcttgaaaacatctttggtttgatttctttaacagaggtgagactattcagactttgtttatttttgtgttaattttggtaaatatggtttcagtgagtttcctcatttcatccaagttgtgcaatgtatcagcataaagttcctcttattttcagtatctttaggatccgtaataatgtcccctcttttattcttgacctggtgttcttcatcattcttgctatggatttatcaattttgttcctcttttccaaaagccccaggttttggcttcactggatttgctgtttgtcttctgtctcatgggtctctgcgccctgcacttcgtactttccgagagtttaactggtgcttagagagaaatgcatcacttccaaacccatgtattagagaagaagggcgtgaaatttatcacctaagctttccattcaggaagctagaaaaggtgtcagtgacctgttgcggcccagcggctggagcagcagacgtttgccatttctcacgcctgagggcaggcgttggagcagctcagccggcgttgctggtcagggtctcccgtgaggctggagtcagccgtgggttgagctgctctcctctgaaggtttaactgggcttggggctcagcttccaaggtgctcacctggttgttgatcagagagcgtgtccgttgtgatcccagtcctttgaaactgtgaagcctcgccccgcggcctgccgcaggatatgttttggtaaatgtagactgtgcacttgagaagaatgtattttgagttgttgggtacattgttttgtgtgtgtcaggtgacattgactaatcctgttgctcagagctcctgtacccttactgactgacttaagcctggtttctcagttactgagagaggcctgtgaacagttctagctatgatcatgaacatgtgttttcttcttagttatgtgagtttttgctatacgtgttttggggctattttgtcagatgcctacaaatttaggattgttttatcttcctgtcgaactgaccttgtcattattatgaactatttctcttcgcctctccttttcacttcttgccttctgtggattttgtctgatactaatccaggcacactgctgctgttttggtcagcgttttcataatgcatcttcttccctccttctactgtactggatttaaagcgcaccttatagagacatcatatactcgggactccttttctttctctagctgccagttctgtgtttcagttacagtgtttggccctcacatttaaggtgcgtgtgcgtacggcggattccgtgcccatctcatgtttttattccctttattcttcttttgctgctttctgatagtgatcaatttttttatttatatctcttgtattagagttttagtaatatcttttaatattattctcttgggtgttgccttagagatttcatacatgcccttgagttcattagcatttcctgaatgagccaatgaccctgagaaggtccctcccatctgccagttccctgccnttgatgctgttgctctcgtccgcctcccttccacaggtaagcacgcaagacacaggtaccgtgtgccccaacggtgtcttgactcgctgttcctagacatcagtgtttgcttcactttacccatcccgatgctcttccttcctgcagcttcatgctccaatgagggctgattttcatttagctaaataacttttttttaagtatttctttgtatcatggttatgctttgactggccgtaagttctctcagcttttgtttgtctgaaaataaatttagttcgcctttattctgcacaggacagaattctaggtggatgatttttgccattcccagaactttaaagatgggctccactgtcttctggctcccatgtgttttgttaaaaattcagtgttcaggccgggtgctgtggctcacgcctgtaatcccagcactttgggaggccgaggcgagtggatcacgaggtcaggagatcgagaccatcctggctaacacggtgaaaccccgtctctactaaaaaatacaaaaaattagccgggcgtggtggctgtagtcgcagctactcaggaggctgaggcgggagaatggcgtgaacccaggagacggagcttgcagtgagccgagatcgcgccactgcactccagcctgggcgacagagcgagactccgtctcaaaaaaaaaaaaaaaagattcaatgttcattgttatttgttgctcctttgaaggtaatgngtcttttttctttgtcttaaaattgtttctccttatctttggttttcagcagtctgtgctgtgcctggatgtnattttctttttacgtatttttcttggaatatacagaactcaaatctgggagttagcatctttcatcagttttggaaaattcttagccattttttttttttttactattttttcccctgttctccctcttctccctgagacttcagttttgtgtgtgtgtgcacatgtntgtatgcattcgtgcgtacgagtgtgtgcatgtgtgcgcccgtgtgtatgtgcatatgtgagtgtgtgtggctgtaacctgcacgtctcttctgtcatgtgttctatttttcattcctctctgtacatcaggctagatgcctcctgtctacgtggttttagatttacgaatcctgtcttctgttgtgtcccacagaaaaacccatgaggttttttaacattaaaaacagcagctttatgatagagaaaaaaacacaaacatagacgattgtaccattgcactcagaagaaacatcccaggccctgagcagcgtgtctttcctcggccgagtcaggcttcctggtgagcctcagggagtgcatggtctcagatgccatccttctcttctccagcatttccactcacctccgtgttcttggggagtgcgtggtgtcagatcccatcctgctcctctccagagtttccggtcacctccgtgttctcagggagtgcgtggtcttggatgccatcctgctcatctccagcatttcctctcacctccgtgttctcggggagtgcgtggtgtcagatcccatcctgctcatctccagcatttcctctcacctctgtgttctcggggagtgcgtggtgtcagatcccatcctgctcctctccagcatttcctctcacctccgtgttctcggggagtgcgtggtgtcagatcccatcctgctcctctccagagtttcctctcacctccgtgttctcggggagtgcgtggtctcagatcccatcctgctcctctccagagtttcctctcacctccgtgttctcagggagtgcgtggtcttggatgccatcctgctcatctccagcatttcctctcacctccgtgttctcggggagtgcgtggtgtcagatcccatcctgctcctctccagcatttcctctcacctccgagctctcggggagtgcgtggtctcagatcccatcctgctcctctccagagtttcctctcacctccgtgttctcgttctcatctctgccggaattccacatctgctcgtgcatgccatccaccttttccactagatccttttacatcatcattataatgatttttttttaataagtgttttctttcagttttaaatttcagatgttgtgtttttcaggtctaaggtgtctggtaattttttgtggatgccgattctctgttgaaattctccatcttttcatttcctttatatctcttttcttcttttttctataatatattacatttttctaataagtttttagtgagtgtccagcattgtataagttgacccttgaacaagagtttgaattataagggtccacttataagtggatttttaaaaaaatatatattgcaaaaatttttggaaatttgcaacaatttgaaaaactttgcagatgagccacatagcctagaaatatctgaaaaaagaaaaagttatgtcatgaatgcataaaatatacagaccatacatggaccattcacagtagagagaaatgtcgccgtaaagatgcagcattggccgagtgcagtggctcacgcctgtaatcccagcactttgggaggccgaggtgggcagatcacctaaggtcaggagttcaagaccagcctggccaacatggagaaaccccgtgactactaaaaataaaaaattagccaggcatggtggcacatgcctgtaactccagctacttgggaggctgaggcaggagaatcacttgaacccggaaggcagaggttgcagtgagccgagatcacgccattgcactccagcctgggcaacaagagcaaaactctgtctcaaaaaaaaaaaaatgcagcattaaattataactgcatgaaattaactgcagtccacagtgtgctgctggaataattacaaagccacctcctgttgctattgcagtgagcgcaagcatgtcaaggatccgcttaaaacatcgtgtggtgctaatctctgcacgagcggttcatgtcttcagtacattgtgtatcacggtaaaaagtgatctgttttaactggacatggtggcacacgcctgcagtcccagctactcaggaggctgaggcaggaggatcccttgagcccaggaggtcgaggctgcagtgagctgtgattgcaccactgcactcaagcctgggcaacagagtgagaccccaacttgaaaaaaaggggacatcgggatgttcttgtgtatttttcatgttgagcgcaatactgtaaaccttgaagaacactttgggacccatagagtgccaccagtcatgccaaagagctcctgagaagcagagaaaagtcatgacatttcaagaaaaagttgaatttcttgatatgttccgtagattgaggtttacagctgcggttgcctaccaattcaagataaatgaatccagcgtaaggaccatagtaaaaaaataaggaaatttgtgagcaggcacaaaagccttaacactttctgtgaaatacctttttatcttgtattgggaatgcagcttttatgtgggtataggattgctgtgtgtgatggttcatattaaatgtcaacttgattagattgaagaatgtaaagtattgtttctgggtgttgccagaagagattaacatttgagtcagtggactgggagaagacccaccacagtgtgggcaggcaccatccagtcggctgccagcatggctggaaaaagcaggcagaagaaggtggctgaagctgactggctgagtcttctggccttcatctctctcccatgctggatgcttcctgcccttgaacatcagactccaagttctttagcttttggactcttggacctacactggtgttttgccaggggctctcgggccttcggccacagactgaaggctgcactgtcggcttccctcctttagaggtttggggactcagactgagctactactggcttccttgcccctcagtttgcagacagcctattgtgggacttcaccctgtgatcctgtgcctcagttctccttaataaactccatttcatatgn

SEQ ID NO: 15856 - DNA, 7932 bp, Homo sapiens
  misc_feature (3926)..(3926): n is a, c, g, or t
  misc_feature (4659)..(4659): n is a, c, g, or t
  misc_feature (4732)..(4732): n is a, c, g, or t
  misc_feature (4900)..(4900): n is a, c, g, or t
  misc_feature (7932)..(7932): n is a, c, g, or t
cccagaccagacatggctctggctatttgctcagtaagcaggcgatttcgggggctgccgagggccaggtgctgcggcaggcactggagaaacggccgagacactgagtgtggggccccggaattcagaccatgtcaaaggctttgggatagaaacagtggtgtgctgggtcagcagcagagtgccggctcttcaggaagtcagttccggctccaaaggccgccggaaggagtcctggttcttttctttctgattcttttgtctactgtttacatcttttaaggcaattgcatctgcaaaggaatgccctgtgtgtgattcctcaagatttctttcagttgcttccgaacctgacttggctggacctccggtacaatagaattaaagcgcttccttctgggattggagctcaccagcatttgaaaactttgcttttagaaagaaatcctatcaaaatgttacctgtggagctggggagcgtaaccacgctgaaagcactgaacctaagacactgccctctggaattccctcctcagctcgttgtgcagaagggattggtggctatccagcgcttcctgcggatgtgggcagtagaacactctctccccagaaatccaacttctcaagaggctccaccggttagagagatgaccctccgtgacctcccgagcccaggactggagttgtctggagaccacgcgtctaaccaaggagctgtgaacgctcaggacccagagggggctgtgatgaaagagaaggccagctttctcccacctgtggaaaagccagacctgagtgaactcaggaagtctgcggactcctcagagaactggcccagcgaggaggagatcaggcgcttttggaagctgaggcaggagattgttgagcacgtgaaggcagacgttctgggagatcagctcttgacgagggaattacctccaaatctcaaggcggccttgaacattgagaaagaactaccaaagccaagacacgttttcagaaggaagacagcctcctccaggagcatcttacccgacctcttgtcaccgtaccaaatggcgatccgagcaaaaagactggaagagagccgagcggcggcgctccgagagctccaggagaagcaggctctgatggagcagcagagacgagagaaaagggcactgcaggagtggagagagcgagcccagaggatgaggaagaggaaggaagagctcagcaaactcctgcctccgcggaggagcatggtggcatcaaagattccctctgccacagatctgacagataacaggaaagtaccactgaatccgcctggaaaaatgaaaccaagcaaagagaaatcgccacaagcaagtaaagaaatgagtgccctgcaggagagaaatttagaagagaagataaaacagcacgtcctccaaatgcgtgagcaaagaagattccatggccaggccccactggaggagatgaggaaggctgccgaggatctggaaattgccacagagctacaggatgaagtattgaagctaaaattgggattaaccttgaacaaagatcgtcgacgggcggccctcactggaaacctttcgcttggcctgccggcagcacagcctcaaaatacattttttaacacaaaatatggagaatcaggaaatgttcgcagataccagtgacaccaggtggctggactgatggagacgtcttcagacaggagccgctcagtcttctttcccgggcgtcgcctcctgtgtggtgccggaagagcgccaggttcagtgttaccctgagggctgatttcgcgcagcctgttgttttccttagacaggtccacgtccctctcctgaggctgtggaagatttcagccgtattaaaagaaaggacactgtgagcacgtggtctcgccttcccttcttcctgcaggttcccgccaagccatgtgacagagtgctcacactcaggcacttgcctctctcctgtcctggagcccttgttacaaaagtactcacagctttccttcacttagttatttgagtgtgggagaggagaccaggtcacccgattcccgccaagccggaagtccctgcagcaccacctttggctaggagggaggggtgacagccaaaaagggcttcgggggagtggttaccctgctccctgcccagtgacaagccctcctttcccctgggggccctcctttcccctgctccctgcccagctacggggccctcctttcagccttgaccccttcctggttgctaccactcaggctgccactcagtggactccaccccagggacacggcagggtctgcagacctccccatgctagatcagccgtatttcatgctctgtctgcccaggctgtgtagattctgtgtgacttagtctcttgtgctgagtgtttgcttggatcttgaaaacatctttggtttgatttctttaacagaggtgagactattcagactttgtttatttttgtgttaattttggtaaatatggtttcagtgagtttcctcatttcatccaagttgtgcaatgtatcagcataaagttcctcttattttcagtatctttaggatccgtaataatgtcccctcttttattcttgacctggtgttcttcatcattcttgctatggatttatcaattttgttcctcttttccaaaagccccaggttttggcttcactggatttgctgtttgtcttctgtctcatgggtctctgcgccctgcacttcgtactttccgagagtttaactggtgcttagagagaaatgcatcacttccaaacccatgtattagagaagaagggcgtgaaatttatcacctaagctttccattcaggaagctagaaaaggtgtcagtgacctgttgcggcccagcggctggagcagcagacgtttgccatttctcacgcctgagggcaggcgttggagcagctcagccggcgttgctggtcagggtctcccgtgaggctggagtcagccgtgggttgagctgctctcctctgaaggtttaactgggcttggggctcagcttccaaggtgctcacctggttgttgatcagagagcgtgtccgttgtgatcccagtcctttgaaactgtgaagcctcgccccgcggcctgccgcaggatatgttttggtaaatgtagactgtgcacttgagaagaatgtattttgagttgttgggtacattgttttgtgtgtgtcaggtgacattgactaatcctgttgctcagagctcctgtacccttactgactgacttaagcctggtttctcagttactgagagaggcctgtgaacagttctagctatgatcatgaacatgtgttttcttcttagttatgtgagtttttgctatacgtgttttggggctattttgtcagatgcctacaaatttaggattgttttatcttcctgtcgaactgaccttgtcattattatgaactatttctcttcgcctctccttttcacttcttgccttctgtggattttgtctgatactaatccaggcacactgctgctgttttggtcagcgttttcataatgcatcttcttccctccttctactgtactggatttaaagcgcaccttatagagacatcatatactcgggactccttttctttctctagctgccagttctgtgtttcagttacagtgtttggccctcacatttaaggtgcgtgtgcgtacggcggattccgtgcccatctcatgtttttattccctttattcttcttttgctgctttctgatagtgatcaatttttttatttatatctcttgtattagagttttagtaatatcttttaatattattctcttgggtgttgccttagagatttcatacatgcccttgagttcattagcatttcctgaatgagccaatgaccctgagaaggtccctcccatctgccagttccctgccnttgatgctgttgctctcgtccgcctcccttccacaggtaagcacgcaagacacaggtaccgtgtgccccaacggtgtcttgactcgctgttcctagacatcagtgtttgcttcactttacccatcccgatgctcttccttcctgcagcttcatgctccaatgagggctgattttcatttagctaaataacttttttttaagtatttctttgtatcatggttatgctttgactggccgtaagttctctcagcttttgtttgtctgaaaataaatttagttcgcctttattctgcacaggacagaattctaggtggatgatttttgccattcccagaactttaaagatgggctccactgtcttctggctcccatgtgttttgttaaaaattcagtgttcaggccgggtgctgtggctcacgcctgtaatcccagcactttgggaggccgaggcgagtggatcacgaggtcaggagatcgagaccatcctggctaacacggtgaaaccccgtctctactaaaaaatacaaaaaattagccgggcgtggtggctgtagtcgcagctactcaggaggctgaggcgggagaatggcgtgaacccaggagacggagcttgcagtgagccgagatcgcgccactgcactccagcctgggcgacagagcgagactccgtctcaaaaaaaaaaaaaaaagattcaatgttcattgttatttgttgctcctttgaaggtaatgngtcttttttctttgtcttaaaattgtttctccttatctttggttttcagcagtctgtgctgtgcctggatgtnattttctttttacgtatttttcttggaatatacagaactcaaatctgggagttagcatctttcatcagttttggaaaattcttagccattttttttttttttactattttttcccctgttctccctcttctccctgagacttcagttttgtgtgtgtgtgcacatgtntgtatgcattcgtgcgtacgagtgtgtgcatgtgtgcgcccgtgtgtatgtgcatatgtgagtgtgtgtggctgtaacctgcacgtctcttctgtcatgtgttctatttttcattcctctctgtacatcaggctagatgcctcctgtctacgtggttttagatttacgaatcctgtcttctgttgtgtcccacagaaaaacccatgaggttttttaacattaaaaacagcagctttatgatagagaaaaaaacacaaacatagacgattgtaccattgcactcagaagaaacatcccaggccctgagcagcgtgtctttcctcggccgagtcaggcttcctggtgagcctcagggagtgcatggtctcagatgccatccttctcttctccagcatttccactcacctccgtgttcttggggagtgcgtggtgtcagatcccatcctgctcctctccagagtttccggtcacctccgtgttctcagggagtgcgtggtcttggatgccatcctgctcatctccagcatttcctctcacctccgtgttctcggggagtgcgtggtgtcagatcccatcctgctcatctccagcatttcctctcacctctgtgttctcggggagtgcgtggtgtcagatcccatcctgctcctctccagcatttcctctcacctccgtgttctcggggagtgcgtggtgtcagatcccatcctgctcctctccagagtttcctctcacctccgtgttctcggggagtgcgtggtctcagatcccatcctgctcctctccagagtttcctctcacctccgtgttctcagggagtgcgtggtcttggatgccatcctgctcatctccagcatttcctctcacctccgtgttctcggggagtgcgtggtgtcagatcccatcctgctcctctccagcatttcctctcacctccgagctctcggggagtgcgtggtctcagatcccatcctgctcctctccagagtttcctctcacctccgtgttctcgttctcatctctgccggaattccacatctgctcgtgcatgccatccaccttttccactagatccttttacatcatcattataatgatttttttttaataagtgttttctttcagttttaaatttcagatgttgtgtttttcaggtctaaggtgtctggtaattttttgtggatgccgattctctgttgaaattctccatcttttcatttcctttatatctcttttcttcttttttctataatatattacatttttctaataagtttttagtgagtgtccagcattgtataagttgacccttgaacaagagtttgaattataagggtccacttataagtggatttttaaaaaaatatatattgcaaaaatttttggaaatttgcaacaatttgaaaaactttgcagatgagccacatagcctagaaatatctgaaaaaagaaaaagttatgtcatgaatgcataaaatatacagaccatacatggaccattcacagtagagagaaatgtcgccgtaaagatgcagcattggccgagtgcagtggctcacgcctgtaatcccagcactttgggaggccgaggtgggcagatcacctaaggtcaggagttcaagaccagcctggccaacatggagaaaccccgtgactactaaaaataaaaaattagccaggcatggtggcacatgcctgtaactccagctacttgggaggctgaggcaggagaatcacttgaacccggaaggcagaggttgcagtgagccgagatcacgccattgcactccagcctgggcaacaagagcaaaactctgtctcaaaaaaaaaaaaatgcagcattaaattataactgcatgaaattaactgcagtccacagtgtgctgctggaataattacaaagccacctcctgttgctattgcagtgagcgcaagcatgtcaaggatccgcttaaaacatcgtgtggtgctaatctctgcacgagcggttcatgtcttcagtacattgtgtatcacggtaaaaagtgatctgttttaactggacatggtggcacacgcctgcagtcccagctactcaggaggctgaggcaggaggatcccttgagcccaggaggtcgaggctgcagtgagctgtgattgcaccactgcactcaagcctgggcaacagagtgagaccccaacttgaaaaaaaggggacatcgggatgttcttgtgtatttttcatgttgagcgcaatactgtaaaccttgaagaacactttgggacccatagagtgccaccagtcatgccaaagagctcctgagaagcagagaaaagtcatgacatttcaagaaaaagttgaatttcttgatatgttccgtagattgaggtttacagctgcggttgcctaccaattcaagataaatgaatccagcgtaaggaccatagtaaaaaaataaggaaatttgtgagcaggcacaaaagccttaacactttctgtgaaatacctttttatcttgtattgggaatgcagcttttatgtgggtataggattgctgtgtgtgatggttcatattaaatgtcaacttgattagattgaagaatgtaaagtattgtttctgggtgttgccagaagagattaacatttgagtcagtggactgggagaagacccaccacagtgtgggcaggcaccatccagtcggctgccagcatggctggaaaaagcaggcagaagaaggtggctgaagctgactggctgagtcttctggccttcatctctctcccatgctggatgcttcctgcccttgaacatcagactccaagttctttagcttttggactcttggacctacactggtgttttgccaggggctctcgggccttcggccacagactgaaggctgcactgtcggcttccctcctttagaggtttggggactcagactgagctactactggcttccttgcccctcagtttgcagacagcctattgtgggacttcaccctgtgatcctgtgcctcagttctccttaataaactccatttcatatgn

SEQ ID NO: 15857 - DNA, 7955 bp, Homo sapiens
  misc_feature (3949)..(3949): n is a, c, g, or t
  misc_feature (4682)..(4682): n is a, c, g, or t
  misc_feature (4755)..(4755): n is a, c, g, or t
  misc_feature (4923)..(4923): n is a, c, g, or t
  misc_feature (7955)..(7955): n is a, c, g, or t
cgtaccggcgtctccatggcgaccgcgttggctgggtggcctccattgtcgggctgctgctctcagcggcggggctcgccagcgcttcagtgggcggggacgcggcaggtgactccagaccaaggaggatgagctgctgtccctggaagagaacggatggagggaagcagctcctacgaagttccctctgtggctgctgctgatctggaggagggtgctggtcagactaggagcttgcctgccaccccctccaaagatgttcacaagggtgttggaggcatcatcttttcctcctcaccgattttagacttgagtgaaagtggtctgtgccgtttggaggaggtctttagaatccccagccttcaacaattgcatctgcaaaggaatgccctgtgtgtgattcctcaagatttctttcagttgcttccgaacctgacttggctggacctccggtacaatagaattaaagcgcttccttctgggattggagctcaccaggagcgtaaccacgctgaaagcactgaacctaagacactgccctctggaattccctcctcagctcgttgtgcagaagggattggtggctatccagcgcttcctgcggatgtgggcagtagaacactctctccccagaaatccaacttctcaagaggctccaccggttagagagatgaccctccgtgacctcccgagcccaggactggagttgtctggagaccacgcgtctaaccaaggagctgtgaacgctcaggacccagagggggctgtgatgaaagagaaggccagctttctcccacctgtggaaaagccagacctgagtgaactcaggaagtctgcggactcctcagagaactggcccagcgaggaggagatcaggcgcttttggaagctgaggcaggagattgttgagcacgtgaaggcagacgttctgggagatcagctcttgacgagggaattacctccaaatctcaaggcggccttgaacattgagaaagaactaccaaagccaagacacgttttcagaaggaagacagcctcctccaggagcatcttacccgacctcttgtcaccgtaccaaatggcgatccgagcaaaaagactggaagagagccgagcggcggcgctccgagagctccaggagaagcaggctctgatggagcagcagagacgagagaaaagggcactgcaggagtggagagagcgagcccagaggatgaggaagaggaaggaagagctcagcaaactcctgcctccgcggaggagcatggtggcatcaaagattccctctgccacagatctgacagataacaggaaagtaccactgaatccgcctggaaaaatgaaaccaagcaaagagaaatcgccacaagcaagtaaagaaatgagtgccctgcaggagagaaatttagaagagaagataaaacagcacgtcctccaaatgcgtgagcaaagaagattccatggccaggccccactggaggagatgaggaaggctgccgaggatctggaaattgccacagagctacaggatgaagtattgaagctaaaattgggattaaccttgaacaaagatcgtcgacgggcggccctcactggaaacctttcgcttggcctgccggcagcacagcctcaaaatacattttttaacacaaaatatggagaatcaggaaatgttcgcagataccagtgacaccaggtggctggactgatggagacgtcttcagacaggagccgctcagtcttctttcccgggcgtcgcctcctgtgtggtgccggaagagcgccaggttcagtgttaccctgagggctgatttcgcgcagcctgttgttttccttagacaggtccacgtccctctcctgaggctgtggaagatttcagccgtattaaaagaaaggacactgtgagcacgtggtctcgccttcccttcttcctgcaggttcccgccaagccatgtgacagagtgctcacactcaggcacttgcctctctcctgtcctggagcccttgttacaaaagtactcacagctttccttcacttagttatttgagtgtgggagaggagaccaggtcacccgattcccgccaagccggaagtccctgcagcaccacctttggctaggagggaggggtgacagccaaaaagggcttcgggggagtggttaccctgctccctgcccagtgacaagccctcctttcccctgggggccctcctttcccctgctccctgcccagctacggggccctcctttcagccttgaccccttcctggttgctaccactcaggctgccactcagtggactccaccccagggacacggcagggtctgcagacctccccatgctagatcagccgtatttcatgctctgtctgcccaggctgtgtagattctgtgtgacttagtctcttgtgctgagtgtttgcttggatcttgaaaacatctttggtttgatttctttaacagaggtgagactattcagactttgtttatttttgtgttaattttggtaaatatggtttcagtgagtttcctcatttcatccaagttgtgcaatgtatcagcataaagttcctcttattttcagtatctttaggatccgtaataatgtcccctcttttattcttgacctggtgttcttcatcattcttgctatggatttatcaattttgttcctcttttccaaaagccccaggttttggcttcactggatttgctgtttgtcttctgtctcatgggtctctgcgccctgcacttcgtactttccgagagtttaactggtgcttagagagaaatgcatcacttccaaacccatgtattagagaagaagggcgtgaaatttatcacctaagctttccattcaggaagctagaaaaggtgtcagtgacctgttgcggcccagcggctggagcagcagacgtttgccatttctcacgcctgagggcaggcgttggagcagctcagccggcgttgctggtcagggtctcccgtgaggctggagtcagccgtgggttgagctgctctcctctgaaggtttaactgggcttggggctcagcttccaaggtgctcacctggttgttgatcagagagcgtgtccgttgtgatcccagtcctttgaaactgtgaagcctcgccccgcggcctgccgcaggatatgttttggtaaatgtagactgtgcacttgagaagaatgtattttgagttgttgggtacattgttttgtgtgtgtcaggtgacattgactaatcctgttgctcagagctcctgtacccttactgactgacttaagcctggtttctcagttactgagagaggcctgtgaacagttctagctatgatcatgaacatgtgttttcttcttagttatgtgagtttttgctatacgtgttttggggctattttgtcagatgcctacaaatttaggattgttttatcttcctgtcgaactgaccttgtcattattatgaactatttctcttcgcctctccttttcacttcttgccttctgtggattttgtctgatactaatccaggcacactgctgctgttttggtcagcgttttcataatgcatcttcttccctccttctactgtactggatttaaagcgcaccttatagagacatcatatactcgggactccttttctttctctagctgccagttctgtgtttcagttacagtgtttggccctcacatttaaggtgcgtgtgcgtacggcggattccgtgcccatctcatgtttttattccctttattcttcttttgctgctttctgatagtgatcaatttttttatttatatctcttgtattagagttttagtaatatcttttaatattattctcttgggtgttgccttagagatttcatacatgcccttgagttcattagcatttcctgaatgagccaatgaccctgagaaggtccctcccatctgccagttccctgccnttgatgctgttgctctcgtccgcctcccttccacaggtaagcacgcaagacacaggtaccgtgtgccccaacggtgtcttgactcgctgttcctagacatcagtgtttgcttcactttacccatcccgatgctcttccttcctgcagcttcatgctccaatgagggctgattttcatttagctaaataacttttttttaagtatttctttgtatcatggttatgctttgactggccgtaagttctctcagcttttgtttgtctgaaaataaatttagttcgcctttattctgcacaggacagaattctaggtggatgatttttgccattcccagaactttaaagatgggctccactgtcttctggctcccatgtgttttgttaaaaattcagtgttcaggccgggtgctgtggctcacgcctgtaatcccagcactttgggaggccgaggcgagtggatcacgaggtcaggagatcgagaccatcctggctaacacggtgaaaccccgtctctactaaaaaatacaaaaaattagccgggcgtggtggctgtagtcgcagctactcaggaggctgaggcgggagaatggcgtgaacccaggagacggagcttgcagtgagccgagatcgcgccactgcactccagcctgggcgacagagcgagactccgtctcaaaaaaaaaaaaaaaagattcaatgttcattgttatttgttgctcctttgaaggtaatgngtcttttttctttgtcttaaaattgtttctccttatctttggttttcagcagtctgtgctgtgcctggatgtnattttctttttacgtatttttcttggaatatacagaactcaaatctgggagttagcatctttcatcagttttggaaaattcttagccattttttttttttttactattttttcccctgttctccctcttctccctgagacttcagttttgtgtgtgtgtgcacatgtntgtatgcattcgtgcgtacgagtgtgtgcatgtgtgcgcccgtgtgtatgtgcatatgtgagtgtgtgtggctgtaacctgcacgtctcttctgtcatgtgttctatttttcattcctctctgtacatcaggctagatgcctcctgtctacgtggttttagatttacgaatcctgtcttctgttgtgtcccacagaaaaacccatgaggttttttaacattaaaaacagcagctttatgatagagaaaaaaacacaaacatagacgattgtaccattgcactcagaagaaacatcccaggccctgagcagcgtgtctttcctcggccgagtcaggcttcctggtgagcctcagggagtgcatggtctcagatgccatccttctcttctccagcatttccactcacctccgtgttcttggggagtgcgtggtgtcagatcccatcctgctcctctccagagtttccggtcacctccgtgttctcagggagtgcgtggtcttggatgccatcctgctcatctccagcatttcctctcacctccgtgttctcggggagtgcgtggtgtcagatcccatcctgctcatctccagcatttcctctcacctctgtgttctcggggagtgcgtggtgtcagatcccatcctgctcctctccagcatttcctctcacctccgtgttctcggggagtgcgtggtgtcagatcccatcctgctcctctccagagtttcctctcacctccgtgttctcggggagtgcgtggtctcagatcccatcctgctcctctccagagtttcctctcacctccgtgttctcagggagtgcgtggtcttggatgccatcctgctcatctccagcatttcctctcacctccgtgttctcggggagtgcgtggtgtcagatcccatcctgctcctctccagcatttcctctcacctccgagctctcggggagtgcgtggtctcagatcccatcctgctcctctccagagtttcctctcacctccgtgttctcgttctcatctctgccggaattccacatctgctcgtgcatgccatccaccttttccactagatccttttacatcatcattataatgatttttttttaataagtgttttctttcagttttaaatttcagatgttgtgtttttcaggtctaaggtgtctggtaattttttgtggatgccgattctctgttgaaattctccatcttttcatttcctttatatctcttttcttcttttttctataatatattacatttttctaataagtttttagtgagtgtccagcattgtataagttgacccttgaacaagagtttgaattataagggtccacttataagtggatttttaaaaaaatatatattgcaaaaatttttggaaatttgcaacaatttgaaaaactttgcagatgagccacatagcctagaaatatctgaaaaaagaaaaagttatgtcatgaatgcataaaatatacagaccatacatggaccattcacagtagagagaaatgtcgccgtaaagatgcagcattggccgagtgcagtggctcacgcctgtaatcccagcactttgggaggccgaggtgggcagatcacctaaggtcaggagttcaagaccagcctggccaacatggagaaaccccgtgactactaaaaataaaaaattagccaggcatggtggcacatgcctgtaactccagctacttgggaggctgaggcaggagaatcacttgaacccggaaggcagaggttgcagtgagccgagatcacgccattgcactccagcctgggcaacaagagcaaaactctgtctcaaaaaaaaaaaaatgcagcattaaattataactgcatgaaattaactgcagtccacagtgtgctgctggaataattacaaagccacctcctgttgctattgcagtgagcgcaagcatgtcaaggatccgcttaaaacatcgtgtggtgctaatctctgcacgagcggttcatgtcttcagtacattgtgtatcacggtaaaaagtgatctgttttaactggacatggtggcacacgcctgcagtcccagctactcaggaggctgaggcaggaggatcccttgagcccaggaggtcgaggctgcagtgagctgtgattgcaccactgcactcaagcctgggcaacagagtgagaccccaacttgaaaaaaaggggacatcgggatgttcttgtgtatttttcatgttgagcgcaatactgtaaaccttgaagaacactttgggacccatagagtgccaccagtcatgccaaagagctcctgagaagcagagaaaagtcatgacatttcaagaaaaagttgaatttcttgatatgttccgtagattgaggtttacagctgcggttgcctaccaattcaagataaatgaatccagcgtaaggaccatagtaaaaaaataaggaaatttgtgagcaggcacaaaagccttaacactttctgtgaaatacctttttatcttgtattgggaatgcagcttttatgtgggtataggattgctgtgtgtgatggttcatattaaatgtcaacttgattagattgaagaatgtaaagtattgtttctgggtgttgccagaagagattaacatttgagtcagtggactgggagaagacccaccacagtgtgggcaggcaccatccagtcggctgccagcatggctggaaaaagcaggcagaagaaggtggctgaagctgactggctgagtcttctggccttcatctctctcccatgctggatgcttcctgcccttgaacatcagactccaagttctttagcttttggactcttggacctacactggtgttttgccaggggctctcgggccttcggccacagactgaaggctgcactgtcggcttccctcctttagaggtttggggactcagactgagctactactggcttccttgcccctcagtttgcagacagcctattgtgggacttcaccctgtgatcctgtgcctcagttctccttaataaactccatttcatatgn

SEQ ID NO: 15858 - DNA, 1964 bp, Homo sapiens
cgtaccggcgtctccatggcgaccgcgttggctgggtggcctccattgtcgggctgctgctctcagcggcggggctcgccagcgcttcagtgggcggggacgcggcaggtgactccagaccaaggaggatgagctgctgtccctggaagagaacggatggagggaagcagctcctacgaagttccctctgtggctgctgctgatctggaggagggtgctggtcagactaggagcttgcctgccaccccctccaaagatgttcacaagggtgttggaggcatcatcttttcctcctcaccgattttagacttgagtgaaagtggtctgtgccgtttggaggaggtctttagaatccccagccttcaacaattgcatctgcaaaggaatgccctgtgtgtgattcctcaagatttctttcagttgcttccgaacctgacttggctggacctccggtacaatagaattaaagcgcttccttctgggattggagctcaccagcatttgaaaactttgcttttagaaagaaatcctatcaaaatgttacctgtggagctggggagcgtaaccacgctgaaagcactgaacctaagacactgccctctggaattccctcctcagctcgttgtgcagaagggattggtggctatccagcgcttcctgcggatgtgggcagtagaacactctctccccagaaatccaacttctcaagaggctccaccggttagagagatgaccctccgtgacctcccgagcccaggactggagttgtctggagaccacgcgtctaaccaaggagctgtgaacgctcaggacccagagggggctgtgatgaaagagaaggccagctttctcccacctgtggaaaagccagacctgagtgaactcaggaagtctgcggactcctcagagaactggcccagcgaggaggagatcaggcgcttttggaagctgaggcaggagattgttgagcacgtgaaggcagacgttctgggagatcagctcttgacgagggaattacctccaaatctcaaggcggccttgaacattgagaaagaactaccaaagccaagacacgttttcagaaggaagacagcctcctccaggagcatcttacccgacctcttgtcaccgtaccaaatggcgatccgagcaaaaagactggaagagagccgagcggcggcgctccgagagctccaggagaagcaggctctgatggagcagcagagacgagagaaaagggcactgcaggagtggagagagcgagcccagaggatgaggaagaggaaggaagagctcagcaaactcctgcctccgcggaggagcatggtggcatcaaagattccctctgccacagatctgacagataacaggaaagtaccactgaatccgcctggaaaaatgaaaccaagcaaagagaaatcgccacaagcaagtaaagaaatgagtgccctgcaggagagaaatttagaagagaagataaaacagcacgtcctccaaatgcgtgagcaaagaagattccatggccaggccccactggaggagatgaggaaggctgccgaggatctggaaattgccacagagctacaggatgaagtattgaagctaaaattgggattaaccttgaacaaagatcgtcgacgggcggccctcactggaaacctttcgcttggcctgccggcagcacagcctcaaaatacattttttaacacaaaatatggagaatcaggaaatgttcgcagataccagtgacaccaggtggctggactgatggagacgtcttcagacaggagccgctcagtcttctttcccgggcgtcgcctcctgtgtggtgccggaagagcgccaggttcagtgttaccctgagggctgatttcgcgcagcctgttgttttccttagacaggtccacgtccctctcctgaggctgtggaagatttcagccgtattaaaagaaaggacactgtga

SEQ ID NO: 15859 - DNA, 1791 bp, Homo sapiens
cgtaccggcgtctccatggcgaccgcgttggctgggtggcctccattgtcgggctgctgctctcagcggcggggctcgccagcgcttcagtgggcggggacgcggcaggtgactccagaccaaggaggatgagctgctgtccctggaagagaacggatggagggaagcagctcctacgaagttccctctgtggctgctgctgatctggaggagggtgctggtcagactaggagcttgcctgccaccccctccaaagatgttcacaagggtgttggaggcatcatcttttcctcctcaccgattttagacttgagtgaaagtggtctgtgccgtttggaggaggtctttagaatccccagccttcaacaattgcatctgcaaaggaatgccctgtgtgtgattcctcaagatttctttcagttgcttccgaacctgacttggctggacctccggtacaatagaattaaagcgcttccttctgggattggagctcaccagcatttgaaaactttgcttttagaaagaaatcctatcaaaatgttacctgtggagctggggagcgtaaccacgctgaaagcactgaacctaagacactgccctctggaattccctcctcagctcgttgtgcagaagggattggtggctatccagcgcttcctgcggatgtgggcagtagaacactctctccccagaaatccaacttctcaagaggctccaccggttagagagatgaccctccgtgacctcccgagcccaggactggagttgtctggagaccacgcgtctaaccaaggagctgtgaacgctcaggacccagagggggctgtgatgaaagagaaggccagctttctcccacctgtggaaaagccagacctgagtgaactcaggaagtctgcggactcctcagagaactggcccagcgaggaggagatcaggcgcttttggaagctgaggcaggagattgttgagcacgtgaaggcagacgttctgggagatcagctcttgacgagggaattacctccaaatctcaaggcggccttgaacattgagaaagaactaccaaagccaagacacgttttcagaaggaagacagcctcctccaggagcatcttacccgacctcttgtcaccgtaccaaatggcgatccgagcaaaaagactggaagagagccgagcggcggcgctccgagagctccaggagaagcaggctctgatggagcagcagagacgagagaaaagggcactgcaggagtggagagagcgagcccagaggatgaggaagaggaaggaagagctcagcaaactcctgcctccgcggaggagcatggtggcatcaaagattccctctgccacagatctgacagataacaggaaagtaccactgaatccgcctggaaaaatgaaaccaagcaaagagaaatcgccacaagcaagtaaagaaatgagtgccctgcaggagagaaatttagaagagaagataaaacagcacgtcctccaaatgcgtgagcaaagaagattccatggccaggccccactggaggagatgaggaaggctgccgaggatctggaaattccataaggattctggcctgtcctctcaagctacccaaggcccctggctggtggcctcttccagagccggagatgggagagaggaggcatgagggcaggatgtggagccacttcatggagaccccacccaacctgactcggaccccacttctgagactcttttcctcctcagcccaaggagtttgtatctgcctttagataaactcttattctttctaaa

SEQ ID NO: 15860 - DNA, 327 bp, Homo sapiens
gtcagtgtaccatgcccgaacacaggtcaggctggtgcgagctgcatcggggctgcccccagagcacgcagcactgtcacgggggaggaagcaaccctggccttcctgtccccacaccccatctgcaggctccattcccaccatttccgctgtttccctctctcctagagccggagatgggagagaggaggcatgagggcaggatgtggagccacttcatggagaccccacccaacctgactcggaccccacttctgagactcttttcctcctcagcccaaggagtttgtatctgcctttagataaactcttattctttctaaatcc

SEQ ID NO: 15861 - DNA, 778 bp, Homo sapiens
aacgtgattttcccccaaatactgaatagaatcatattttaaaatgtgaaaagttactattatttattcctcattttcatttcaagaatggtatatagaatgctgacagtttttttttcctccactgcagggagcgtaaccacgctgaaagcactgaacctaagacactgccctctggaattccctcctcagctcgttgtgcagaagggattggtggctatccagcgcttcctgcggatgtgggcagtagaacactctctccccagaaatccaacttctcaaggtttgtaggaggtgatttatgacaaatcacattaacgttgaagttacagctttttaaaatcagggcagaacctgtcttctctttaataacatcctgagaaatacaggagccatgggtcctctgctgagttgacacagtgtacactgatctcaggccgacccagtcatctctgtgacttttccttggttctataaatctgggcacattatagatcctggctcaagtggattttggtagaagtttattgtgatcaatcaaatgaaacagttatcacctccaagccacccgcaggcggctgcttcaggaatgacttgatgctgcattaggcagctattttaaaataagtacaatgaaatattccttattcctaacgaggtacaagaaattagcaggaaaatggccctgtagacatgttttatctaatcaccttgttggtgggtgctcactaacctgttccattctttcaacatactgaccagccaggtattttcagat

SEQ ID NO: 15862 - DNA, 361 bp, Homo sapiens
attgaggtaaatttcatctccttgggcaacacatgttactgagagactaaactaattcagctgagtgtatacgggggcgacggggttgagatgatgagtttgtttataaacctttatggtcacatgcccttagactcagctcctggggaaatcatacttctaaccattgtacaatgagggtatgtgcagcccaaacagggcttgtgtatgcaagcaccacctatatgctaataagcttattaaattttacttcctctactgttctatcaaacacctgagcagaaaccccacaccactgcaatcatttgcacattcttctcccactacaggctttttgagggttggaacccatgtctcttct

SEQ ID NO: 15863 - DNA, 503 bp, Homo sapiens
agctccttgtgttgctgtctccatcaccaccgcagtcaccactgcagggaaccgatattcttggtggcctcttggatccctcaaggaatcaagttgtaggaaccttgcagtcacaagtctaccttgttcttgggctctggtgtattgagagttggtctctgcctctaggtgatggtctccctgaagtgacagtgcttgtattaatttagagatttgtgggccgggtgtggtgaccaatgcctgtaaccctagcattttgggaggctgaggcaggtggatggcttgagtctagaattcaagttcagcctgggcaacatggtgaaaccccgtctctacaaagaatacaaaaattagccaggtgtggtggtgtgcacctgtggtcccagttgcttgggaggctgaggcgggaggatcacttgagcccaggaggtcaaggctgccggtgagctgagattgcaccattgcattcctacttgggcgagagagtgagaccttgtctaaaa

SEQ ID NO: 15864 - DNA, 474 bp, Homo sapiens
tctcaggaaccccagcagcctctgccaggaagcaccagtcccagctgttctcccacagatgctggctggaggtcacagagcagggctttcctgtctccctgggctgcatgtcatgtgaccctgcctcctttaccacagatgtgggcacatctggccactcatctcctgattagtctgtcatctctctggacactgttgatggttccaagcaaagccactcaggggcttttttaggagcaaacgtgggtgctttgatgatctaaaacctgagtcccacaaaactcaggaattgcagggggcatatggggtgagaagcctgagaattaagtcaataaagcagcagcagagtcaagagatagagagccagaagcgctggcttgtgcctgtaatgtcagctgcttgggaggctaaggtgggtcacttgaggccagttcagcctggacaacatagcaagacccctactcccttttctta

SEQ ID NO: 15865 - DNA, 334 bp, Homo sapiens
ttgcatcctcagggcccgcccggcaggacgactgagcaggccttggaagaccggagagattggagcgaatggggaggaattgaggggaaaatggagatagaacctgaaagagccccaaacgccagaacctgtagctccccaagaataagatcttccagaagaactagacccaaaactagccgttggggaacaccgaaatccttggaggagcaacatccgcatgaccctctgtgttcctttaggcaaaaggacttgcttccattgtttgttcaattgtttgtgtttgttaaataaataaaacgattttcatgtatctttgaaattactttggcgc

SEQ ID NO: 15866 - DNA, 1100 bp, Homo sapiens
ttgcatcctcagggcccgcccggcaggacgactgagcaggccttggaagaccggagagattggagcggtaagtcgcgctggtcacgttggacacctgcgcgttgggagattctggagccagaaggatagccgaatggccttcgcccgccctgcccctcacctgcttcagaaacccccggaaacgccccggttgagaccccggcccgaaccgcctgggggccctagggaggctgaacgcccggtggctcccgggatggctcttcccgttctttgcgccgccttcacccagtgagggagcctgtgccctccctgcccagtcgcttttggggccgctgcggagcttccgctgccatcttcggatcctgtgttccgcacgggggctccaccagggcagggatcgtggtgagggtggctcgtgggtccccctcgcggggagcagggtctggcactcaccagggcgcaggactaggacttgtcgaatgaatccatccttttagcttttagtcctttgaagagccttgagaagaaatcatgagagatttttccatggggaagttccttttacaaagcatttatttacgtggacttcttggcaccccgcggggcggcaacgggcagggcctccagtgccccttctgcgccgtggagccgcgggggctcagctgggcggtggtcgggtcctgaggccggagggcgggagcaggggaggggaaaagcaaaagcggggaaagaagccggggagcggtggaccagacgtccagacctcctgaaaggctggcggggaggcacaggcgggatcttccggaggtgagaatttttttttattatagcagaatggggaggaattgaggggaaaatggagatagaacctgaaagagccccaaacgccagaacctgtagctccccaagaataagatcttccagaagaactagacccaaaactagccgttggggaacaccgaaatccttggaggagcaacatccgcatgaccctctgtgttcctttaggcaaaaggacttgcttccattgtttgttcaattgtttgtgtttgttaaataaataaaacgattttcatgtatctttgaaattactttggcgc

SEQ ID NO: 15867 - DNA, 717 bp, Homo sapiens
taactgtccattagctctcatgccgggtcagcaaaatgctttaatttttaactgcagaacatgtgactcggttgagtcttttgtcttttttttttttaaataaacaatggggggaattaatgtgggcaagttgccttatgttagaatgactaagttaaacctcttaattggtatttgtccaaggcagacatgatataaggaatatgcactaccgtagtaactcccctggccgcagaaaccacactgcaagcctgtccggggtggggtgctgactgccatttgccacttttaaatgggcactgccgtggtaatgtgaatcccatcaatgcagtagatgggtggggaaatgaagatttccccccaaacctttaggcaaaagtgagtttttgtttggttgattttgggtttttttcccccctcctcttttggctttcacattttaaatcttaaatgttactattgcaggccgcaggcatgacaggcaatgagcaggtgaagaaccaatggaaaagtgttcaaaaactcctgtgttagctaacaggcttctgaatgtatcactgtggtccacagagaaggctggaggaggtagcaaggagatgctgtatcagctactacagccttaaaacaaagttggtgtctctttggactttaaaattgttcctatgcagcttattttatttttgtttaatcaaataaacgagggtttttccatggcta

SEQ ID NO: 15868 - DNA, 936 bp, Homo sapiens
taactgtccattagctctcatgccgggtcagcaaaatgctttaatttttaactgcagaacatgtgactcggttgagtcttttgtcttttttttttttaaataaacaatggggggaattaatgtgggcaagttgccttatgttagaatgactaagttaaacctcttaattggtatttgtccaaggcagacatgatataaggaatatgcactaccgtagtaactcccctggccgcagaaaccacactgcaagcctgtccggggtggggtgctgactgccatttgccacttttaaatgggcactgccgtggtaatgtgaatcccatcaatgcagtagatgggtggggaaatgaagatttccccccaaacctttaggcaaaagtgagtttttgtttggttgattttgggtttttttcccccctcctcttttggctttcacattttaaatcttaaatgttactattgcaggccgcaggcatgacaggcaatgagcaggtgaagaaccaatggaaaagtgttcaaaaactcctgtgttagctaacaggcttctgaatgtatcactgtggtccacagagaaggctggaggaggtagcaaggagatgctgtatcagctactacagccttaaaacaaagttggtgtctctttggactttaaaattgttcctatgcagcttattttatttttgtttaatcaaataaacgagggtttttccatggctaaaaaaaacaacaaaaaaaaacaggggggcgctttaaattccgcggggcaacatttggttccctttttttaaagggcccaagggacgttaaagaaaggggggcggtaaaacggtgggaaaactatgtggtgtggggcccactggggctatggcaccacagacgccgaacacgtttgtgccctctggtggtataattatagtatgattagatagtctggcc

SEQ ID NO: 15869 - DNA, 362 bp, Homo sapiens
tcacatctgaatcttaatcttttaccctttgtaaaatatggataagtacacttagttgtagaattgctgtgaggattaggtgaactgatgaatctgaaatgcatagcacaattctaacacagacttgtaactgcctaacaggttcaccttgcccactgcttagacacagccaatttatcaagacaggggaattgcaatagagaaagctattcatgcagagcctactgttagggagaccagagttttattattactcaaatcagtttttcagagtatttggggaatcagagtttttaaggatgatttggtgggtggggggaccagtgaatcaggagtactgattggagggttcagagatgaaa

SEQ ID NO: 15870 - DNA, 483 bp, Homo sapiens
atccaaccccaggcctgtctgatgtctgacgtgggagaatgaagcatacatgtttctcagagaatagacactttctgcattctgggtccaaacttaaaatctcgggcattttggatggcaactctcttaaatgcagccaaacttctccgacagatgttctgcaggacgagccatcgccccagctctgcctgcaccgttgccagctccgttcgtagccttgcaggctctgtgcgtaacggctggagtagcaagctcacccacggtggaagctgccccctcttccacacccacactgtgcactgcaggggcaaggtcctagtgttcccaaatctggagctaagtagagttcaataaaggtgtgctgggctgggtgcagtggctcaccctgtaattgcagcactttcggaggccgaggtgggcagatcacctgaggtcaggagttcaagaccagcccggccaacatggcaaaaccctgtctctact

SEQ ID NO: 15871 - DNA, 474 bp, Homo sapiens
gttgctgtcaacaaggatgtacaaatatctgttcgagtccctgctcttaattgttttgggtatacacccaacctacattaatctttaatcacttaagatgttggggtttgtgctgggaggtaaccaagtgactctggagcagcctcaccctagctacagagggaaactgactcttccctctctgcccaatcttttgccgcctgtcaggttcccaagctgtccataccttactgtgtgaagcgctttgggtataaactcccaaatagaggctcagccccttttcctttcccaagtccatcctgcaggttatagctcttcagaggaatctcttgaattctggcctggggatctgggattaaagtagaacccaggggtgtcccttggggccttaggcattagcccgttgtgggtggaacctggccattcagccccactggcactcagttggtcccctggtacttcaggacagtttct

SEQ ID NO: 15872 - DNA, 363 bp, Homo sapiens
tctgggagtctcataacatgtatttttatctctttttaaagatgaggaaaggactgatgcttagagacgttgaataacataaataaaatcccagcaaacatttagtatgccttggccgggtgcagtggctcacccctgtagtcccggcattttgggaggctgaggcaggtggctcgcttgaagtcaggagtttaagaccaagctaaccaacatggtgaaaccctgtctttactaaaaatacaaaaatcagcccggcatggtagtgggcgcctgtaatcccagctactcaggaggctgtctcagattaaaacatttacacagaacgttcacggttttgccctatagggagtcgtgtcgacgcgg

SEQ ID NO: 15873 - DNA, 406 bp, Homo sapiens
ttaagcagaaaatgaactaactgctaggctttaactatgtatattaggacattctgaaatgcaaacattaaacctaatcagaataattggttttaacattaactgttattcagaagtatctgagtagatgttaatgatggttaacctcacttaaactcacaaaatcgtgatctggacaaagcattaatatttttagaggggctgggcatggtgactccggcctgtaatcccagcactttgggaggccaaggtgggcggatcacctgaggttgggagttcgagaccagcctggccaacatggtgaaaccgcatctcttctaaaatacaaaaattagccgggcatggtggcaggcacttgtaattcctaggtacttgggaggctgaggcaggagaatctcttgaaccc

SEQ ID NO: 15874 - DNA, 430 bp, Homo sapiens
gattctaaaatttgtatgattaaaatttgtagagattttaaaatttgtatggaaatgcaaagaccctcatgcatggtttggcaggtcttagcaagccaactgcctgcttttggaaatggttttttaacattgccacacttagtgtgttgtgcgtattgtctgagcctgcttttgcagtaaaccagcagagttgagtagttgttacagacaccatatggtccacaaagcttaaaatattttacagaataaatttgctgaccctgccctagagtatttaaagcaattttgaaaaagatgaaaaaggctgggcacagtggctcatgcctgtaattccatcactttgggaggccgaggcggttggatcacttgaggtcaggagtttgagaccagcctggccaacatggtgaaaccccatctctactaaaaatac

SEQ ID NO: 15875 - DNA, 409 bp, Homo sapiens
ttagtggcttaaaccaacaaatgtattagctttataatgatttggatcagtgatgggggctgggcacggacaggcgattcttctgctgggcttggctgaactcaactatgtcttatggtcagagggcagtcaggggcttcgctcatgtctggtagttggctgttggctgagcccttggttctcctctggcttaggcttgttcacatggtggcctcggggctcccatggcagttagagaaatcaagcccaagtctcatatcacgttcactattctcccattgtccaaagcagaccacatggccaaggcccaagtctgtgtgaaaggatgtggatacagggaccccgaatgaaccagaggcaatactgctgcaagctaccacatagatgctgttcagagctttgcaggacc

SEQ ID NO: 15876 - DNA, 446 bp, Homo sapiens
gatatggactaataaaggtatgctgctgtgaacagtataaaattattcagaaacaaaaaataattaaacttaatctcaacctacatcatctctatattaataagtgtttgaccactcaatgaggaattgtagtgagcaaataaaatatctatcttctcaatagaataaagacgccatgtcagtgcactgccatttcttggctagtgtataaacatgtcagtagatgttaaaagtatttcacatcgtattttcatatctggtagtagccccagaaatgacttacaaagatagcaaaaatcctaattaattaggtttagaaggttgggcatggtggctcatgcctgtaatcccagcactttgagaggctgacgggggtggatcacctgaggtcaggagtccgtgaccaggctggccaacatggtgtaaccctgtgtgtactaaaaatc

SEQ ID NO: 15877 - DNA, 416 bp, Homo sapiens
ccggcctggggtgctagcccccaagtgtgagcctcatgctagtctcaggaaatgcaaccttttccggccagatccagtggagcccgggaggtcgctgccttgcccctggcccgtgggctacaggtctccaggatactctaggcctgcccgcccctccggccccagtcggagctggcattactgaacgccggcatcccaggaaatagaccgctcaggccgctgccttcagctgggaaagactcttgcatccgggtcatacgcggcactttgcctccttcctcccagtgtgaatccagcccaaggtggaagaggagcctgagaggaccctgaaagcgcagagagagctggctaggtagagctccagctctggcttctgagattcaagcagctgcggtcgctgcgggcagtggctgctc

SEQ ID NO: 15878 - DNA, 377 bp, Homo sapiens
ccggcctggggtgctagcccccaagtgtgagcctcatgctagtctcaggaaatgcaaccttttccggccagatccagtggagcccgggaggtcgctgccttgcccctggcccgtgggctacaggtctccaggatactctaggcctgcccgcccctccggccccagtcggagctggcattactgaacgccggcatcccaggaaatagaccgctcaggccgctgccttcagctgggaaagactcttgcatctcatcacgcggaggtgttcttgcccatcagcaccacagccttcccgcgaagggacatgcggatctgctgcatctgctggagcccacatagtcagctcccacaagggtacacctcggataatcaaccaa

SEQ ID NO: 15879 - DNA, 740 bp, Homo sapiens
gtaaacctaagactgaggagggctgtattgagaaggcatgagcttgcttgagtggcatgcttgcccatcatagtcccagctacaaaataaaatatgattaattctcattgtaagtatagctgtaggccatttggttttgtttatgccactagcaccatctgccaagacaccaaggaggattcataatgtcctgtgtctcaggtgaaaggactttagatgttgctcctctcagtgatctccgaattagccccttgcacacatctatcatgatgtggaagaaatcctgcacatgcaggaacccacagacagaaacgtccatctgtgcccctggatgtaggcttgccaatatttatttaatggtggatcttgacgtggcactataatctggctcccagtccatgaaactgaagtccagaagcagtttttcctaacctgggacctgccaaaaaacacactatatgtgcccctgtaggcatgctggctgactttattcccactgtgaatcttgaagcagtcctaaaacccagctccagtcccaaaacctacctccagtccctgtcaactaaagtctgggagcagtcctgcccacccaggaatctggagggagaaatgccatgaagccagaaacaaacctgaagactttggtctcagctgtgtatcctgaagcagccctatgaatcagttccacacccccattcccccactccagataaagcttcagttatatctcaaaaaaaaaa

SEQ ID NO: 15880 - DNA, 763 bp, Homo sapiens
tcagctgtgtatcctgaagcagccctatgaatcagttccacaccctctcagctgtgaccaagggtcagtacttctcatctaggaacctgtccaatgactgggttagaggatttccaaaaacccagcaagagccacacagcagaagccatacctgctcacatggattttatcagctctgtcatctgcctgtataaccagagactttttttcctcagcaccagtcttactgatcaagatcctgaagaaagttcagtcttcccagaaaatagaatccacaatggtctgatgccctaataacaggtctgccaagaatgaacttcactgtgatccagatccagtgcaccttactgcaatctcatcagcacagagatccaataggagaaaatatttacctccacaaactaatctataatgactgaaagacgtatttactccttcagatgcaaggacataaaaagaaggtatcacagatcatgaaggatcaggcaaacataacatcaccaaaggaaactaaaaatgctccagtaaccacttacagtaagacacagatctaaaaaatggccaagaattcaaaataattttcttaaagaatctcaatggatgcaaaaagaccacacattactaaattcttttgcaacaacgtatgaacaaaatcacaattataataaagagaacccattaaaagagaaccaaatagatatgctggagctgaagtacacaataggagatctaaaatatttaagagaaagctttaacaggagac

SEQ ID NO: 15881 - DNA, 211 bp, Homo sapiens
aaggtgcctaagtgctaaaagtgggtggtggttgtttccatgaagttgagtctcctgattctaaagctggtcaccttctcttctgccttagcttctggaaagggcctcctcacgctcatgcctaccaaggtttcagatagatgcccttttaatcccctgaaagattcaaggaagccccagctactggtcctggggcagttagggctgtgtt

SEQ ID NO: 15882 - DNA, 405 bp, Homo sapiens
tgcttttggcagtatggtcattttcacaatattgagtctacccatccatgagcatggaatgtgtttccttttgtttttgtcatctatgatttctttcaacagtgttttgtagttttccttgtaggggtctttcacctccttggttagttacattcgtaagtattttatttttacagctatcataaaagggtttgatttgattctcagcctggtagatgttggtgtatagcaccgctactgatatgtgtacatagattttgtatcctgataaatagattttttgtgtatttctaaatagcaataagatttgaaatattcccaacacaaagaaatgatcaatgtttgaggtgattaatatcctaaagaccctgatttgatcattacacattgcatgcatgtaccaga

SEQ ID NO: 15883 - DNA, 256 bp, Homo sapiens
caagggcacctttcatcctcaggcttaaagcattccatttggcaagatgggttgccatggctgcgtttgtgcttgataaacagaatgaacatgtttttattcatggagcaggagctggcaggaaggacaaaattggacacctgcacaaactgagaaaattactgtggtataaaatgaatggcctttgacaaactgtagtggcatgtgatcctggacctgagttggcggagtgtagacctgggactcagtcactcct

SEQ ID NO: 15884 - DNA, 438 bp, Homo sapiens
aatcacatagagatattggttcaatatggacatctaaactataatgctaaaagccaataattagaataagttcattttaagaaaagcattaataatattagctaacgtttagtacctgtgccaaacattctacctatgttaccttgattttcatagccagcctaagaggtactattatgtatccccattttacaggttaagaaacaggctcagaggagtttaggatcttttccaagattacatagccagtaagtggtggcactaggaaccaaattcagactctgaatcgcatgctgtttatattatattgcactcattctaaatatgtgggaatcagaatgaaggggcttgtatgacttttggctcattttttgatgcatgtgacctgggattataaatgtgaaattaggtttacgaaaggatccagtgtcattgtgc

SEQ ID NO: 15885 - DNA, 454 bp, Homo sapiens
cggcgctgggtagaaatgggcggttgggtgaacagagaagctaccctctcacctgcagggacaccgcgcgtgcccgaaaggcatgaaggacaaccttttgctaggaattgtggaggaatcttgattcagctgtattatccccaaaaggggagtttcctaagatgctcccttctctcttcttttattatacacatcttttccctcattgggtctctcctaggctccagtgtcagctcaggctgccagacaaaggcagcctccgctccaggccacagcctcccatagcttcctccttcctgtcttctcagaccagcaatgtttgcaactaaataacgacctggagaaggcaggaggaaccttgcatagcttggactacacacacaatcccacatccaacacatccagtaggaaaataaccccatgcctttaataaagaaacgagaagctcaaacag

SEQ ID NO: 15886 - DNA, 472 bp, Homo sapiens
tatttcaatggagaatgtcattggtattttgatagagatttcattaaatctgtagatccctttggttgttatggacatttttaacaatattaacccctccaagctacaaacatgggatatctttcatttatttgtgtcttcttcaatttatttcatcaatgttttacagttttctgtgtaagaattgtttacctttttgattaaatttattcctaggtattttatcattttatagctattgtaaatacaattgtgttcttgatttatttttcagatactttgctatattgcattttcaaagctatctttgagaatgttatattaatatttatacatattcatgcattttgtttttaaaaatggaatcatactcttataagacatcatgcttttctcaccaggcaatatattatgaatcttttcataaatataaataagcatttaaaatatattaaaaaagaaaaactactaa

SEQ ID NO: 15887 - DNA, 386 bp, Homo sapiens
aaagatataaagatatctttgccagcacatttgaaaatttagactaaatgaccaaatgccaggaaaaattgaacttagcaaagccagctaaatatgaaaaagaaaacctgagaaaaatgaggcagtaataaaaatttttcctacaaatttcaagcccagagatttatattggtaacttttggcaaatatacaaggagcaaataatttcaatcttacagacacaatttggaaatataaaagagagggaacaatcactcaacaacatatttaataaggttcacataactttatatcaaaactttacaagttaatacaggaaaagaaaagcttaggcctgtctcaatcctgaacatgtagaaaaattcctaaacataatcagaccaatc

SEQ ID NO: 15888 - DNA, 367 bp, Homo sapiens
  misc_feature (11)..(11): n is a, c, g, or t
agaagacgctnggcaaaggacagacagggctggttaaactcggggtccactgcatcacgggtcagaaggtcgccatcaagatcgtgaaccgggagaagctgtcggagtcggtgctgatgaaggtggagcgggagatcgccatcctgaagctcatcgaacacccacatgtcctcaagctccacgacgtctacgagaacaagaaatatttggtacctggttctggagcacgtctcggggggtgagctattcgactacctggtcctccccccacgaccttctgtacggatttgctctccggaaggaattctggtttcgcgtgatcctgcctgcgtccgtgtctctgattccgccggcggcaaaaaaaaaa

SEQ ID NO: 15889 - DNA, 2704 bp, Homo sapiens
  misc_feature (11)..(11): n is a, c, g, or t
agaagacgctnggcaaaggacagacagggctggttaaactcggggtccactgcatcacgggtcagaaggtcgccatcaagatcgtgaaccgggagaagctgtcggagtcggtgctgatgaaggtggagcgggagatcgccatcctgaagctcatcgaacacccacatgtcctcaagctccacgacgtctacgagaacaagaaatatttggtacctggttctggagcacgtctcggggggtgagctattcgactacctggtaaagaaggggagactgacgcccaaggaggcccgaaagttcttccgccagattgtgtctgcgctggacttctgccacagctactccatctgccacagagacctaaagcccgagaacctgcttttggatgagaaaaacaacatccgcattgcagacttcggcatggcgtccctgcaggtgggggacagcctcctggagaccagctgcgggtccccccattatgcgtgtccagaggtgattaagggggaaaaatatgatggccgccgggcagacatgtggagctgtggagtcatcctcttcgccctgctcgtgggggctctgccctttgatgacgacaacctccgccagctgctggagaaggtgaaacggggcgtcttccacatgccccacttcattcctccagattgccagagcctcctgaggggaatgatcgaagtggagcccgaaaaaaggctcagtctggagcaaattcagaaacatccttggtacctaggcgggaaacacgagccagacccgtgcctggagccagcccctggccgccgggtagccatgcggagcctgccatccaacggagagctggaccccgacgtcctagagagcatggcatcactgggctgcttcagggaccgcgagaggctgcatcgcgagctgcgcagtgaggaggagaaccaagaaaagatgatatattatctgcttttggatcggaaggagcggtatcccagctgtgaggaccaggacctgcctccccggaatgatgttgaccccccccggaagcgtgtggattctcccatgctgagccgtcacgggaagcggcgaccagagcggaagtccatggaagtcctgagcatcaccgatgccgggggtggtggctcccctgtacccacccgacgggccttggagatggcccagcacagccagagatcccgtagcgtcagtggagcctccacgggtctgtcctccagccctctaagcagcccaaggagtccggtcttttccttttcaccggagccgggggctggagatgaggctcgaggcgggggctccccgacttccaaaacgcagacgctgccttctcggggccccaggggtgggggcgccggggagcagcccccgccccccagtgcccgctccacacccctgcccggccccccaggctccccgcgctcctctggcgggacccccttgcactcgcctctgcacacgccccgggccagtcccaccgggaccccggggacaacaccaccccccagccccggcggtggcgtcgggggagccgcctggaggagtcgtctcaactccatccgcaacagcttcctgggctcccctcgctttcaccggcgcaagatgcaggtccctaccgctgaggagatgtccagcttgacgccagagtcctccccggagctggcaaaacgctcctggttcgggaacttcatctccttggacaaagaagaacaaatattcctcgtgctaaaggacaaacctctcagcagcatcaaagcagacatcgtccatgcctttctgtcgatccccagcctgagtcacagtgtgctgtcacagaccagcttcagggccgagtacaaggccagtggcggcccctccgtcttccaaaagcccgtccgcttccaggtggacatcagctcctctgagggtccagagccctccccgcgacgggacggcagcggaggtggtggcatctactccgtcaccttcactctcatctcgggtcccagccgtcggttcaagcgagtggtggagaccatccaggcacagctcctgagcactcatgaccagccctccgtgcaggccctggcagacgagaagaacggggcccagacccggcctgctggtgccccaccccgaagcctgcagcccccacccggccgcccagacccagagctgagcagctctccccgccgaggcccccccaaggacaagaagctcctggccaccaacgggacccctctgccctgaccccacggggccggggagggaggggacccccctccaccccccttccgtgccccccaactgtgaatctgtaaataaggcccaaggaacatgtcgggaggggggtggacacaaaaaccggccttgccctgcagggatggggctccacaggccgtgcccaactgggggtggttctaggggaacagggggcgggggagctgtttctattttatttattgattaatttattattttatttattgatcaatctctctgcggggtggggtgggggagggacgggagctggttggggtggcttagcagatccggacagggccctctgtccctgtgtcgtccccaaccccctcttcccgggcccctcctcccctggtcctccccccacgaccttctgtacggatttgctctccggaaggaattctggtttcgcgtgatcctgcctgcgtccgtgtctctgattccgccggcggcaaaaaaaaaa

SEQ ID NO: 15890 - DNA, 2496 bp, Homo sapiens
  misc_feature (11)..(11): n is a, c, g, or t
agaagacgctnggcaaaggacagacagggctggttaaactcggggtccactgcatcacgggtcagaaggtcgccatcaagatcgtgaaccgggagaagctgtcggagtcggtgctgatgaaggtggagcgggagatcgccatcctgaagctcatcgaacacccacatgtcctcaagctccacgacgtctacgagaacaagaaatatttggtttcaccacacgggaagctgtctgcccggcgctcatgggacctgctctcaggctttcccaggtacctggttctggagcacgtctcggggggtgagctattcgactacctggtaaagaaggggagactgacgcccaaggaggcccgaaagttcttccgccagattgtgtctgcgctggacttctgccacagctactccatctgccacagagacctaaagcccgagaacctgcttttggatgagaaaaacaacatccgcattgcagacttcggcatggcgtccctgcaggtgggggacagcctcctggagaccagctgcgggtccccccattatgcgtgtccagaggtgattaagggggaaaaatatgatggccgccgggcagacatgtggagctgtggagtcatcctcttcgccctgctcgtgggggctctgccctttgatgacgacaacctccgccagctgctggagaaggtgaaacggggcgtcttccacatgccccacttcattcctccagattgccagagcctcctgaggggaatgatcgaagtggagcccgaaaaaaggctcagtctggagcaaattcagaaacatccttggtacctaggcgggaaacacgagccagacccgtgcctggagccagcccctggccgccgggtagccatgcggagcctgccatccaacggagagctggaccccgacgtcctagagagcatggcatcactgggctgcttcagggaccgcgagaggctgcatcgcgagctgcgcagtgaggaggagaaccaagaaaagatgatatattatctgcttttggatcggaaggagcggtatcccagctgtgaggaccaggacctgcctccccggaatgatgttgaccccccccggaagcgtgtggattctcccatgctgagccgtcacgggaagcggcgaccagagcggaagtccatggaagtcctgagcatcaccgatgccgggggtggtggctcccctgtacccacccgacgggccttggagatggcccagcacagccagagatcccgtagcgtcagtggagcctccacgggtctgtcctccagccctctaagcagcccaaggagtccggtcttttccttttcaccggagccgggggctggagatgaggctcgaggcgggggctccccgacttccaaaacgcagacgctgccttctcggggccccaggggtgggggcgccggggagcagcccccgccccccagtgcccgctccacacccctgcccggccccccaggctccccgcgctcctctggcgggacccccttgcactcgcctctgcacacgccccgggccagtcccaccgggaccccggggacaacaccaccccccagccccggcggtggcgtcgggggagccgcctggaggagtcgtctcaactccatccgcaacagcttcctgggctcccctcgctttcaccggcgcaagatgcaggtccctaccgctgaggagatgtccagcttgacgccagagtcctccccggagctggcaaaacgctcctggttcgggaacttcatctccttggacaaagaagaacaaatattcctcgtgctaaaggacaaacctctcagcagcatcaaagcagacatcgtccatgcctttctgtcgatccccagcctgagtcacagtgtgctgtcacagaccagcttcagggccgagtacaaggccagtggcggcccctccgtcttccaaaagcccgtccgcttccaggtggacatcagctcctctgagggtccagagccctccccgcgacgggacggcagcggaggtggtggcatctactccgtcaccttcactctcatctcgggtcccagccgtcggttcaagcgagtggtggagaccatccaggcacagctcctgagcactcatgaccagccctccgtgcaggccctggcagacgagaagaacggggcccagacccggcctgctggtgccccaccccgaagcctgcagcccccacccggccgcccagacccagactgtttctattttatttattgattaatttattattttatttattgatcaatctctctgcggggtggggtgggggagggacgggagctggttggggtggcttagcagatccggacagggccctctgtccctgtgtcgtccccaaccccctcttcccgggcccctcctcccctggtcctccccccacgaccttctgtacggatttgctctccggaaggaattctggtttcgcgtgatcctgcctgcgtccgtgtctctgattccgccggcggcaaaaaaaaaa

SEQ ID NO: 15891 - DNA, 2533 bp, Homo sapiens
ctggacaccccaacaatgggccgccttaggaggtctgagtcactatctcaaagtcaatcacccgccaggaaggatgggggtgggggtccagctgtccagactccagagaatgggcctctttgtccaaactctggtgacccaaaggacagctgggctgggaagccggagaggggacagccctcgtgttcccccccggcacccagtcccccggatgaactgacatcaggtccgtcgatgctggcgcaggtttcaccacacgggaagctgtctgcccggcgctcatgggacctgctctcaggctttcccaggtacctggttctggagcacgtctcggggggtgagctattcgactacctggtaaagaaggggagactgacgcccaaggaggcccgaaagttcttccgccagattgtgtctgcgctggacttctgccacagctactccatctgccacagagacctaaagcccgagaacctgcttttggatgagaaaaacaacatccgcattgcagacttcggcatggcgtccctgcaggtgggggacagcctcctggagaccagctgcgggtccccccattatgcgtgtccagaggtgattaagggggaaaaatatgatggccgccgggcagacatgtggagctgtggagtcatcctcttcgccctgctcgtgggggctctgccctttgatgacgacaacctccgccagctgctggagaaggtgaaacggggcgtcttccacatgccccacttcattcctccagattgccagagcctcctgaggggaatgatcgaagtggagcccgaaaaaaggctcagtctggagcaaattcagaaacatccttggtacctaggcgggaaacacgagccagacccgtgcctggagccagcccctggccgccgggtagccatgcggagcctgccatccaacggagagctggaccccgacgtcctagagagcatggcatcactgggctgcttcagggaccgcgagaggctgcatcgcgagctgcgcagtgaggaggagaaccaagaaaagatgatatattatctgcttttggatcggaaggagcggtatcccagctgtgaggaccaggacctgcctccccggaatgatgttgaccccccccggaagcgtgtggattctcccatgctgagccgtcacgggaagcggcgaccagagcggaagtccatggaagtcctgagcatcaccgatgccgggggtggtggctcccctgtacccacccgacgggccttggagatggcccagcacagccagagatcccgtagcgtcagtggagcctccacgggtctgtcctccagccctctaagcagcccaaggagtccggtcttttccttttcaccggagccgggggctggagatgaggctcgaggcgggggctccccgacttccaaaacgcagacgctgccttctcggggccccaggggtgggggcgccggggagcagcccccgccccccagtgcccgctccacacccctgcccggccccccaggctccccgcgctcctctggcgggacccccttgcactcgcctctgcacacgccccgggccagtcccaccgggaccccggggacaacaccaccccccagccccggcggtggcgtcgggggagccgcctggaggagtcgtctcaactccatccgcaacagcttcctgggctcccctcgctttcaccggcgcaagatgcaggtccctaccgctgaggagatgtccagcttgacgccagagtcctccccggagctggcaaaacgctcctggttcgggaacttcatctccttggacaaagaagaacaaatattcctcgtgctaaaggacaaacctctcagcagcatcaaagcagacatcgtccatgcctttctgtcgatccccagcctgagtcacagtgtgctgtcacagaccagcttcagggccgagtacaaggccagtggcggcccctccgtcttccaaaagcccgtccgcttccaggtggacatcagctcctctgagggtccagagccctccccgcgacgggacggcagcggaggtggtggcatctactccgtcaccttcactctcatctcgggtcccagccgtcggttcaagcgagtggtggagaccatccaggcacagctcctgagcactcatgaccagccctccgtgcaggccctggcagacgagaagaacggggcccagacccggcctgctggtgccccaccccgaagcctgcagcccccacccggccgcccagacccagactgtttctattttatttattgattaatttattattttatttattgatcaatctctctgcggggtggggtgggggagggacgggagctggttggggtggcttagcagatccggacagggccctctgtccctgtgtcgtccccaaccccctcttcccgggcccctcctcccctggtcctccccccacgaccttctgtacggatttgctctccggaaggaattctggtttcgcgtgatcctgcctgcgtccgtgtctctgattccgccggcggcaaaaaaaaaa

SEQ ID NO: 15892 - DNA, 1846 bp, Homo sapiens
aaagcagtagaagcggctgggaggggtgggatgccagggttcctgagaggcaacgggctagggactcggacttatgggtcctgggggaagaggacacagctagagaaggagtctaggggtcagaggcaggaggggctaagctaggagtccaggactcccagaggcgggaaacacgagccagacccgtgcctggagccagcccctggccgccgggtagccatgcggagcctgccatccaacggagagctggaccccgacgtcctagagagcatggcatcactgggctgcttcagggaccgcgagaggctgcatcgcgagctgcgcagtgaggaggagaaccaagaaaagatgatatattatctgcttttggatcggaaggagcggtatcccagctgtgaggaccaggacctgcctccccggaatgatgttgaccccccccggaagcgtgtggattctcccatgctgagccgtcacgggaagcggcgaccagagcggaagtccatggaagtcctgagcatcaccgatgccgggggtggtggctcccctgtacccacccgacgggccttggagatggcccagcacagccagagatcccgtagcgtcagtggagcctccacgggtctgtcctccagccctctaagcagcccaaggagtccggtcttttccttttcaccggagccgggggctggagatgaggctcgaggcgggggctccccgacttccaaaacgcagacgctgccttctcggggccccaggggtgggggcgccggggagcagcccccgccccccagtgcccgctccacacccctgcccggccccccaggctccccgcgctcctctggcgggacccccttgcactcgcctctgcacacgccccgggccagtcccaccgggaccccggggacaacaccaccccccagccccggcggtggcgtcgggggagccgcctggaggagtcgtctcaactccatccgcaacagcttcctgggctcccctcgctttcaccggcgcaagatgcaggtccctaccgctgaggagatgtccagcttgacgccagagtcctccccggagctggcaaaacgctcctggttcgggaacttcatctccttggacaaagaagaacaaatattcctcgtgctaaaggacaaacctctcagcagcatcaaagcagacatcgtccatgcctttctgtcgatccccagcctgagtcacagtgtgctgtcacagaccagcttcagggccgagtacaaggccagtggcggcccctccgtcttccaaaagcccgtccgcttccaggtggacatcagctcctctgagggtccagagccctccccgcgacgggacggcagcggaggtggtggcatctactccgtcaccttcactctcatctcgggtcccagccgtcggttcaagcgagtggtggagaccatccaggcacagctcctgagcactcatgaccagccctccgtgcaggccctggcagacgagaagaacggggcccagacccggcctgctggtgccccaccccgaagcctgcagcccccacccggccgcccagacccagactgtttctattttatttattgattaatttattattttatttattgatcaatctctctgcggggtggggtgggggagggacgggagctggttggggtggcttagcagatccggacagggccctctgtccctgtgtcgtccccaaccccctcttcccgggcccctcctcccctggtcctccccccacgaccttctgtacggatttgctctccggaaggaattctggtttcgcgtgatcctgcctgcgtccgtgtctctgattccgccggcggcaaaaaaaaaa

SEQ ID NO: 15893 - DNA, 422 bp, Homo sapiens
gtgtggtggtagggaggggctattgtccggaccggtgcatggtcgctcccactccactcttggcgtagggaggcagggccatgggagtttatgcttcgggcaggaatcccagccatctaagagctcatagaaattgagcttttggggccaggcgcggtggctcatgcctgtaatctcaacactttgggaggccaagatgggcggatttcttgaagagctcgagaccagcctgagcaacatggcaaaaccccgtctctacaaaaaatacaaaaattagctgagtgtggtggtacacctgtagtcctacctacttgggaggctgaggtgggagaattgcttgaacctgggaggcagaggctgcagtgagccaagatcgtgccactgcattccagcgtgggcgacagagcaagactctgtctcaa

SEQ ID NO: 15894 - DNA, 554 bp, Homo sapiens
tacatgcaatatgacttaaagctcctgagacaccatctccagattcccatccacttccccaaggatttcttgtctgtgatgcttgaaaaaggaagtttgtctgccatgcgtttcctcaccgccgtgaacttggagcatccagagatgttggagaaagcgtcccgggagctgtggatgcgcgtctggtcaaggaatgaagacatcaccgagccgcagagcatcatggcggctgcagagaaggctggtatgtctgcagaacaagcccagggacttctggaaaagatcgcaacgccaaaggtgaagaaccagctcaaggagaccactgaggcagcctgcagatacggagcctttgggctgcccatcaccgtggcccatgtggatggccaaacccacatgttatttggctctgaccggatggagctcgtggcgcacctgctgggagagaagtggatgggccctatacctccaacctttacttctatgcctcacaagtgcctttcagagagccccaattctgctttcccacaaaataaacctaatgccatcaggcaaaa

SEQ ID NO: 15895 - DNA, 447 bp, Homo sapiens
aagtggtagggggtggggcgagggacgggttgcaaggggaggaaaagtcaggaaggctactgagagcatagagccgacttcagcctctgttgggaagggaaccagcagtcaagccaaatcctactacgggtgtagcaaaactcaacttctttcaatacgaatttgagatctaagagtagtttattctggtggagcaggcttacccatggtttcagaagttagagaggagactctgagagtcaagccctgggttgttcaagacccaaataaggcagggagaaagcaggacatagggcaggtttcccaaggaaaatgagcccattagcatttcaagccttcagttgacagggccaggtattaggtactcccagtcagttagttcccagctgagcccagtagttctagcccaagctccagatgtgagtttaggaatcaccaaataattcc

SEQ ID NO: 15896 - DNA, 4744 bp, Homo sapiens
agcactgctgggctggagacggcgggagccgctgctctccggctgagggaatcagagacagctccgtccctagtggagcgcaggggaggcagaagtcatgacaggcgaggtgggttctgaggttcacctagaaatcaatgacccaaacgtcatttcacaagaggaagcagatagtccttcagatagtggacagggcagctatgaaacaattggacccttgagtgaaggagattcagatgaagagatatttgtaagtaagaagttgaaaaacaggaaggttctacaagacagtgattccgaaacagaggacacaaatgcctctccagagaaaactacctatgacagtgccgaggaggaaaataaagagaatttatatgctgggaaaaatacaaaaatcaaaaggatttacaaaactgtggcagacagtgatgaaagttacatggaaaagtctttgtatcaggaaaatcttgaagcgcaagtgaaaccttgcttagagctgagtcttcagtctggaaactctacagactttaccactgacagaaagagttccaaaaagcacatacatgataaagaaggaactgcaggaaaagcaaaagtaaaatcaaaaagaagacttgagaaagaggagagaaaaatggaaaaaattagacagctaaaaaagaaggaaacaaaaaaccaggaagatgatgtagaacagccatttaatgacagtggctgtcttcttgtggataaagacctttttgaaactgggttggaggatgaaaataactctccattggaagatgaagagtcattagaatcaataagagcagctgtaaaaaacaaagtaaaaaagcacaagaaaaaagaaccatctttggagagtggggtccattcatttgaggaaggaagtgagttatcaaaaggaaccacgaggaaggaaagaaaggcagccagattaagtaaagaagcattaaaacaactgcatagtgagactcagcgccttattcgagagtctgcactgaaccttccatatcatatgcctgagaataaaaccattcatgatttcttcaaacgtaaaccccggcccacttgccacggaaatgccatggcactattgaagtcatctaaatatcagtcaagccatcacaaagaaatcatagacactgcaaatactactgaaatgaacagtgatcaccatagtaaaggttctgagcagacaacaggtgcagaaaatgaagtggaaactaatgcactccctgtagtttcaaaggaaacccagatcattactggatcagatgagtcttgcaggaaggatttggtaaaaaatgaagagctagaaattcaggagaaacagaagcagagtgacattagaccttcacctggggacagctcagtgttgcaacaggaatccaacttcctcgggaacaatcacagtgaggaatgtcaggttggagggcttgtagcatttgaacctcatgccctggagggtgaaggcccccaaaatccagaagaaacagatgagaaagtggaagagcctgagcagcaaaataaatcatcagcagttgggccacctgaaaaagtgagacggtttactctggatagacttaagcaactgggagtagatgtttccattaaaccacggctaggtgctgatgaagattcctttgtgatacttgaacctgaaaccaacagagaactggaagccttgaagcagcgtttctggaagcatgctaatccagcagccaaacccagggctggtcagacagtgaatgtgaacgtcatagtgaaagacatgggcactgatggaaaggaagagctaaaagcagatgtggtacctgtgactttagcacctaagaagttggatggagcaagccacacaaaaccaggtgaaaagcttcaggtgttaaaagctaaactgcaagaagcaatgaaactccgaaggtttgaggagcgccagaagcgccaagcactgtttaaattagataatgaagatgggtttgaggaagaggaggaggaagaggaagaaatgacagatgagtctgaggaagatggagaagagaaggtagagaaagaagagaaagaggaagaactagaggaagaggaggagaaagaagaggaggaggaagaagaaggaaatcaggagactgcagaattccttcttagtagtgaagaaatagaaacaaaagatgaaaaagaaatggataaagaaaataatgatggcagtagtgaaattggcaaggcagttggcttcctctctgttcccaagtctctctcatcagattctactttacttctgtttaaggacagctcttccaagatgggttactttcctactgaagaaaaatcagaaacagatgaaaactcaggcaagcagcctagcaaactggatgaggatgattcatgttcattgctaacaaaggagagcagccacaatagcagctttgagctgattggctccacgattccatcctatcagccttgcaacagacaaacaggccgtgggaccagttttttccctacagcaggaggattcagatctccttcccctgggctatttcgagccagtttggtcagctcagcttctaagagttcagggaaactgtctgagccttcacttcccatagaggattcccaggatctgtataacgcctccccagagcctaagacacttttcctaggagcaggagacttccagttctgtttagaagatgacactcagagccaactgttggatgcagatgggttcttaaatgttagaaaccacaggaatcagtaccaagctttgaagcctcgattgccattggccagtatggatgagaatgccatggatgccaacatggatgagctgttggatttgtgtactggaaagttcacatctcaggctgaaaaacatctacccaggaagagtgacaagaaagagaacatggaggaacttctgaacctttgttcaggaaaattcacttctcaggatgcctccactccagcctcatcagagttaaataaacaggagaaggagagcagcatgggtgatccaatggaagaagcacttgctctttgctcaggctcttttcccacagacaaggaagaggaagacgaggaggaggaatttggagactttcggcttgtttcaaatgataatgagtttgatagtgatgaggatgaacacagtgactctggtaatgatctggcactggaagaccatgaagatgatgatgaagaagaactcctgaagcgatctgagaagttgaaaaggcaaatgaggttgaggaaatacctggaggatgaggcagaggtgtcaggaagtgatgtgggaagcgaagatgagtatgatggggaagaaattgatgaatatgaagaggacgtaattgatgaagtacttccttctgatgaggaactgcagagtcaaatcaagaaaatacacatgaaaactatgttggatgatgataagcgacagctacgtttataccaagagaggtaccttgctgatggggatctgcacagcgatggtcctgggcgaatgaggaagtttcgatggaaaaacatagatgatgcttcccagatggacttgttccacagagactctgatgatgatcagactgaagaacagcttgatgagtcagaagccaggtggaggaaggagcgaattgaacgagagcagtggcttcgggacatggcacagcaggggaaaattacagctgaagaagaagaagaaattggggaggacagtcagtttatgatactggccaagaaagttacagccaaagcactgcagaagaatgccagtcgccctatggttattcaggaatcaaagtctttgctcagaaatccttttgaagccatcagaccaggaagtgctcaacaggtgaagacaggctcactgctaaaccagcccaaagctgtgcttcagaaactggctgctctctctgaccataaccccagtgctcctcgaaattcaagaaactttgtctttcatacactttctcctgtcaaggctgaggcggcaaaggaatcgtctaagtctcagaagatcccagagaaggactctgactggctcacctggagtggagctcctatccctggattcttcaggctttcatttgacccacatggttaagctgggagagacagagtccaaagagaggcggagaagggctattctgggcagaacaaacaattgatgactttatggctctgtggtctgggcagaactgcataaccctagatcaccaaagctgagagcctttaggagtgaggatttgggccgggcatggtggctcacgcctgtaatcccagcactttgggaggccgaggtgggtggatcacaaggtcaggagatcaagaccaacctgaccaacatggtgaggccccatctctactaaaaatacaaaaattagctgacgtgatgcatgcacctgtaatcccagctactcgggaggctgaggcgggagaatcgcttgaacccgggaggttggaggttgcggtgggccgagattgcgccactgcactccagcctgggcgacagagcgggactccatctcaaaaaaaaaaaaaaaaaagtgaggatttgggtcaccccaggctgaaggccaggggaacctgaatgataagggaagggaaaacttaggccacagtctgattagaaatggggctgaattccaccctgtttttcctttactggagattcaatttgaattactctgcctcccttcttattccttttcccttttaaaatagtcatcataatcataaaaatttcttttcc

SEQ ID NO: 15897 - DNA, 630 bp, Homo sapiens
ataccagatgactcttctttcctcaggtgaagacaggctcactgctaaaccagcccaaagctgtgcttcagaaactggctgctctctctgaccataaccccagtgctcctcgaaattcaagaaactttgtctttcatacactttctcctgtcaaggctgaggcggcaaaggaatcgtctaagtctcaggtaaagaaaaggggtccatctttcatgacttctccttcacctaagcacctcaaaacagatgatagcacttcaggattgacgcgaagcatcttcaaatatttggagagctaacaccatcaaaggtgccaaaatctacattgagactgctttgagaagtttctagcactgaaagttggaattgacactccagccaatgatccttccttctttcataatcaatgcaataagattgcagacagaaattccagtgatttctactgcacagctctggacatctcttttcctagtattattccctgaattggccactgatttcaattctgcagtatttacaacatcaacaactcatggaatacttgggtgaggtttcctttttttttttttttttaagatgggagtctcactctgttgcccagcttggagtgcagtggcgtgatctcgg

SEQ ID NO: 15898 - DNA, 418 bp, Homo sapiens
aagtatattgtcattttctaggttcacctagaaatcaatgacccaaacgtcatttcacaagaggaagcagatagtccttcagatagtggacagggcagctatgaaacaattggacccttgagtgaaggagattcagatgaagagatatttgtaagtaagaagttgaaaaacaggaaggttctacaagacagtgattccgaaacagaggacacaaatgcctctccagagaaaactacctatgacagtgccgaggaggaaaataaagagaatttatatgctgggaaaaatacataatcgtataaggggtcttgtcatggaactgatccaggttgagttctggtgttttagaaagcagtttcacataggcgccaccacattctattccattttggaaattaacctcatactgaacaatgag

SEQ ID NO: 15899 - DNA, 4585 bp, Homo sapiens
agcactgctgggctggagacggcgggagccgctgctctccggctgagggaatcagagacagctccgtccctagtggagcgcaggggaggcagaagtcatgacaggcgaggtgggttctgaggttcacctagaaatcaatgacccaaacgtcatttcacaagaggaagcagatagtccttcagatagtggacagggcagctatgaaacaattggacccttgagtgaaggagattcagatgaagagatatttgtaagtaagaagttgaaaaacaggaaggttctacaagacagtgattccgaaacagaggacacaaatgcctctccagagaaaactacctatgacagtgccgaggaggaaaataaagagaatttatatgctgggaaaaatacaaaaatcaaaaggatttacaaaactgtggcagacagtgatgaaagttacatggaaaagtctttgtatcaggaaaatcttgaagcgcaagtgaaaccttgcttagagctgagtcttcagtctggaaactctacagactttaccactgacagaaagagttccaaaaagcacatacatgataaagaaggaactgcaggaaaagcaaaagtaaaatcaaaaagaagacttgagaaagaggagagaaaaatggaaaaaattagacagctaaaaaagaaggaaacaaaaaaccaggaagatgatgtagaacagccatttaatgacagtggctgtcttcttgtggataaagacctttttgaaactgggttggaggatgaaaataactctccattggaagatgaagagtcattagaatcaataagagcagctgtaaaaaacaaagtaaaaaagcacaagaaaaaagaaccatctttggagagtggggtccattcatttgaggaaggaagtgagttatcaaaaggaaccacgaggaaggaaagaaaggcagccagattaagtaaagaagcattaaaacaactgcatagtgagactcagcgccttattcgagagtctgcactgaaccttccatatcatatgcctgagaataaaaccattcatgatttcttcaaacgtaaaccccggcccacttgccacggaaatgccatggcactattgaagtcatctaaatatcagtcaagccatcacaaagaaatcatagacactgcaaatactactgaaatgaacagtgatcaccatagtaaaggttctgagcagacaacaggtgcagaaaatgaagtggaaactaatgcactccctgtagtttcaaaggaaacccagatcattactggatcagatgagtcttgcaggaaggatttggtaaaaaatgaagagctagaaattcaggagaaacagaagcagagtgacattagaccttcacctggggacagctcagtgttgcaacaggaatccaacttcctcgggaacaatcacagtgaggaatgtcaggttggagggcttgtagcatttgaacctcatgccctggagggtgaaggcccccaaaatccagaagaaacagatgagaaagtggaagagcctgagcagcaaaataaatcatcagcagttgggccacctgaaaaagtgagacggtttactctggatagacttaagcaactgggagtagatgtttccattaaaccacggctaggtgctgatgaagattcctttgtgatacttgaacctgaaaccaacagagaactggaagccttgaagcagcgtttctggaagcatgctaatccagcagccaaacccagggctggtcagacagtgaatgtgaacgtcatagtgaaagacatgggcactgatggaaaggaagagctaaaagcagatgtggtacctgtgactttagcacctaagaagttggatggagcaagccacacaaaaccaggtgaaaagcttcaggtgttaaaagctaaactgcaagaagcaatgaaactccgaaggtttgaggagcgccagaagcgccaagcactgtttaaattagataatgaagatgggtttgaggaagaggaggaggaagaggaagaaatgacagatgagtctgaggaagatggagaagagaaggtagagaaagaagagaaagaggaagaactagaggaagaggaggagaaagaagaggaggaggaagaagaaggaaatcaggaggacagctcttccaagatgggttactttcctactgaagaaaaatcagaaacagatgaaaactcaggcaagcagcctagcaaactggatgaggatgattcatgttcattgctaacaaaggagagcagccacaatagcagctttgagctgattggctccacgattccatcctatcagccttgcaacagacaaacaggccgtgggaccagttttttccctacagcaggaggattcagatctccttcccctgggctatttcgagccagtttggtcagctcagcttctaagagttcagggaaactgtctgagccttcacttcccatagaggattcccaggatctgtataacgcctccccagagcctaagacacttttcctaggagcaggagacttccagttctgtttagaagatgacactcagagccaactgttggatgcagatgggttcttaaatgttagaaaccacaggaatcagtaccaagctttgaagcctcgattgccattggccagtatggatgagaatgccatggatgccaacatggatgagctgttggatttgtgtactggaaagttcacatctcaggctgaaaaacatctacccaggaagagtgacaagaaagagaacatggaggaacttctgaacctttgttcaggaaaattcacttctcaggatgcctccactccagcctcatcagagttaaataaacaggagaaggagagcagcatgggtgatccaatggaagaagcacttgctctttgctcaggctcttttcccacagacaaggaagaggaagacgaggaggaggaatttggagactttcggcttgtttcaaatgataatgagtttgatagtgatgaggatgaacacagtgactctggtaatgatctggcactggaagaccatgaagatgatgatgaagaagaactcctgaagcgatctgagaagttgaaaaggcaaatgaggttgaggaaatacctggaggatgaggcagaggtgtcaggaagtgatgtgggaagcgaagatgagtatgatggggaagaaattgatgaatatgaagaggacgtaattgatgaagtacttccttctgatgaggaactgcagagtcaaatcaagaaaatacacatgaaaactatgttggatgatgataagcgacagctacgtttataccaagagaggtaccttgctgatggggatctgcacagcgatggtcctgggcgaatgaggaagtttcgatggaaaaacatagatgatgcttcccagatggacttgttccacagagactctgatgatgatcagactgaagaacagcttgatgagtcagaagccaggtggaggaaggagcgaattgaacgagagcagtggcttcgggacatggcacagcaggggaaaattacagctgaagaagaagaagaaattggggaggacagtcagtttatgatactggccaagaaagttacagccaaagcactgcagaagaatgccagtcgccctatggttattcaggaatcaaagtctttgctcagaaatccttttgaagccatcagaccaggaagtgctcaacaggtgaagacaggctcactgctaaaccagcccaaagctgtgcttcagaaactggctgctctctctgaccataaccccagtgctcctcgaaattcaagaaactttgtctttcatacactttctcctgtcaaggctgaggcggcaaaggaatcgtctaagtctcagaagatcccagagaaggactctgactggctcacctggagtggagctcctatccctggattcttcaggctttcatttgacccacatggttaagctgggagagacagagtccaaagagaggcggagaagggctattctgggcagaacaaacaattgatgactttatggctctgtggtctgggcagaactgcataaccctagatcaccaaagctgagagcctttaggagtgaggatttgggccgggcatggtggctcacgcctgtaatcccagcactttgggaggccgaggtgggtggatcacaaggtcaggagatcaagaccaacctgaccaacatggtgaggccccatctctactaaaaatacaaaaattagctgacgtgatgcatgcacctgtaatcccagctactcgggaggctgaggcgggagaatcgcttgaacccgggaggttggaggttgcggtgggccgagattgcgccactgcactccagcctgggcgacagagcgggactccatctcaaaaaaaaaaaaaaaaaagtgaggatttgggtcaccccaggctgaaggccaggggaacctgaatgataagggaagggaaaacttaggccacagtctgattagaaatggggctgaattccaccctgtttttcctttactggagattcaatttgaattactctgcctcccttcttattccttttcccttttaaaatagtcatcataatcataaaaatttcttttcc

SEQ ID NO: 15900 - DNA, 3325 bp, Homo sapiens
atcccttgtctgctgcagggtataggatggaatcgtggagccaatcagctcaaagctgctagtgtggctgctctcctttgttaggggggacatgaatcatcctcatccagttgctaggctgctggcctgagttttcatctgttctgatttatcttcagtaggaaagtaacccatcttggaagagctgtccttaaacagaagtaaagtagaatctgatgaagattcctttgtgatacttgaacctgaaaccaacagagaactggaagccttgaagcagcgtttctggaagcatgctaatccagcagccaaacccagggctggtcagacagtgaatgtgaacgtcatagtgaaagacatgggcactgatggaaaggaagagctaaaagcagatgtggtacctgtgactttagcacctaagaagttggatggagcaagccacacaaaaccaggtgaaaagcttcaggtgttaaaagctaaactgcaagaagcaatgaaactccgaaggtttgaggagcgccagaagcgccaagcactgtttaaattagataatgaagatgggtttgaggaagaggaggaggaagaggaagaaatgacagatgagtctgaggaagatggagaagagaaggtagagaaagaagagaaagaggaagaactagaggaagaggaggagaaagaagaggaggaggaagaagaaggaaatcaggagactgcagaattccttcttagtagtgaagaaatagaaacaaaagatgaaaaagaaatggataaagaaaataatgatggcagtagtgaaattggcaaggcagttggcttcctctctgttcccaagtctctctcatcagattctactttacttctgtttaaggacagctcttccaagatgggttactttcctactgaagaaaaatcagaaacagatgaaaactcaggcaagcagcctagcaaactggatgaggatgattcatgttcattgctaacaaaggagagcagccacaatagcagctttgagctgattggctccacgattccatcctatcagccttgcaacagacaaacaggccgtgggaccagttttttccctacagcaggaggattcagatctccttcccctgggctatttcgagccagtttggtcagctcagcttctaagagttcagggaaactgtctgagccttcacttcccatagaggattcccaggatctgtataacgcctccccagagcctaagacacttttcctaggagcaggagacttccagttctgtttagaagatgacactcagagccaactgttggatgcagatgggttcttaaatgttagaaaccacaggaatcagtaccaagctttgaagcctcgattgccattggccagtatggatgagaatgccatggatgccaacatggatgagctgttggatttgtgtactggaaagttcacatctcaggctgaaaaacatctacccaggaagagtgacaagaaagagaacatggaggaacttctgaacctttgttcaggaaaattcacttctcaggatgcctccactccagcctcatcagagttaaataaacaggagaaggagagcagcatgggtgatccaatggaagaagcacttgctctttgctcaggctcttttcccacagacaaggaagaggaagacgaggaggaggaatttggagactttcggcttgtttcaaatgataatgagtttgatagtgatgaggatgaacacagtgactctggtaatgatctggcactggaagaccatgaagatgatgatgaagaagaactcctgaagcgatctgagaagttgaaaaggcaaatgaggttgaggaaatacctggaggatgaggcagaggtgtcaggaagtgatgtgggaagcgaagatgagtatgatggggaagaaattgatgaatatgaagaggacgtaattgatgaagtacttccttctgatgaggaactgcagagtcaaatcaagaaaatacacatgaaaactatgttggatgatgataagcgacagctacgtttataccaagagaggtaccttgctgatggggatctgcacagcgatggtcctgggcgaatgaggaagtttcgatggaaaaacatagatgatgcttcccagatggacttgttccacagagactctgatgatgatcagactgaagaacagcttgatgagtcagaagccaggtggaggaaggagcgaattgaacgagagcagtggcttcgggacatggcacagcaggggaaaattacagctgaagaagaagaagaaattggggaggacagtcagtttatgatactggccaagaaagttacagccaaagcactgcagaagaatgccagtcgccctatggttattcaggaatcaaagtctttgctcagaaatccttttgaagccatcagaccaggaagtgctcaacaggtgaagacaggctcactgctaaaccagcccaaagctgtgcttcagaaactggctgctctctctgaccataaccccagtgctcctcgaaattcaagaaactttgtctttcatacactttctcctgtcaaggctgaggcggcaaaggaatcgtctaagtctcagaagatcccagagaaggactctgactggctcacctggagtggagctcctatccctggattcttcaggctttcatttgacccacatggttaagctgggagagacagagtccaaagagaggcggagaagggctattctgggcagaacaaacaattgatgactttatggctctgtggtctgggcagaactgcataaccctagatcaccaaagctgagagcctttaggagtgaggatttgggccgggcatggtggctcacgcctgtaatcccagcactttgggaggccgaggtgggtggatcacaaggtcaggagatcaagaccaacctgaccaacatggtgaggccccatctctactaaaaatacaaaaattagctgacgtgatgcatgcacctgtaatcccagctactcgggaggctgaggcgggagaatcgcttgaacccgggaggttggaggttgcggtgggccgagattgcgccactgcactccagcctgggcgacagagcgggactccatctcaaaaaaaaaaaaaaaaaagtgaggatttgggtcaccccaggctgaaggccaggggaacctgaatgataagggaagggaaaacttaggccacagtctgattagaaatggggctgaattccaccctgtttttcctttactggagattcaatttgaattactctgcctcccttcttattccttttcccttttaaaatagtcatcataatcataaaaatttcttttcc

SEQ ID NO: 15901 - DNA, 2845 bp, Homo sapiens
cgcagtcttctcccatcagtcacagggatgaggctgacacaagtaaaatgaaagtttgtggtaagtactaacatgatctttattttacattccattatctctgatcaacctcatccttaagttcatatatacatgattattataggaaaataagtattggtaaggatgtggagaaatcagagccctcatacactgctgatgggagaagatgcgtcttctcccatcagctttacctacctgccttatttcaggtactctttacagtatgtattcaagtaagcaagctgaagcccagagaagatacaatggccacagggacaccacaggaggcacagctgatgggaccgcatctctctcatcagattctactttacttctgtttaaggacagctcttccaagatgggttactttcctactgaagaaaaatcagaaacagatgaaaactcaggcaagcagcctagcaaactggatgaggatgattcatgttcattgctaacaaaggagagcagccacaatagcagctttgagctgattggctccacgattccatcctatcagccttgcaacagacaaacaggccgtgggaccagttttttccctacagcaggaggattcagatctccttcccctgggctatttcgagccagtttggtcagctcagcttctaagagttcagggaaactgtctgagccttcacttcccatagaggattcccaggatctgtataacgcctccccagagcctaagacacttttcctaggagcaggagacttccagttctgtttagaagatgacactcagagccaactgttggatgcagatgggttcttaaatgttagaaaccacaggaatcagtaccaagctttgaagcctcgattgccattggccagtatggatgagaatgccatggatgccaacatggatgagctgttggatttgtgtactggaaagttcacatctcaggctgaaaaacatctacccaggaagagtgacaagaaagagaacatggaggaacttctgaacctttgttcaggaaaattcacttctcaggatgcctccactccagcctcatcagagttaaataaacaggagaaggagagcagcatgggtgatccaatggaagaagcacttgctctttgctcaggctcttttcccacagacaaggaagaggaagacgaggaggaggaatttggagactttcggcttgtttcaaatgataatgagtttgatagtgatgaggatgaacacagtgactctggtaatgatctggcactggaagaccatgaagatgatgatgaagaagaactcctgaagcgatctgagaagttgaaaaggcaaatgaggttgaggaaatacctggaggatgaggcagaggtgtcaggaagtgatgtgggaagcgaagatgagtatgatggggaagaaattgatgaatatgaagaggacgtaattgatgaagtacttccttctgatgaggaactgcagagtcaaatcaagaaaatacacatgaaaactatgttggatgatgataagcgacagctacgtttataccaagagaggtaccttgctgatggggatctgcacagcgatggtcctgggcgaatgaggaagtttcgatggaaaaacatagatgatgcttcccagatggacttgttccacagagactctgatgatgatcagactgaagaacagcttgatgagtcagaagccaggtggaggaaggagcgaattgaacgagagcagtggcttcgggacatggcacagcaggggaaaattacagctgaagaagaagaagaaattggggaggacagtcagtttatgatactggccaagaaagttacagccaaagcactgcagaagaatgccagtcgccctatggttattcaggaatcaaagtctttgctcagaaatccttttgaagccatcagaccaggaagtgctcaacaggtgaagacaggctcactgctaaaccagcccaaagctgtgcttcagaaactggctgctctctctgaccataaccccagtgctcctcgaaattcaagaaactttgtctttcatacactttctcctgtcaaggctgaggcggcaaaggaatcgtctaagtctcagaagatcccagagaaggactctgactggctcacctggagtggagctcctatccctggattcttcaggctttcatttgacccacatggttaagctgggagagacagagtccaaagagaggcggagaagggctattctgggcagaacaaacaattgatgactttatggctctgtggtctgggcagaactgcataaccctagatcaccaaagctgagagcctttaggagtgaggatttgggccgggcatggtggctcacgcctgtaatcccagcactttgggaggccgaggtgggtggatcacaaggtcaggagatcaagaccaacctgaccaacatggtgaggccccatctctactaaaaatacaaaaattagctgacgtgatgcatgcacctgtaatcccagctactcgggaggctgaggcgggagaatcgcttgaacccgggaggttggaggttgcggtgggccgagattgcgccactgcactccagcctgggcgacagagcgggactccatctcaaaaaaaaaaaaaaaaaagtgaggatttgggtcaccccaggctgaaggccaggggaacctgaatgataagggaagggaaaacttaggccacagtctgattagaaatggggctgaattccaccctgtttttcctttactggagattcaatttgaattactctgcctcccttcttattccttttcccttttaaaatagtcatcataatcataaaaatttcttttcc

SEQ ID NO: 15902 - DNA, 1915 bp, Homo sapiens
gctttcaacaacttatttattgattcattgatttacattttagggaagaggaagacgaggaggaggaatttggagactttcggcttgtttcaaatgataatgagtttgatagtgatgaggtgagtatgaagggaacaaagtaatcataactgagctccatgtattgctgccctcaagtgtttttttcccctcagttcttgagaattctaagtttggcatcttatcagaaacaatttcctagaatgaggtatttgggcagatgtttataaatccttttttcattgaggacgcattttattctgcttaatttggatatgatgctgattttgtaggatgaacacagtgactctggtaatgatctggcactggaagaccatgaagatgatgatgaagaagaactcctgaagcgatgaggttgaggaaatacctggaggatgaggcagaggtgtcaggaagtgatgtgggaagcgaagatgagtatgatggggaagaaattgatgaatatgaagaggacgtaattgatgaagtacttccttctgatgaggaactgcagagtcaaatcaagaaaatacacatgaaaactatgttggatgatgataagcgacagctacgtttataccaagagaggtaccttgctgatggggatctgcacagcgatggtcctgggcgaatgaggaagtttcgatggaaaaacatagatgatgcttcccagatggacttgttccacagagactctgatgatgatcagactgaagaacagcttgatgagtcagaagccaggtggaggaaggagcgaattgaacgagagcagtggcttcgggacatggcacagcaggggaaaattacagctgaagaagaagaagaaattggggaggacagtcagtttatgatactggccaagaaagttacagccaaagcactgcagaagaatgccagtcgccctatggttattcaggaatcaaagtctttgctcagaaatccttttgaagccatcagaccaggaagtgctcaacaggtgaagacaggctcactgctaaaccagcccaaagctgtgcttcagaaactggctgctctctctgaccataaccccagtgctcctcgaaattcaagaaactttgtctttcatacactttctcctgtcaaggctgaggcggcaaaggaatcgtctaagtctcagaagatcccagagaaggactctgactggctcacctggagtggagctcctatccctggattcttcaggctttcatttgacccacatggttaagctgggagagacagagtccaaagagaggcggagaagggctattctgggcagaacaaacaattgatgactttatggctctgtggtctgggcagaactgcataaccctagatcaccaaagctgagagcctttaggagtgaggatttgggccgggcatggtggctcacgcctgtaatcccagcactttgggaggccgaggtgggtggatcacaaggtcaggagatcaagaccaacctgaccaacatggtgaggccccatctctactaaaaatacaaaaattagctgacgtgatgcatgcacctgtaatcccagctactcgggaggctgaggcgggagaatcgcttgaacccgggaggttggaggttgcggtgggccgagattgcgccactgcactccagcctgggcgacagagcgggactccatctcaaaaaaaaaaaaaaaaaagtgaggatttgggtcaccccaggctgaaggccaggggaacctgaatgataagggaagggaaaacttaggccacagtctgattagaaatggggctgaattccaccctgtttttcctttactggagattcaatttgaattactctgcctcccttcttattccttttcccttttaaaatagtcatcataatcataaaaatttcttttcc

SEQ ID NO: 15903 - DNA, 522 bp, Homo sapiens
ttccatcgcttgaaaatttctgtaacgaaatattagagaaaaaaggtacccaaagccctgaagtacatgtgaaagtcacaactagtaacgtgataaaagtctttaaagtctgcgtgttgcattaaggctaggttgtgtttgtttttttttttcttgcaggttaagttcagtgaactaactgttgacatgttccggatgttacaagctctggaaagggagccaatgaatttagcttcccagatgaataaaccaggaatgcaggaatcagctgacaagcctactagacgagaaaacccccacaagtatctgctctacaaaccaaccttcagccagctatataccttcttagcagcgtcttttaaggagctgcctgccaatagcgtgcttctgatttacctgtcggccactggcgttttccccacaggtcgttctgatagtgaaggtccttatgattttggaggtgtacttactaatagtaaccgggatattattaatggagatgccatccacaaacgaaatcag

SEQ ID NO: 15904 - DNA, 2229 bp, Homo sapiens
agtgttgttcttatcttctggttctttgttgatcttctagttgttctatcccttattgaaagtggggtactggagtctccaactgacatacttttcttttagctttttattttggaaaatttcaaacatatatgaaagaagagataatgtacttactcatcacccagcttcaacatttatcaacatcttgccaatcttactgaatctatccttccttaccttttttaaaaatgtttcctagagtgtgtcaaagctcatcccagatgtcctaatgtttctagtaaatgcttctgcacaattctaaaagacaaggatgtttttaaacccagccccgacactatcatacctcacaagattcatgctaattcctcagtgtcttctagtcccaagtccatgctcaagtgtccccccctgtccaggcaccctcttcaggggtcctccatgtttcatagcgagaaggggccctgagagttgggcaccccgggcaggctggctggagggggctttggaaaggaaggctttggccagcgtgtgagggtgcaggtctcaccagctcctgtttggtctgtttcaggaacaaatgtggtatctggggctggcggtctgagaagatggaaactgttagcggctacgaggccaaggcaggagaggctaggggtggggggctgggggtaggagatgaggtccaggaactcagctcctctccacatccatcccagagtagcccctgggctctggaaaccctgagcatttgtgggaactcagcgggcctgagtgcccagcccctgcggagtacacagggctcacccacatcatgggcccctacccagggtaccgagatcaaaagaggagtgtgttcctcttgaccctggggctgcatctcctcgttggtgacttcctggggttcagaccctgccacctcctccattttggggagcaagatctcatctgtctctgggacaggaggacctgggttctgcactggtgaggctgagtgtggggagcaggctctgagcccccagctccccgtgtcccctgctccccaggtgtacagtgccaccaacgtggagctggtgacacgcacacgcacggagcacctctctgatcaggacaagtcgaggagcaaagcggggaagactccattccagtccttcctggggatggcgcagcagcattcctcccacaccggggcccccgtgcagcaggcagccagccccaccaaccccacagccatctcccctgaggagtacttcgaccccaacttcagcctggagtcacggaacattggccgccccatcgagatgtccagcaaagtacagaggttcaaggcaacactgtggctgagtgaagagcacccgctctccctgggtgaccaggtgacccccatcatcgacctaatggccatcagcaacgctcactttgccaagctgcgcgacttcatcactctgcgccttccacctggcttccccgtcaaaattgagattccccttttccacgtgctcaatgcccgcatcaccttcagcaacctgtgtggctgtgatgagcccctgagctccgtgtgggtgccggcccccagctctgctgtcgccgcatcagggaaccctttcccgtgcgaggtggaccccaccgtgtttgaagtgcccaacgggtacagcgtgctgggcatggagcgcaacgagcccctccgggacgaggacgatgacctcctgcagttcgccatccagcagagcctgcttgaagcgggcactgaggcggagcaggtgaccgtctgggaagccctgaccaacacccggcccggtgcccgccctcctccccaggccacggtttatgaggaacagcttcagctggagcgggccctccaggaaagcctgcagctgtccacagagcccaggggcccaggatcccctcccaggacacccccagcccccggtccacccagctttgaagagcagctgcgcctggccctggagttgtcttcacgggagcaggaggagcgggagcggcgcgggcagcaggaggaggaggacttacagcggatcctgcagctgtcactcactgagcactgagccatagccccgggagggctggccaggccactccctgcccgcttttgtaatttatttatttataaactctctgctgctgagcttggggcctggagccccaggaatgagcaggcaggggagactgagatggaaataaagagactgtcgcagcaaaacaaaaaag

SEQ ID NO: 15905 - DNA, 540 bp, Homo sapiens
gtgcatgagctgttctagagtatcatgagtcatcgcgcagtgggttgctgcagcccgtgtctcactcagactgccggggtggttgggctcctgtggccacctttgtggggaggggtcaggtcaagatgtccccagtttcttgacttctgacctcatatgttttcccattaagacaaagatttaggctgtggttcacggcagctctttgcaccaatgttggcttgtcattggtgcggctgtgttgggggcagaatcctttgtgggtagcctaggaacctgacccttccagcaagagtttctctgacaacacatgccccctcttgccttaacagtcagtggaaacacttaaaaaaaaaaacaaaaaacctttattgagatataatctcatataccatataagatcacccatttaaagcatacagttcaatgacttttagtatatttattcagagatttgtacatcaccacagtcaattttagaacatttttatcacctcaggaagaaaccccccaccctttagctaactcttcgccaaactt

SEQ ID NO: 15906 - DNA, 2016 bp, Homo sapiens
cgaggcggggccgggatgcggcgctgaggcccagcatggccggcccgggccccaccttcccgctgcaccggctcgtctgggcgaaccggcatcgcgaactggaggccgcactgcacagccaccagcacgacattgaacaggaggacccccgcgggcggaccccactggagctggccgtgtctctgggaaacctggagtctgtgagagtgctccttcgacacaatgccaacgtgggcaaagagaaccgccagggctgggcagtcctgcaggaggcagtcagcactggagaccccgagatggtgcagctggtgctccagtatcgggactaccagagggccacgcagaggctggcgggcattccggaactgctcaacaaacttcgccaggcccccgatttctacgttgagatgaagtgggagttcaccagctgggtgccccttgtgtctaagatgtgcccaagcgatgtgtaccgcgtgtggaagcggggtgagagcctgcgagtagacaccagtctcctgggcttcgagcacatgacctggcagcggggccggaggagcttcatcttcaagggccaggaggcaggagccctggtgatggaagtggaccatgaccggcaggtggtgcatgtggagacactggggctcactctgcaggagcccgaaacactgctggccgccatgcggcccagcgaggagcatgtggccagtcgcctcacctctcctatcgtctccacccacctggacactcgtaatgtggcctttgagaggaacaaatgtggtatctggggctggcggtctgagaagatggaaactgttagcggctacgaggccaaggtgtacagtgccaccaacgtggagctggtgacacgcacacgcacggagcacctctctgatcaggacaagtcgaggagcaaagcggggaagactccattccagtccttcctggggatggcgcagcagcattcctcccacaccggggcccccgtgcagcaggcagccagccccaccaaccccacagccatctcccctgaggagtacttcgaccccaacttcagcctggagtcacggaacattggccgccccatcgagatgtccagcaaagtacagaggttcaaggcaacactgtggctgagtgaagagcacccgctctccctgggtgaccaggtgacccccatcatcgacctaatggccatcagcaacgctcactttgccaagctgcgcgacttcatcactctgcgccttccacctggcttccccgtcaaaattgagattccccttttccacgtgctcaatgcccgcatcaccttcagcaacctgtgtggctgtgatgagcccctgagctccgtgtgggtgccggcccccagctctgctgtcgccgcatcagggaaccctttcccgtgcgaggtggaccccaccgtgtttgaagtgcccaacgggtacagcgtgctgggcatggagcgcaacgagcccctccgggacgaggacgatgacctcctgcagttcgccatccagcagagcctgcttgaagcgggcactgaggcggagcaggtgaccgtctgggaagccctgaccaacacccggcccggtgcccgccctcctccccaggccacggtttatgaggaacagcttcagctggagcgggccctccaggaaagcctgcagctgtccacagagcccaggggcccaggatcccctcccaggacacccccagcccccggtccacccagctttgaagagcagctgcgcctggccctggagttgtcttcacgggagcaggaggagcgggagcggcgcgggcagcaggaggaggaggacttacagcggatcctgcagctgtcactcactgagcactgagccatagccccgggagggctggccaggccactccctgcccgcttttgtaatttatttatttataaactctctgctgctgagcttggggcctggagccccaggaatgagcaggcaggggagactgagatggaaataaagagactgtcgcagcaaaacaaaaaag

SEQ ID NO: 15907 - DNA, 1385 bp, Homo sapiens
aaatggcaggctggtaccggccggagatttaggattgctggccgccatgcggcccagcgaggagcatgtggccagtcgcctcacctctcctatcgtctccacccacctggacactcgtaatgtggcctttgagaggaacaaatgtggtatctggggctggcggtctgagaagatggaaactgttagcggctacgaggccaaggtgtacagtgccaccaacgtggagctggtgacacgcacacgcacggagcacctctctgatcaggacaagtcgaggagcaaagcggggaagactccattccagtccttcctggggatggcgcagcagcattcctcccacaccggggcccccgtgcagcaggcagccagccccaccaaccccacagccatctcccctgaggagtacttcgaccccaacttcagcctggagtcacggaacattggccgccccatcgagatgtccagcaaagtacagaggttcaaggcaacactgtggctgagtgaagagcacccgctctccctgggtgaccaggtgacccccatcatcgacctaatggccatcagcaacgctcactttgccaagctgcgcgacttcatcactctgcgccttccacctggcttccccgtcaaaattgagattccccttttccacgtgctcaatgcccgcatcaccttcagcaacctgtgtggctgtgatgagcccctgagctccgtgtgggtgccggcccccagctctgctgtcgccgcatcagggaaccctttcccgtgcgaggtggaccccaccgtgtttgaagtgcccaacgggtacagcgtgctgggcatggagcgcaacgagcccctccgggacgaggacgatgacctcctgcagttcgccatccagcagagcctgcttgaagcgggcactgaggcggagcaggtgaccgtctgggaagccctgaccaacacccggcccggtgcccgccctcctccccaggccacggtttatgaggaacagcttcagctggagcgggccctccaggaaagcctgcagctgtccacagagcccaggggcccaggatcccctcccaggacacccccagcccccggtccacccagctttgaagagcagctgcgcctggccctggagttgtcttcacgggagcaggaggagcgggagcggcgcgggcagcaggaggaggaggacttacagcggatcctgcagctgtcactcactgagcactgagccatagccccgggagggctggccaggccactccctgcccgcttttgtaatttatttatttataaactctctgctgctgagcttggggcctggagccccaggaatgagcaggcaggggagactgagatggaaataaagagactgtcgcagcaaaacaaaaaag

SEQ ID NO: 15908 - DNA, 1209 bp, Homo sapiens
tacgatcctaatgactacgggggaaggtgtacagtgccaccaacgtggagctggtgacacgcacacgcacggagcacctctctgatcaggacaagtcgaggagcaaagcggggaagactccattccagtccttcctggggatggcgcagcagcattcctcccacaccggggcccccgtgcagcaggcagccagccccaccaaccccacagccatctcccctgaggagtacttcgaccccaacttcagcctggagtcacggaacattggccgccccatcgagatgtccagcaaagtacagaggttcaaggcaacactgtggctgagtgaagagcacccgctctccctgggtgaccaggtgacccccatcatcgacctaatggccatcagcaacgctcactttgccaagctgcgcgacttcatcactctgcgccttccacctggcttccccgtcaaaattgagattccccttttccacgtgctcaatgcccgcatcaccttcagcaacctgtgtggctgtgatgagcccctgagctccgtgtgggtgccggcccccagctctgctgtcgccgcatcagggaaccctttcccgtgcgaggtggaccccaccgtgtttgaagtgcccaacgggtacagcgtgctgggcatggagcgcaacgagcccctccgggacgaggacgatgacctcctgcagttcgccatccagcagagcctgcttgaagcgggcactgaggcggagcaggtgaccgtctgggaagccctgaccaacacccggcccggtgcccgccctcctccccaggccacggtttatgaggaacagcttcagctggagcgggccctccaggaaagcctgcagctgtccacagagcccaggggcccaggatcccctcccaggacacccccagcccccggtccacccagctttgaagagcagctgcgcctggccctggagttgtcttcacgggagcaggaggagcgggagcggcgcgggcagcaggaggaggaggacttacagcggatcctgcagctgtcactcactgagcactgagccatagccccgggagggctggccaggccactccctgcccgcttttgtaatttatttatttataaactctctgctgctgagcttggggcctggagccccaggaatgagcaggcaggggagactgagatggaaataaagagactgtcgcagcaaaacaaaaaag

SEQ ID NO: 15909 - DNA, 2392 bp, Homo sapiens
cgaggcggggccgggatgcggcgctgaggcccagcatggccggcccgggccccaccttcccgctgcaccggctcgtctgggcgaaccggcatcgcgaactggaggccgcactgcacagccaccagcacgacattgaacaggaggacccccgcgggcggaccccactggagctggccgtgtctctgggaaacctggagtctgtgagagtgctccttcgacacaatgccaacgtgggcaaagagaaccgccagggctgggcagtcctgcaggaggcagtcagcactggagaccccgagatggtgcagctggtgctccagtatcgggactaccagagggccacgcagaggctggcgggcattccggaactgctcaacaaacttcgccaggcccccgatttctacgttgagatgaagtgggagttcaccagctgggtgccccttgtgtctaagatgtgcccaagcgatgtgtaccgcgtgtggaagcggggtgagagcctgcgagtagacaccagtctcctgggcttcgagcacatgacctggcagcggggccggaggagcttcatcttcaagggccaggaggcaggagccctggtgatggaagtggaccatgaccggcaggtggtgcatgtggagacactggggctcactctgcaggagcccgaaacactgctggccgccatgcggcccagcgaggagcatgtggccagtcgcctcacctctcctatcgtctccacccacctggacactcgtaatgtggcctttgagaggaacaaatgtggtatctggggctggcggtctgagaagatggaaactgttagcggctacgaggccaaggtgtacagtgccaccaacgtggagctggtgacacgcacacgcacggagcacctctctgatcaggacaagtcgaggagcaaagcggggaagactccattccagtccttcctggggatggcgcagcagcattcctcccacaccggggcccccgtgcagcaggcagccagccccaccaaccccacagccatctcccctgaggagtacttcgaccccaacttcagcctggagtcacggaacattggccgccccatcgagatgtccagcaaagtacagaggtgaggtctgagagctggctggggacttgcctcgggacaagggctcttgcagacccctctctgggcctgtcatagttagggacccactccctcggctggcttctctctggactccactcctggagggcaggagtcatgtctgccttatccatggtcctcagcccttagcaaggggcttggcacagaaaaccggtagtttgtctttgatgaatggatggtgccacccatgtatggttttctattgaatttcatgagtacctgctggggccagcgtggcacagtgggaagggcccccagcgacgtggcctgggagtggagcgtctgccttggtggaacagaacagttacgctcttgcctcgtgaggagccttgagcaggttcaaggcaacactgtggctgagtgaagagcacccgctctccctgggtgaccaggtgacccccatcatcgacctaatggccatcagcaacgctcactttgccaagctgcgcgacttcatcactctgcgccttccacctggcttccccgtcaaaattgagattccccttttccacgtgctcaatgcccgcatcaccttcagcaacctgtgtggctgtgatgagcccctgagctccgtgtgggtgccggcccccagctctgctgtcgccgcatcagggaaccctttcccgtgcgaggtggaccccaccgtgtttgaagtgcccaacgggtacagcgtgctgggcatggagcgcaacgagcccctccgggacgaggacgatgacctcctgcagttcgccatccagcagagcctgcttgaagcgggcactgaggcggagcaggtgaccgtctgggaagccctgaccaacacccggcccggtgcccgccctcctccccaggccacggtttatgaggaacagcttcagctggagcgggccctccaggaaagcctgcagctgtccacagagcccaggggcccaggatcccctcccaggacacccccagcccccggtccacccagctttgaagagcagctgcgcctggccctggagttgtcttcacgggagcaggaggagcgggagcggcgcgggcagcaggaggaggaggacttacagcggatcctgcagctgtcactcactgagcactgagccatagccccgggagggctggccaggccactccctgcccgcttttgtaatttatttatttataaactctctgctgctgagcttggggcctggagccccaggaatgagcaggcaggggagactgagatggaaataaagagactgtcgcagcaaaacaaaaaag

SEQ ID NO: 15910 - DNA, 2105 bp, Homo sapiens
cgaggcggggccgggatgcggcgctgaggcccagcatggccggcccgggccccaccttcccgctgcaccggctcgtctgggcgaaccggcatcgcgaactggaggccgcactgcacagccaccagcacgacattgaacaggaggacccccgcgggcggaccccactggagctggccgtgtctctgggaaacctggagtctgtgagagtgctccttcgacacaatgccaacgtgggcaaagagaaccgccagggctgggcagtcctgcaggaggcagtcagcactggagaccccgagatggtgcagctggtgctccagtatcgggactaccagagggccacgcagaggctggcgggcattccggaactgctcaacaaacttcgccaggcccccgatttctacgttgagatgaagtgggagttcaccagctgggtgccccttgtgtctaagatgtgcccaagcgatgtgtaccgcgtgtggaagcggggtgagagcctgcgagtagacaccagtctcctgggcttcgagcacatgacctggcagcggggccggaggagcttcatcttcaagggccaggaggcaggagccctggtgatggaagtggaccatgaccggcaggtggtgcatgtggagacactggggctcactctgcaggagcccgaaacactgctggccgccatgcggcccagcgaggagcatgtggccagtcgcctcacctctcctatcgtctccacccacctggacactcgtaatgtggcctttgagaggaacaaatgtggtatctggggctggcggtctgagaagatggaaactgttagcggctacgaggccaaggtgtacagtgccaccaacgtggagctggtgacacgcacacgcacggagcacctctctgatcaggacaagtcgaggagcaaagcggggaagactccattccagtccttcctggggatggcgcagcagcattcctcccacaccggggcccccgtgcagcaggcagccagccccaccaaccccacagccatctcccctgaggagtacttcgaccccaacttcagcctggagtcacggaacattggccgccccatcgagatgtccagcaaagtacagaggttcaaggcaacactgtggctgagtgaagagcacccgctctccctgggtgaccaggtgacccccatcatcgacctaatggccatcagcaacgctcactttgccaagctgcgcgacttcatcactctgcgccttccacctggcttccccgtcaaaattgagattccccttttccacgtgctcaatgcccgcatcaccttcagcaacctgtgtggctgtgatgagcccctgagctccgtgtgggtgccggcccccagctctgctgtcgccgcatcaggtaccccaacgggaggaagagggagcctgcacagctttctggtcaccaagccccgcgggttgagcgtggcccctctgccacctgcctagggaaccctttcccgtgcgaggtggaccccaccgtgtttgaagtgcccaacgggtacagcgtgctgggcatggagcgcaacgagcccctccgggacgaggacgatgacctcctgcagttcgccatccagcagagcctgcttgaagcgggcactgaggcggagcaggtgaccgtctgggaagccctgaccaacacccggcccggtgcccgccctcctccccaggccacggtttatgaggaacagcttcagctggagcgggccctccaggaaagcctgcagctgtccacagagcccaggggcccaggatcccctcccaggacacccccagcccccggtccacccagctttgaagagcagctgcgcctggccctggagttgtcttcacgggagcaggaggagcgggagcggcgcgggcagcaggaggaggaggacttacagcggatcctgcagctgtcactcactgagcactgagccatagccccgggagggctggccaggccactccctgcccgcttttgtaatttatttatttataaactctctgctgctgagcttggggcctggagccccaggaatgagcaggcaggggagactgagatggaaataaagagactgtcgcagcaaaacaaaaaag

SEQ ID NO: 15911 - DNA, 1687 bp, Homo sapiens
cgaggcggggccgggatgcggcgctgaggcccagcatggccggcccgggccccaccttcccgctgcaccggctcgtctgggcgaaccggcatcgcgaactggaggccgcactgcacagccaccagcacgacattgaacaggaggacccccgcgggcggaccccactggagctggccgtgtctctgggaaacctggagtctgtgagagtgctccttcgacacaatgccaacgtgggcaaagagaaccgccagggctgggcagtcctgcaggaggcagtcagcactggagaccccgagatggtgcagctggtgctccagtatcgggactaccagagggccacgcagaggctggcgggcattccggaactgctcaacaaacttcgccaggcccccgatttctacgttgagatgaagtgggagttcaccagctgggtgccccttgtgtctaagatgtgcccaagcgatgtgtaccgcgtgtggaagcggggtgagagcctgcgagtagacaccagtctcctgggcttcgagcacatgacctggcagcggggccggaggagcttcatcttcaagggccaggaggcaggagccctggtgatggaagtggaccatgaccggcaggtggtgcatgtggagacactggggctcactctgcaggagcccgaaacactgctggccgccatgcggcccagcgaggagcatgtggccagtcgcctcacctctcctatcgtctccacccacctggacactcgtaatgtggcctttgagaggaacaaatgtggtatctggggctggcggtctgagaagatggaaactgttagcggctacgaggccaaggtgtacagtgccaccaacgtggagctggtgacacgcacacgcacggagcacctctctgatcaggacaagtcgaggagcaaagcggggaagactccattccagtccttcctggggatggcgcagcagcattcctcccacaccggggcccccgtgcagcaggcagccagccccaccaaccccacagccatctcccctgaggagtacttcgaccccaacttcagcctggagtcacggaacattggccgccccatcgagatgtccagcaaagtacagaggttcaaggcaacactgtggctgagtgaagagcacccgctctccctgggtgaccaggtgacccccatcatcgacctaatggccatcagcaacgctcactttgccaagctgcgcgacttcatcactctgcgccttccacctggcttccccgtcaaaattgagattccccttttccacgtgctcaatgcccgcatcaccttcagcaacctgtgtggctgtgatgagcccctgagctccgtgtgggtgccggcccccagctctgctgtcgccgcatcagggaaccctttcccgtgcgaggtggaccccaccgtgtttgaagtgcccaacgggtacagcgtgctgggcatggagcgcaacgagcccctccgggacgaaggacttacagcggatcctgcagctgtcactcactgagcactgagccatagccccgggagggctggccaggccactccctgcccgcttttgtaatttatttatttataaactctctgctgctgagcttggggcctggagccccaggaatgagcaggcaggggagactgagatggaaataaagagactgtcgcagcaaaacaaaaaag

SEQ ID NO: 15912 - DNA, 580 bp, Homo sapiens
acggggaagccaggtggaaggcgcagagtgatgaagtcgcgcagcttggcaaagtgagcgttgctgatggccattaggtcgatgatgggggtcacctggtcacccagggagagcgggtgctcttcactcagccacagtgttgccttgaacctgcccagccgaccacaggacatggtttatgaggaacagcttcagctggggcgggccctccaggaaagcctgcagctgtccacagagcccaggggcccaggatcccctcccaggacacccccagcccccggtccacccagctttgaagagcagctgcgcctggccctggagttgtcttcacgggagcaggaggagcgggagcggcgcgggcagcaggaggaggaggacttacagcggatcctgcagctgtcactcactgagcactgagccatagccccgggagggctggccaggccactccctgcccgcttttgtaatttatttatttataaactctctgctgctgagcttggggcctggagccccaggaatgagcaggcaggggagactgagatggaaataaagagactgtcgcagcaaaacaaaaaag

SEQ ID NO: 15913 - DNA, 1401 bp, Homo sapiens
cgaggcggggccgggatgcggcgctgaggcccagcatggccggcccgggccccaccttcccgctgcaccggctcgtctgggcgaaccggcatcgcgaactggaggccgcactgcacagccaccagcacgacattgaacaggaggacccccgcgggcggaccccactggagctggccgtgtctctgggaaacctggagtctgtgagagtgctccttcgacacaatgccaacgtgggcaaagagaaccgccagggctgggcagtcctgcaggaggcagtcagcactggagaccccgagatggtgcagctggtgctccagtatcgggactaccagagggccacgcagaggctggcgggcattccggaactgctcaacaaacttcgccaggcccccgatttctacgttgagatgaagtgggagttcaccagctgggtgccccttgtgtctaagatgtgcccaagcgatgtgtaccgcgtgtggaagcggggtgagagcctgcgagtagacaccagtctcctgggcttcgagcacatgacctggcagcggggccggaggagcttcatcttcaagggccaggaggcaggagccctggtgatggaagtggaccatgaccggcaggtggtgcatgtggagacactggggctcactctgcaggagcccgaaacactgctggccgccatgcggcccagcgaggagcatgtggccagtcgcctcacctctcctatcgtctccacccacctggacactcgtaatgtggcctttgagaggtcggtcgggtcctggcacaccgtgggtgggatggggacggatagcaagagccaccattaatgagggcagggcgatccttgaagatcctggttcaggcctctgggctcactcacaaggggctgctcaggggcaggtgggttgctgcagcccgtgtctcactcagactgccggggtggttgggctcctgtggccacctttgtggggaggggtcaggtcaagatgtccccagtttcttgacttctgacctcatatgttttcccattaagacaaagatttaggctgtggttcacggcagctctttgcaccaatgttggcttgtcattggtgcggctgtgttgggggcagaatcctttgtgggtagcctaggaacctgacccttccagcaagagtttctctgacaacacatgccccctcttgccttaacagtcagtggaaacacttaaaaaaaaaaacaaaaaacctttattgagatataatctcatataccatataagatcacccatttaaagcatacagttcaatgacttttagtatatttattcagagatttgtacatcaccacagtcaattttagaacatttttatcacctcaggaagaaaccccccaccctttagctaactcttcgccaaactt

SEQ ID NO: 15914 - DNA, 1358 bp, Homo sapiens
cgaggcggggccgggatgcggcgctgaggcccagcatggccggcccgggccccaccttcccgctgcaccggctcgtctgggcgaaccggcatcgcgaactggaggccgcactgcacagccaccagcacgacattgaacaggaggacccccgcgggcggaccccactggagctggccgtgtctctgggaaacctggagtctgtgagagtgctccttcgacacaatgccaacgtgggcaaagagaaccgccagggctgggcagtcctgcaggaggcagtcagcactggagaccccgagatggtgcagctggtgctccagtatcgggactaccagagggccacgcagaggctggcgggcattccggaactgctcaacaaacttcgccaggcccccgatttctacgttgagatgaagtgggagttcaccagctgggtgccccttgtgtctaagatgtgcccaagcgatgtgtaccgcgtgtggaagcggggtgagagcctgcgagtagacaccagtctcctgggcttcgagcacatgacctggcagcggggccggaggagcttcatcttcaagggccaggaggcaggagccctggtgatggaagtggaccatgaccggcaggtggtgcatgtggagacactggggctcactctgcaggagcccgaaacactgctggccgccatgcggcccagcgaggagcatgtggccagtcgcctcacctctcctatcgtctccacccacctggacactcgtaatgtggcctttgagaggaacaaatgtggtatctggggctggcggtctgagaagatggaaactgttagcggctacgaggccaaggtgtacagtgccaccaacgtggagctggtgacacgcacacgcacggagcacctctctgatcaggacaagtcgaggagcaaagcggggaagactccattccagtccttcctggggatggcgcagcagcattcctcccacaccggggcccccgtgcagcaggcagccagccccaccaaccccacagccatctcccctgaggagtacttcgaccccaacttcagcctggagtcacggaacattggccgccccatcgagatgtccagcaaagtacagaggtgaggtctgagagctggctggggacttgcctcgggacaagggctcttgcagacccctctctgggcctgtcatagttagggacccactccctcggctggcttctctctggactccactcctggagggcaggagtcatgtctgccttatccatggtcctcagcccttagcaaggggcttggcacagaaaaccggtagtttgtctttgatgaatggatggtgccgatgatagcgagtgacctctagaacagc

SEQ ID NO: 15915 - DNA, 571 bp, Homo sapiens
  misc_feature (20)..(20): n is a, c, g, or t
gacgtctatatttggaatanacagggaaaactaggaatttaatagctgagttcacgtcctgccaacaaaacttagaaggaatcaacaaacttcaagttcaggcgcatatgtggtaccctgtggcctagcgagaagatcgcagatgacatgggaggccttcatcttctgcatctgtccgaccttttcagctcctcttctggtcactctgtcaagggggcctggaactcctgagaagtgaaaggaccagccctatctcagatggtgcgggtttcttcgccctgacctctgccatgtttgcttggagccccagagctcatccttcaaggcctttttaaaaatagcacagcctctgtcaagccttcttgaaaaattaaattttttattgtaaaaactttcaaacatataaagaatgtgaaagaataggcaattatctgtatactcatcacccacattcaataattaacattttgccgtcttagcctcatctacctatttctactgaatcatatgaaactcacttgcagacattgtgatatagaacaccaaaatccataaacatgtgtcgcctaaa

SEQ ID NO: 15916 - DNA, 1631 bp, Homo sapiens
actatctgcttgttcatctgagtgtcggcacaaaccagcagaggcggtgacgatgctctcgggcatagaggcggcggcaggggaatatgaggactcggagctgcggtgccgcgtggctgtggaggagctgagcccgggcgggcagccgcgaaggcgccaggccctgcgcaccgcggagctgagcctgggtcgcaacgagcgccgcgagttgatgctgcggctgcaagcgccagggcccgcggggcggccgcgctgcttccctctgcgcgccgcgcgcctcttcacgcgtttcgccgaggccgggcgcagcaccctgcggctccccgcccacgacacccccggggccggcgcagtgcagctgctgctctcggactgccccccagaccgcctgcgccgcttcctgcgcacattgcgcctcaagctggctgcggccccgggtcccgggccggcctccgcccgagcgcagctgctgggcccgcggccccgcgacttcgtcaccatcagccctgtgcagcccgaggagcggcggctcagggcggccacccgggttccggacactacgctggtgaagcggcctgtggagccccaggctggggccgagcctagcacagaagccccaaggtggcccctgcctgtgaagaggctgagcttgccctccaccaagccacagctttctgaggaacaggctgctgtgctgagggccgtcctgaaaggccagagcatcttcttcactgggagtgcaggtagtgggggcagagaggaggtagggggacagtggtggggtgggatagaggaacagggagacctgtctaactttgcccctgtccaggaacagggaagtcatatctgctaaagcgaatcctgggctcactgccccccacaggcactgtggccactgccagcactggggtggcagcctgccacatcgggggcaccaccctccatgcctttgcaggtaagtaggaacccctagggcttgagctaagagcaagcccagcttctgggaagggagagaggggaggtctgcataaagagggagttttgggggctgggcgccgtggctcactcttgtaatcccaaaactttaggaggccaaggtgggaggatcgcttgagcccaggagtttgagaccagcctggccaacacagtaaaccctgtctccacaaaatttaaaaattagcggccgggcgcagtggctcacgcctgtaatcccagcactttgggaggccgaggcaggcggatcacaaggtcaggagatcaagactatcctggctaacacggtaaaaccctgtctctactaaaaatacaaaaaaattagccaggcatggtggcaagcgcctgtagtcccagctactctggaggctgaggcaggagaatggcgtgaacccaggaggcagagcttgcagtgagccgagatcacgccactgcacttgagcctgggcgacacagcgagactccatctcaaaacaaaacaaaacaaaattagctgagcatggtggtgtgtgcctgtagtcccagctactatggaggttgaggtgggaggatcgcttgagcccatgaggcccaggttacagtgagccaagatcgtgccactgcacttcagcctgggtgacagaaagagaccttctctc

SEQ ID NO: 15917 - DNA, 2739 bp, Homo sapiens
actatctgcttgttcatctgagtgtcggcacaaaccagcagaggcggtgacgatgctctcgggcatagaggcggcggcaggggaatatgaggactcggagctgcggtgccgcgtggctgtggaggagctgagcccgggcgggcagccgcgaaggcgccaggccctgcgcaccgcggagctgagcctgggtcgcaacgagcgccgcgagttgatgctgcggctgcaagcgccagggcccgcggggcggccgcgctgcttccctctgcgcgccgcgcgcctcttcacgcgtttcgccgaggccgggcgcagcaccctgcggctccccgcccacgacacccccggggccggcgcagtgcagctgctgctctcggactgccccccagaccgcctgcgccgcttcctgcgcacattgcgcctcaagctggctgcggccccgggtcccgggccggcctccgcccgagcgcagctgctgggcccgcggccccgcgacttcgtcaccatcagccctgtgcagcccgaggagcggcggctcagggcggccacccgggttccggacactacgctggtgaagcggcctgtggagccccaggctggggccgagcctagcacagaagccccaaggtggcccctgcctgtgaagaggctgagcttgccctccaccaagccacagctttctgaggaacaggctgctgtgctgagggccgtcctgaaaggccagagcatcttcttcactgggagtgcaggtagtgggggcagagaggaggtagggggacagtggtggggtgggatagaggaacagggagacctgtctaactttgcccctgtccaggaacagggaagtcatatctgctaaagcgaatcctgggctcactgccccccacaggcactgtggccactgccagcactggggtggcagcctgccacatcgggggcaccaccctccatgcctttgcaggcatcggctcaggccaggctcctctagcccagtgtgtggccctggcccaaaggccaggcgtgcggcagggctggctgaactgccagcggttggtcattgacgagatctcaatggtggaggcagacctgtttgacaaactggaggccgtggccagagctgtccggcagcagaacaagccattcggagggatccagctcatcatctgtggggactttctgcagctgccacctgtgaccaagggctcccagcccccacggttctgcttccagtccaagagctggaagaggtgtgtgccagtgaccctggagctgaccaaggtgtggaggcaggcagaccagaccttcatctctctactgcaggccgtgaggctaggcaggtgttcagatgaggtgacccgccagctccaggccacagcttcccacaaggtggggcgagatgggattgtggccacgaggctctgcacccaccaggatgatgtggccctcaccaacgagaggcggcttcaggagctgccaggtaaggtacacagatttgaggctatggacagcaaccctgagctggccagtaccctggatgcccagtgtcctgttagccagctccttcaactaaagctgggggcccaggtgatgctggtgaaaaacttatcggtgtctcggggcctggtgaatggtgcccgaggggtggtagttgggttcgaggcagaagggagagggctaccccaggtgcggttcctgtgtggagtcactgaggtcatccacgctgaccgctggacggtgcaggccaccgggggccagctcctcagtcggcagcagctgcccctccagctggcctgggcgatgtccatccacaagagccaaggcatgaccctggattgtgtggagatttctctgggccgtgtgtttgccagtggccaggcctatgtggccctttctcgggcccgcagcctgcagggcctacgtgtgctggactttgaccccatggcggttcgctgtgacccccgtgtgctgcacttctatgccaccctgcggcggggcaggagcctcagtctggagtccccagatgatgatgaggcagcctcagaccaggagaacatggacccaatcctctgagcctcacccacaaagagaagacaaagggtggcctgtgcctccccgtcctcctgctccctagtggcccagggccccagggaataactggagtaggcaggcagtgtccccttctgtattttttagggactctcagcctcctggcagggttaaagggagagtactttaaacccatataccagctgtgcttcagtttctctcactttgccctgggtaagctgctgtagggtcagaagtaaccctttctgtgccagttgagaatgagcctgtgtggtagctgatgtcagaggacaaagctctctgcaagggctggacacagagctgcagagtcctgaacatccctcctttcaggctgcagaagggagaggcaatgaagacaggtgctccggaagcagcatcagggctcttggaggggactggtggggactcaggctgggtgcagcctccaaacagagaacggaacttaggtgtgtctctacagctaggcccagcctagcccagcccagaacaaacacccttcagagcctaaccaaagaacataagctgcaaaatgtgcacccatattttaagctgctttttcaggggataaatagtgtttggggacattgaaatggatgttctcaggttgtatttatttcggacaaataaactagagaattgtgtaaaaaactaaaaatc

SEQ ID NO: 15918 - DNA, 762 bp, Homo sapiens
ctatagaggatcccctgttgctaggtggagtccccagatgatgatgaggcagcctcagaccaggagaacatggacccaatcctctgagcctcacccacaaagagaagacaaagggtggcctgtgcctccccgtcctcctgctccctagtggcccagggccccagggaataactggagtaggcaggcagtgtccccttctgtattttttagggactctcagcctcctggcagggttaaagggagagtactttaaacccatataccagctgtgcttcagtttctctcactttgccctgggtaagctgctgtagggtcagaagtaaccctttctgtgccagttgagaatgagcctgtgtggtagctgatgtcagaggacaaagctctctgcaagggctggacacagagctgcagagtcctgaacatccctcctttcaggctgcagaagggagaggcaatgaagacaggtgctccggaagcagcatcagggctcttggaggggactggtggggactcaggctgggtgcagcctccaaacagagaacggaacttaggtgtgtctctacagctaggcccagcctagcccagcccagaacaaacacccttcagagcctaaccaaagaacataagctgcaaaatgtgcacccatattttaagctgctttttcaggggataaatagtgtttggggacattgaaatggatgttctcaggttgtatttatttcggacaaataaactagagaattgtgtaaaaaactaaaaatc

SEQ ID NO: 15919 - DNA, 361 bp, Homo sapiens
gctggacacagagctgcagagtcctgaacatccctcctttcaggctgcagaagggagaggcaatgaagacaggtgctccggaagcagcatcagggctcttggaggggactggtggggactcaggctgggtgcagcctccaaacagagaacggaacttaggtgtgtctctacagctaggcccagcctagcccagcccagaacaaacacccttcagagcctaaccaaagaacataagctgcaaaatgtgcacccatattttaagctgctttttcaggggataaatagtgtttggggacattgaaatggatgttctcaggttgtatttatttcggacaaataaactagagaattgtgtaaaaaa

SEQ ID NO: 15920 - DNA, 502 bp, Homo sapiens
ctctgctggctcctttaggggtgagggcaaaaggaaagagatgctggcccccaggttatggtcctggggaacagcacaaacccatgactgggcttctctggctctgatccaggagtccccagatgatgatgaggcagcctcagaccaggagaacatggacccaatcctctgagcctcacccacaaagagaagacaaagggtggcctgtgcctccccgtcctcctgctccctagtggcccagggccccagggaataactggagtaggcaggcagtgtccccttctgtattttttagggactctcagcctcctggcagggttaaagggagagtactttaaacccatataccagctgtgcttcagtttctctcactttgccctgggtaagctgctgtagggtcagaagtaaccctttctgtgccagttgagaatgagcctgtgtggtagctgatgtcagaggacaaagctctctgcaagggctggacacagagctgcagagtcct

SEQ ID NO: 15921 - DNA, 2599 bp, Homo sapiens
actatctgcttgttcatctgagtgtcggcacaaaccagcagaggcggtgacgatgctctcgggcatagaggcggcggcaggggaatatgaggactcggagctgcggtgccgcgtggctgtggaggagctgagcccgggcgggcagccgcgaaggcgccaggccctgcgcaccgcggagctgagcctgggtcgcaacgagcgccgcgagttgatgctgcggctgcaagcgccagggcccgcggggcggccgcgctgcttccctctgcgcgccgcgcgcctcttcacgcgtttcgccgaggccgggcgcagcaccctgcggctccccgcccacgacacccccggggccggcgcagtgcagctgctgctctcggactgccccccagaccgcctgcgccgcttcctgcgcacattgcgcctcaagctggctgcggccccgggtcccgggccggcctccgcccgagcgcagctgctgggcccgcggccccgcgacttcgtcaccatcagccctgtgcagcccgaggagcggcggctcagggcggccacccgggttccggacactacgctggtgaagcggcctgtggagccccaggctggggccgagcctagcacagaagccccaaggtggcccctgcctgtgaagaggctgagcttgccctccaccaagccacagctttctgaggaacaggctgctgtgctgagggccgtcctgaaaggccagagcatcttcttcactgggagtgcaggtagtgggggcagagaggaggtagggggacagtggtggggtgggatagaggaacagggagacctgtctaactttgcccctgtccaggaacagggaagtcatatctgctaaagcgaatcctgggctcactgccccccacaggcactgtggccactgccagcactggggtggcagcctgccacatcgggggcaccaccctccatgcctttgcaggcatcggctcaggccaggctcctctagcccagtgtgtggccctggcccaaaggccaggcgtgcggcagggctggctgaactgccagcggttggtcattgacgagatctcaatggtggaggcagacctgtttgacaaactggaggccgtggccagagctgtccggcagcagaacaagccattcggagggatccagctcatcatctgtggggactttctgcagctgccacctgtgaccaagggctcccagcccccacggttctgcttccagtccaagagctggaagaggtgtgtgccagtgaccctggagctgaccaaggtgtggaggcaggcagaccagaccttcatctctctactgcaggccgtgaggctaggcaggtaaggtacacagatttgaggctatggacagcaaccctgagctggccagtaccctggatgcccagtgtcctgttagccagctccttcaactaaagctgggggcccaggtgatgctggtgaaaaacttatcggtgtctcggggcctggtgaatggtgcccgaggggtggtagttgggttcgaggcagaagggagagggctaccccaggtgcggttcctgtgtggagtcactgaggtcatccacgctgaccgctggacggtgcaggccaccgggggccagctcctcagtcggcagcagctgcccctccagctggcctgggcgatgtccatccacaagagccaaggcatgaccctggattgtgtggagatttctctgggccgtgtgtttgccagtggccaggcctatgtggccctttctcgggcccgcagcctgcagggcctacgtgtgctggactttgaccccatggcggttcgctgtgacccccgtgtgctgcacttctatgccaccctgcggcggggcaggagcctcagtctggagtccccagatgatgatgaggcagcctcagaccaggagaacatggacccaatcctctgagcctcacccacaaagagaagacaaagggtggcctgtgcctccccgtcctcctgctccctagtggcccagggccccagggaataactggagtaggcaggcagtgtccccttctgtattttttagggactctcagcctcctggcagggttaaagggagagtactttaaacccatataccagctgtgcttcagtttctctcactttgccctgggtaagctgctgtagggtcagaagtaaccctttctgtgccagttgagaatgagcctgtgtggtagctgatgtcagaggacaaagctctctgcaagggctggacacagagctgcagagtcctgaacatccctcctttcaggctgcagaagggagaggcaatgaagacaggtgctccggaagcagcatcagggctcttggaggggactggtggggactcaggctgggtgcagcctccaaacagagaacggaacttaggtgtgtctctacagctaggcccagcctagcccagcccagaacaaacacccttcagagcctaaccaaagaacataagctgcaaaatgtgcacccatattttaagctgctttttcaggggataaatagtgtttggggacattgaaatggatgttctcaggttgtatttatttcggacaaataaactagagaattgtgtaaaaaactaaaaatc

SEQ ID NO: 15922 - DNA, 1566 bp, Homo sapiens
actatctgcttgttcatctgagtgtcggcacaaaccagcagaggcggtgacgatgctctcgggcatagaggcggcggcaggggaatatgaggactcggagctgcggtgccgcgtggctgtggaggagctgagcccgggcgggcagccgcgaaggcgccaggccctgcgcaccgcggagctgagcctgggtcgcaacgagcgccgcgagttgatgctgcggctgcaagcgccagggcccgcggggcggccgcgctgcttccctctgcgcgccgcgcgcctcttcacgcgtttcgccgaggccgggcgcagcaccctgcggctccccgcccacgacacccccggggccggcgcagtgcagctgctgctctcggactgccccccagaccgcctgcgccgcttcctgcgcacattgcgcctcaagctggctgcggccccgggtcccgggccggcctccgcccgagcgcagctgctgggcccgcggccccgcgacttcgtcaccatcagccctgtgcagcccgaggagcggcggctcagggcggccacccgggttccggacactacgctggtgaagcggcctgtggagccccaggctggggccgagcctagcacagaagccccaaggtggcccctgcctgtgaagaggctgagcttgccctccaccaagccacagctttctgaggaacaggctgctgtgctgagggccgtcctgaaaggccagagcatcttcttcactgggagtgcaggtagtgggggcagagaggaggtagggggacagtggtggggtgggatagaggaacagggagacctgtctaactttgcccctgtccaggaacagggaagtcatatctgctaaagcgaatcctgggctcactgccccccacaggcactgtggccactgccagcactggggtggcagcctgccacatcgggggcaccaccctccatgcctttgcaggcatcggctcaggccaggctcctctagcccagtgtgtggccctggcccaaaggccaggcgtgcggcagggctggctgaactgccagcggttggtcattgacgagatctcaatggtggaggcagacctgtttgacaaactggaggccgtggccagagctgtccggcagcagaacaagccattcggagggatccagctcatcatctgtggggactttctgcagctgccacctgtgaccaaggggctggacacagagctgcagagtcctgaacatccctcctttcaggctgcagaagggagaggcaatgaagacaggtgctccggaagcagcatcagggctcttggaggggactggtggggactcaggctgggtgcagcctccaaacagagaacggaacttaggtgtgtctctacagctaggcccagcctagcccagcccagaacaaacacccttcagagcctaaccaaagaacataagctgcaaaatgtgcacccatattttaagctgctttttcaggggataaatagtgtttggggacattgaaatggatgttctcaggttgtatttatttcggacaaataaactagagaattgtgtaaaaaactaaaaatc

SEQ ID NO: 15923 - DNA, 299 bp, Homo sapiens
gaaataataagcataaaaagatgacaatgtgcaacaaagaaaatcctatccttgaagccaaaatacagccagcaccactgtttcaacgttctattccatttcagccctaggaggcatgaagggaaaaccaggaatgaccagcaacccagacctcttgctccatctgtcattttgtgtggatattgttaatttcttccccaaagaattttgcctcctatgtagagcatagaggtcatctgacaggaacaaacagctttaatgttccttcatttggcactgaggacacacagtcctcagtg

SEQ ID NO: 15924 - DNA, 324 bp, Homo sapiens
atataatatataggttaatgtaaatgggatgacaccatatatactattttgtacgttttctcactcaaatatatatagtatatatttttccatgtcaatattttggtgtctgtaatgtattctctcttaatctcttgtatatcttgtcttttctccatctattagctccctcccacttgatttttcttgctttcatattaatgacaacaaccattatcttactgtcaccctcaactgctttgcctccttattgaactgcccttcccacttagcaaaaccccaactctggattactctaactctctgccttattctcttttttta

SEQ ID NO: 15925 - DNA, 320 bp, Homo sapiens
gaacctaaggaagagatacccacattagaccctgagaggttcagggagtggaaaacaattaatgttctttgtcctttagatcccaaaccacagcttggcaaaacaatcattaagcagtagttgtgacttataactgacctactgctgggttatgaaaatagatgtaaagtcatgtggacgtgactagtcctgaaatgttctgatgcctcagaagccatcagtggtagctcctaacgtggagttccacatccctgccctatacatgtagaagatgtataggccagcactaacttgcttcaggctaatggatacaaatttat

SEQ ID NO: 15926 - DNA, 285 bp, Homo sapiens
cttcaaacaataatccactcagcagatatttagcaaacatctaccttatatgaaccactctcctgagcactggagctacgctggtgaacagagaataaacagcctcatctctcataactatcgtgtttggagcaagtaccaaatgccaagcactgtattatgcattctagaagccatctcatgcaatcctcacaaaaactcaaaaaggtggtgttttacagatgatgaaactgaggttaatcatttattcattcaataaaccgttattgagcacctactaggtgc

SEQ ID NO: 15927 - DNA, 439 bp, Homo sapiens
ggctctgtgctggcagtttcagggtcagtgtgctgctttcctagggacattagaagggcgcaggagtacatgtctgcccattcctttggagtatcgcagatgatgctatacgataccaagtgttaccgctcacagagactgggaaagggaaatgggagtaaccgaaagccagatggaacgaaagcaaacatggaaaccatgatcacggcaaagagccatccttgtatttaagaagtaactttggccaggtgtgatggctcacgccgtaaccccagcactttgggagaccaaggagggtggatcacgaggtcaggagatcaagaccatcctggctaacactgtgaaatgctgtctctactaaaaatacaaaaaattagccaggcgtggtggtgggcacctgtagtcccagctactcgggaggctgaggcaggagaatggc

SEQ ID NO: 15928 - DNA, 231 bp, Homo sapiens
gcgaagccccgtgcaagaaaatccaaaaaatgagacaagaagtgaagggagaaatattcaaggaaatagatagcttgaagaaaaaaacaataaaaaattcgggagactttggacacacttttagaaatgcaaaatgctctggaaaacctcagcaatagaattgaacaagtagaagaaagaaattcagagctcaaagacaaggtcttcgaattaacccaatccaacaaagac

SEQ ID NO: 15929 - DNA, 435 bp, Homo sapiens
aggagcacctgtttttctcccttgaactaagacttagctaatcttaatacattttcaagtgacatccagatttatcaacaacctaggacttgaatacagtcctctgtattcaacatggttatttctctcaaccatggctctttgcttttcatcatgctgcacatcaaggaaataaccctcattatgctctcatcttccatccctctgctttgtcgtcatgataaacaacaacttgataatatttaatcccagttcatcataggcttcatgcttttagtctgctcttgaatagtccacaactatttcaacatggtggctccattggacatatcatgcaccaaacacaagaggccattgtagatagagaaatcagggacttattaaaacctggagtctgaaaacctcatcttattctacccactagttaaaaaaaaa

SEQ ID NO: 15930 - DNA, 305 bp, Homo sapiens
ggtactgcttctaaggctcaaacagcttatttgctacaattccttgttctcatgatttttgagggggttctattacgggggtggggaattttcaacataaaccatacctttaaactgagattggaaaatcattagctgatgtttattgtgttagtctttaatgattttacagtataatctttgactcacacagttataaatcaaagaataccaagttcaaggatattgatgggaactagtttgcataatattgctttgtaaccttcacaaaaataaaatgtaattattaatgtcattattactga

SEQ ID NO: 15931 - DNA, 283 bp, Homo sapiens
atatatataatatcaaaagatgtaagttgctacatcaaaaataaaaagggtggaggaaataggaaaaatgtgtagagtttttttaatgcaaagttaaattgaagtcaactttatgaagcctcttgtaactctcatgtttatgtcagtctcatggtaaccattaagcaaagagctatagtagtacacaaaagaaaaatagtgagcaattatagcacaccactaaagaaaatcatctgatcacaatggcagacagcaagagaggatgaaagaaaaaaggaaatac

SEQ ID NO: 15932 - DNA, 271 bp, Homo sapiens
ggccactgccctgctggaacccccagggctcccctcacacgttgctccctcccctgtccagccctgtccctggctgccctggccccggccgctctctatccagggccgccaagcacagttccccagggcttctgcctgggcctccctgtcccagacctccccatggccatcagggcccagccagggcatggcctcctcagtgaggcgcacagaccactgcatctgagggttcccacctcaccccatccctctgctgccaccctgagaccgt

SEQ ID NO: 15933 - DNA, 787 bp, Homo sapiens
agagattctggccacatataatggcacatgccttggtctcattggtgtgccattcccacagatcagcgaaatactgcctgctacacccctgaacatttccactctgccattgctggcgaacccccactctcagagagcaggtggatttctgacatccaggaaaagctgtgacccagtgcagcgttgagtctcaggctcctgggtctctggggactggaagagaccagaagccttaacaattaccctaggaaaggagaatacaatccaggctcatctgctggagctgcacgcctgctccccccttccctgcaggggcctccccagctccaccaggcaacccgttgttctgcagctgataaccggattaggcagcagaatggggcagatgagtaccctgaggggccctgcctgggaacaggggctccctggcctggcgtgagggctgccactgtcaacaccctaagccgctgcctcctgcagggcatttgcatgtgtgtgcgccctactgtacgcgcccaagagccagtgggaaatgccggcggtggcagttcacacggggcactgctgcacaaagccccaaggccaagcggcacggtggccctggctggcgaatgtcgcgcacccagtctctcgcagcagcgcctggcgcgacgactgctggaagccgggccaaacgcagtctttgcatgagtgtggccctggctgtgggagccgaagcacagccaccacgcgcgccggagcgcagggagagtcgcctgcatcgtccaaccctcctcttaaaaaaaaa

SEQ ID NO: 15934 - DNA, 211 bp, Homo sapiens
atgacataatataattccaaagtatgtagtttacgtttaaaaatgcatttttgaaatagacctgattgctaacctagctaactaatgcagactctacttataatgtgcgactaagggttcaagatcatagaaataatatctgtaatttctattgatgttttgggattgaaaagctcagtcgaatataacaatagtagtaactttacttttg

SEQ ID NO: 15935 - DNA, 454 bp, Homo sapiens
taaatttattatatgctaaagaataaaactccagttagatttaaaaaaatcccatttacaagcattgcacctttaagaagaaaacaaatatgacagtatggtagctatacttgtgatgtctgacgcatgatggcctatggttttaaaaatagtattgtggaatatatttttgggtaataagaatggttgagtgcaacatcatgtattaatatcaaatgaaagacaagggtgctgtatctttgattatttatcaaaaaagtataaatcttttaaggaaaatgttagaattttaaagtttttttttgattgttgaagcatttatcttgttgatttcttacaaaagaaaaaggacgatgtcagtcaagcagcactttttcagaatatacagaacataaataatatgatgtggttgagtgttaacataataaatcatatacagtatgacattttaagg

SEQ ID NO: 15936 - DNA, 366 bp, Homo sapiens
gggaccaaggaatttggggtgaacttactatgcttttgggttgctctgtagagatctgcagggaccagcccagtgaaaacaaaaaggttcccctattccctccccagcagccctctctgtggcctggagggtttctctggaagagggcagtgcctggaggggagcctctggatagtgatgtggaaatattaacaacagagtcaaagcgggtattttggggtagtcggggagaaaactgtgacctctccccccaatgatgtaaaatctttatcaatgatggaaactgttgtgtctcattaaaagggttttgaggtggaaaagcagctgccgctggatcttaataataatatcaaactgctaacctca

SEQ ID NO: 15937 - DNA, 449 bp, Homo sapiens
gccaccctctgaacttaaccttctgtgttctcgctccactccttcaggctcagtcagctctgcaaaacccaatccactttccaaggaaacatttctggaaggcaacacggaattagttaatgtgatgagaggcagaacagagcagttaagatgcaggctctgcacataccacaacgtggatgaatctcacttaatgttgggtgagaagagccaggcccaaaagagcatctattgtgtgaatctactaactcgaagttcaagagcaggcaaaactaatctccggtgatggaagtctgaacagttacatctgctggtggtgttgcctggagacacgtttcagagaatagaaatgttctctgccttgatggtggtggtggttacggtggttgtaaacataatagacactcacaacactcacagagctatacacttaggattcgtcacctaaa

SEQ ID NO: 15938 - DNA, 1089 bp, Homo sapiens
gcatgtatacatgtgtgtgcataaggaacatccgtccatctctagctgtcatgtctgagaacattaataaaaggctcgacctcatgcgcctgcaagtgatcacaagacagttactgaagcattcaaagaagcaatgtctttgtcatctgactcattttgaaaacgcatgagaatgctttcccaaggcaatttcttacaaaatacaccgtgggacatttttcctatagtttattgttgttgatgatcatcgagaactttgtacccagagacactctacactgtgagtgtcccctgatattccctcccactcagcctgatcagtggtatctgacctccaactactcgctgcaacaacccgttctctagctgagtgggcctggactttgaacagaattaacagcctggaagtggagttctcaatctcaacagccccttaacctcatgcaaatttctttttgagctgaaaagaacaaacagaatgccaccttttaaaacaaccttcttcgaaacatggggggaaagtcaggttttatataaatcagagagatagaaataaggcccataataaaaaacttgaaatagatttgggaagtttccgaaacttccaaaaactagtggtccaaagtgggcaatattttttgtgtgcattgagaggcccttcctgtttccttggtccatgctggtgtcttgccccgttccaggaaccctgggctcccctgtgctgagcagcccccacacctcagcccaaagcctcaccccttgcctgaccacaccccatttcttttggcacagcttcccagacttacaagatgtcttgaagtgactgaatggagttagtgttcggcaggactggctaggtaactactgggacttggtgcagaatgtagatgtagggctccttgttcaaaaattaggaagaatttcaagatagccacagcagagcattaaaacaaacccaggttggctaggtgtggtggcacactcctgaaatcctagcactttgggaggacgaggcaggcggatcgcttgagctcaggagtttgagaccagcctgggcaacatgacgaaaccccatcgctactaaaaaaa

SEQ ID NO: 15939 - DNA, 502 bp, Homo sapiens
tttggataaaacatattgtgtagattgaactttgcaatattgttttattgtaggcattccattcatccacctggctgcagaaccagtttttatgggatttaaagcttccataaattggaggaatgctgtttgagaaaaataatacaaaattataaatataatatcagttatagggccttagaagggacagctgcaaatgagatactttgaagtttctgtttcattagctttggtgtaaatccacctctacctccactcattcattcatttgcttcattcaggctacagacacttattgagcatctactagatgccaaattctgtgctgctgctacaatccattgagactttaacacccacatggaatacgcaattgggagagagtgaaggagtactgaaggcaaactcaggggctacacttcacaaaaataggagatttggaatttacaaagaagaagaggagaaagaggaggaggaggggaaggaggaagaaaaagaagag

SEQ ID NO: 15940 - DNA, 314 bp, Homo sapiens
taatctgtgtgccacccacaggataatatctccatctgaaagtccttgaccctaattacatctgcaaaatccaatttgccatataagataacatagtcagaggtgtaagcgattagtgtgtggacatctttcaaggaaggatattattcggccaaccacagtgataaagatgcatcaataatttcatcagtatgaagcttcacaaaatagggccagacagggtggctgatgtctgtaattccaaagtgctgagattacagcatgagccaccgtgcccagccagaactctgtaatataataacacatattttgac

SEQ ID NO: 15941 - DNA, 1289 bp, Homo sapiens
taaaattatgaataatgctacatcaaaaagcaggttacaaattcatgtttactatataactatttaaagcaaatgaaacactaatagtcaaagtttaggatgaaaactaaatctaaaaggaaatataacaaaatgccaattatgcttggtttggggcattgatgacccttcttcccacttttctatattttccaagatttctttattgaatatgttttactataaatattttctaaactcatattttcactattaaaatttttttatttttccaaactttaaggcatatgctctttccacattcctcaacattatttgcaaacatcatgaaatgacacttccatcaacattcaatgaggaaagtagtgatatagatgagccaaaaagagttttatataaacttatacaatctaaactcttgctcttcctttctgactcctgagggtgagtgtgatggactagaagaggtagccttaaaataagtgagcagctagggaacatgctcaatgggcaagagaaaatgaccactgaccagtcaatacctgtgtcagggggagttaccagtacctatatttatttttaaagtaattaaaaagtagaacacttacaaattttccacctatacatgccatgtcttcctcggggacagtagccacatcttatatatttcccaccatgcataggacccagcacacagtgaagccagtaggcactcagtgttgaatgctcataccaggttttctgcttcctgtagttaccctgctgagcactgcttccatcacaggtgcactgggcctcaacacttctgccatttccccatttgtctcctccatggacactgtcaacaatggtctgtcaacacctgctctgtgccaaagccagggagtaggctggggggatacggaagagaatatctttctccttgatgcctgctgtgccaacagccccctttaagccttgttcacagcctttgctgaaacaagcatcttgaaagcaagccatgttatacaccgcatgaccttcatgctctgggcccagctgactgaactggggcaggccccagagtcatgggcagcctattgtcttgctaatggcctctgacttagcctggagtaaaacactgtccaaacaagactggtggttattcaagcataagaatttgaactaggaagccaagaatgaagcaaccggaccattaccatcaaaaaatgattaaaggatgaagaaggaagccaacattcagagagtatctggttcatgttaataatggtatcatattaaaaggaaga

SEQ ID NO: 15942 - DNA, 505 bp, Homo sapiens
aattgtcgtcctgactggttttgtgatggtcttcaccctctttctcctctatggcctgtctttggtgagttggttaatttcatctaagtcttttattctctttctctctctctactgccaataatttatcactaattctggtctcacctcttttgttctctttgtagtatttgcatgaaacagtgtctaggggtggaaaaatataaaatatacttttataatataaaattccttttttgtgctactgttctcacagaattatataccagctgaagtctttctcttttctcagataactttagctttcctgatgagtgtgttgataaagaaacctttccttacgggcttggttgtgtttctccttattgtcttttgggggatcctgggattcccagcattgtatacacatcttcctgcatttttggaatggactttgtgtcttcttagcccctctgccctcccttcattgtactttatcattaaaaatcaacttccaaaaaaaaaa

SEQ ID NO: 15943 - DNA, 449 bp, Homo sapiens
gtagcccccaggactgggaatgactaccacagcaagtcatagccaatctagattaacacgtacatctggctgggcgtggtggctcaaacctgtaatctcagcactttgggaggccaaggcaggaggatagcttgaggctgggagttcgagaccagcctgggcaacatagtgagaccctgtctctacaaacaaaaacaaaaacaaaaacactgcatacatcctcatgagtaaattttggtaatttgtgttttccctgaaaattatctatttcaggtagatttccaaatgcattggtgtacagttgtacttagcataatttaaaaatttctgtaatggtggatagaaacctctctctcatttgtagtcttgtgtgttttctcttcttattacttatttttatcggtattttcaaataaacagcacttggttttatcaattttacttcctct

SEQ ID NO: 15944 - DNA, 573 bp, Homo sapiens
gagactctaatgccacagctgatctgacaggaggcggagctcaggcgataatactccacctgcagctcacctcctgctgtgcggccgggtttctaacaggccacggaccagtaccagttgtggacccctgctctacagcaaattaacacaaatttagcagcttatcttacagtttctattggtcaggaatttgggtatggtttagctgggtctttcctcaggttctcactaggctgaaattaaggaatcagccggggctcctatctcttctgaggctctgggttctcctccaggctcaccggttgtgggaagagttcaattccttgttcttgtagatctgatgtccctgtttgcttgctggctgtcagccagggaccactttgagctccttagaggcccacccccgccaccatgttcttgccatgtggccaagttattatgttgtgtatgactaaggaagaaaaatgctggattaaaatataagacaaattcttactttatgtatgactaaggaagaaaaaatgttgaattaaaacatgatacaacacattattgcttggacagtgccttgca

SEQ ID NO: 15945 - DNA, 467 bp, Homo sapiens
taaatagaatcttgctcggctgtctaggctggagtgccatggcacaatctcagctcactgcaacttccgcctcctgggttcaagtgattctcctgccttagcctcctaagtagctaggacttagaggcacgtgccaccacacctagctaatttttgtacttacagtagagacggggtttcgccatgttggccaggctggtctcgaactcctggcctcgggtgatctgcccaccttgacctcccaaagtgctgcgattacaggcatgagcgtgagccactgtgtccagccagccaccgcgcccagcccacccagcctctttcaccaatgtttgatagtttaatatgtacagatctttgacctctttgattaaatttattccgaagtattttgtgttctattaaaaaatagaaatgggatagttttgttcattatctttttcagacagtttgctgttggtatatagaaa

SEQ ID NO: 15946 - DNA, 430 bp, Homo sapiens
ctcctgcatggggcttccacagattgggcaacccacgtggtgacgtgagtaaaggatgtaagaaggaaaacaaatcagcgagaagatactgccccttacccccgcttaaagaggagacacagatgccctgtgaacacctaccagttggctgacacctggggctcagataagtcctctctggccctagtttcatttctttgaatgaaacagctctatgagagctctcttcagagtttatatgttctcgacactgttcctagccagtggcaatgaataaatcaacctatactaattgaaaattagctgtgggcaaaccacagtatgaaacactcctgggcaccatggaggattccagaaaggcttggtccttgcctgtaagaaactaacaatcgaataatgaaaataaacagaaactcttaactcttaactg

SEQ ID NO: 15947 - DNA, 495 bp, Homo sapiens
ctcctgcatggggcttccacagattgggcaacccacgtggtgacgtgagtaaagtcaataagcactattcttagtattgggatacatcaatgaacaagagacactgtctataacctcaggatgtaagaaggaaaacaaatcagcgagaagatactgccccttacccccgcttaaagaggagacacagatgccctgtgaacacctaccagttggctgacacctggggctcagataagtcctctctggccctagtttcatttctttgaatgaaacagctctatgagagctctcttcagagtttatatgttctcgacactgttcctagccagtggcaatgaataaatcaacctatactaattgaaaattagctgtgggcaaaccacagtatgaaacactcctgggcaccatggaggattccagaaaggcttggtccttgcctgtaagaaactaacaatcgaataatgaaaataaacagaaactcttaactcttaactg

SEQ ID NO: 15948 - DNA, 465 bp, Homo sapiens
gcattattttgtgggacaaactcacctacccttaatggcatatgaggtcaagtttctctgctgaaaacaggtgcttgttgctggtgccattctgcaagggctggatgggacaagtctggggcattcccccttacccccgcttaaagaggagacacagatgccctgtgaacacctaccagttggctgacacctggggctcagataagtcctctctggccctagtttcatttctttgaatgaaacagctctatgagagctctcttcagagtttatatgttctcgacactgttcctagccagtggcaatgaataaatcaacctatactaattgaaaattagctgtgggcaaaccacagtatgaaacactcctgggcaccatggaggattccagaaaggcttggtccttgcctgtaagaaactaacaatcgaataatgaaaataaacagaaactcttaactcttaactg

SEQ ID NO: 15949 - DNA, 456 bp, Homo sapiens
ccagaggtcacagagctaggtacacagatacaagcggaacccggggcttctccatcccagcctagggttctgttagatactgccgtttttgcatcatggatttaagtaaccagatttagttccatgttttctttaaaaaaagaaaatgctaatcaagaataaagatgaggccggatgtggtggctcatgcctgtaatcccagcactttgagaggcagaggcgggcggatcacaaggtcaggggtttgagaccagcctcaccaacatggtgaaacctcgtctttactaaaaatacaaaatttatccaggtgtggtggcgggcacctgtaatcccagctacttgggaggctgaggcaggagaatcgcttgaaaccggaaggtggaggttgcaatgagctgagattgcaccaccacactccagcctgggcaacaagagtgaaactccatctcaaaaaaa

SEQ ID NO: 15950 - DNA, 2129 bp, Homo sapiens
  misc_feature (1867)..(1867): n is a, c, g, or t
  misc_feature (1939)..(1939): n is a, c, g, or t
  misc_feature (1965)..(1965): n is a, c, g, or t
  misc_feature (1968)..(1968): n is a, c, g, or t
  misc_feature (1977)..(1977): n is a, c, g, or t
  misc_feature (1993)..(1993): n is a, c, g, or t
  misc_feature (2009)..(2010): n is a, c, g, or t
  misc_feature (2050)..(2050): n is a, c, g, or t
  misc_feature (2065)..(2065): n is a, c, g, or t
  misc_feature (2128)..(2128): n is a, c, g, or t
atttttttctgtaattaaaataagtctgtatgaattagcatatgagtgatcagataatatctaaccagttgaagtttggaagttcctttcgtttaaacaaaaatagaatttcagcaccattttcatttattgattcttcttttcctgtatttcacagtttttaaaaatgtgtttgaagtcaccaaaaatatacttctaatgctgtgactaaatttgccacaattaagacacccaagagtccatcagggttaaagtaggctacaatatgtttacaaggacaggcaaaaggtgtcagtgtaattttattaggaaagtgaaaaagagaagtctatgggcagtcaggaacaagctgagttatttaccaaaaatatatggtaacttctcttttaggtgtgtagtgtgtatctcaaagaaacacatgttagttcacaaggatttatgattttttgattaatcagaaatccattcaaaaaatttatcagtatttctcaaagagaagtgctgtctgtagacaccatgggcacatgaagtaaaataatctgtgaaaattctttgtcttgtaaaaataggagtgccaatctgatcaatgtattgtgttataccagctgtgtgggtgttacagaatgaattttggtctcaattttgtaacttacagaaaagctataattgcagtctctcctgcccacttgtatggtcaactaattttaaccatctctaaaaggcacttgcaaaaagggaaaaatgcccaattcttgggtgcatgggcaaaatatacatatagaaatgatagttcatgaggaccagatattctgaaaaccttctcaccatggtagactagatgcagaatgagtcagagaaatgtattttataactatattgctgaacttgtaagagtagaggaaaatcctcaaggggcagaaagaccttataataatttgaaaccaaagaaatgtgctaaaggagaccaggactgtctcaatagcaatgcccatgtaaggaactcagaacttaaccactatggaaaaagatgactaggcctggggtttggttgcagttggaggacgaaactctttcacaaagctagcacattcaaaggggctaccccctcagagaaagtcagagctgaaaaaattagcctaccaagaaaggaagcagatgggaaaatgtgtctgcttttgccattgctctacatcaaggaaaaatagtagtcatcatagtcatcttctctcctctcctaaccatttgtgactataagcttaatgttggatgggcatgcagtataagtatacgctacttgccaggtcatggaaactacatttaaaaaatgtagataatttgtttccaaattggtggaactctgtggcatttggtagagataagcataaatctggagcaaagcattaacaaaatcgtgtcctaaggattcctacagattcaactgatatgaagtcatcataaatacttacacacacacacacacacacacacacacacacacacacacacgcactctctacatatcacacatacactctcagggaagcaatgaaaaattaccaaacagggaataacataagccaaaatttgcaagactcagcagaaacaagaaacacagatctacatcccccatgccttataacattggggtgcagaatactgcatatagaaaaatacatgtgagctatatagagaaaaacgttgagcaaagagtcagcaaccatcaaaaacaaccagaaagatctgaaaaataatagaataacaagaaatgaaaaatataatcattgcaattaaaatttcagtagataggttaaaagggtattacacataaatgaagagagagtaagtgggccaggaacagtggctcacncctgtaatcccagcactttgggaggtttgcagtgggtggatcacttgaggccaggagttcgaggacagcctngccaacatggtgaaaccccatctctnctnaaaatacanaaattagctgggcgtngtggtacgtgcctgtnnttccagctactaggaggctgaggtgggaggatcactttgngcccaggaagtggangttgcagtgagcctagatggtgccattgcacttcagcctgagtgacagaacgagagccttccnc

SEQ ID NO: 15951 - DNA, 224 bp, Homo sapiens
aaacatcaccaccaccaccaccaccaccaacaaaaaaacccgtagacttgtccctgttacaggcactaggaacacagcagggaacaatcaaaaagtccctggtctggccaggcaaggtggctcatgcctgtaatctcagtacttcaggaggccaaggcaggaggatcacttgagcccaggagttcgagactagcctgggcaacatagcaagacccccgtctcta

SEQ ID NO: 15952 - DNA, 665 bp, Homo sapiens
  misc_feature (1)..(3): n is a, c, g, or t
  misc_feature (6)..(7): n is a, c, g, or t
  misc_feature (9)..(9): n is a, c, g, or t
  misc_feature (143)..(143): n is a, c, g, or t
nnnggnncnagaagctgaaggttgccgccaggctgtagggcctgcttgttctatatggggccctatgaaagttgacagatgctgttaattgtatacagccttcagctgctctgataaggagcccattcatttcctaagccaanttaaactatgccttttggttatgttgccttcaaactctgttgaaatcctctggcagcattccaccagttgagaagcttcattgttttagattataagaataatttgaatgaatataacagaggcactgtagatagaatcccagatatttaaaggaaaacatgcctatattttaggaatatcttctgaagaacttcataattttatttgaagtgtttgtaaattttttaataaattatttaaatgtatcaatagtggatagttggaagaacgtctttgaggctaaaaagtagtactctgaaattctctcaagttatattatttgtctgttagaggtccacgaatgaaaatatatgtagctaaaggagtaaggtgctgcccaatttggaacccaactgacctctaggatctatgaagcagagaatattaccacaaacttctgaaagaagctgttgacctcgtttcttaatttaaaatatgttgccacataaatactaataaaacatagttgctcttcatctctt

SEQ ID NO: 15953 - DNA, 736 bp, Homo sapiens
  misc_feature (1)..(3): n is a, c, g, or t
  misc_feature (6)..(7): n is a, c, g, or t
  misc_feature (9)..(9): n is a, c, g, or t
  misc_feature (143)..(143): n is a, c, g, or t
nnnggnncnagaagctgaaggttgccgccaggctgtagggcctgcttgttctatatggggccctatgaaagttgacagatgctgttaattgtatacagccttcagctgctctgataaggagcccattcatttcctaagccaanttaaactatgccttttggttatgttgccttcaaactctgttgaaatcctctggcagcattccaccagttgagaagcttcattgttttagattataagaataatttgaatgaatataacagaggcactgtagatagaatcccagatatttaaaggaaaacatgcctatattttaggaatatcttctgaagaacttcataattttatttgaagtgtttgtaaattttttaataaattatttaaatgtatcaatagtggatagttggaagaacgtctttgaggctaaaaagtagtactctgaaattctctcaagttatattatttgtctgttagaggtccacgaatgaaaatatatgtagctaaaggagtaaggtgctgcccaatttggaacccaactgacctctaggatctatgaagcagagaatattaccacaaacttctgaaagaagctgttgacctcgtttcttaatttaaaatatgttgccacataaatactaataaaacatagttgctcttcatctcttaaatggatcattccaactggttttacatcgttgaatattatctagtatttttaataaatattttcataaat

SEQ ID NO: 15954 - DNA, 278 bp, Homo sapiens
tcttactaaatagtctgtcgtattaattagactgggtagtcctaactcaagaaagcatttggcaattaaaagatggaggactcagggtctgaccgttttccttggccttcatttggctttctctctcttttctcccctccttcttcccaggcctggctggctggtgcctggacaccatttggggctctgagagggttgtggctgccagcccccagtcgccaatgcctggtcaggcactcgtatcccctgtcctgttcaccatttctcctttctcattg

SEQ ID NO: 15955 - DNA, 420 bp, Homo sapiens
ttttgtcatggaggagctcgactcttcaggcaccagtctcaagagaaggtcactttgtctctttataggaggtgtggggcagggatccccgaagccaggacaagagtctccttcaggatctgctttgggttcaatcgagttgggcgagcaaggccccttgtgtctatggagtgatgggcggcctcaataattttagcatgggacaatgccaaagtgctcacttaagccatcaaagtgaattttcagtaaagcactcatggatagttcagttgtctgatgtactctttaaaaactgagtaggtgtctgaatgaggaaatgctgtgtagggtcatacttttaaagccggctggacagggagctgtcttccacaagcgatggctcttgctttaaagtaattgctctatagtcctgtttcattt

SEQ ID NO: 15956 - DNA, 130 bp, Homo sapiens
ccaccaaaatgacatattaaggtaaatagtgggacttttttcattggagaattttaagagaagatatcattgccttccaattatggtttcatatctgttctccccaaaggcatgtgtacttaaaacccct

SEQ ID NO: 15957 - DNA, 381 bp, Homo sapiens
ctccaaaagggtgcatccactctgttggctgcaaggctgccatctgttcacagctagcatgccagcaccggggagcagggcaatgggcatatccccaagttaaatctccaaagaccccattgtttttatctaaaatcagcagtttttcttggataaatgagtttgttcgttccctgcctttggttacttagttcaggaatggttgattttaatcgttttgccaatatgttaacctaattcctctctgtcattccagaagtcccacccccttatgtaaagtttcttgctcatttatctcaaatgttttcctataaaatttttatgcgctgacacaaaaacttttacatgattgtttattacagcattattcataatagccaa

SEQ ID NO: 15958 - DNA, 492 bp, Homo sapiens
gtctttatttaacaacatctcataaagtaagactttctggatagtatcaatgacattgactttttaaaagaagggatttcttctctcatttgggaggaacatgacatataaggtaaaaagtgtaaatgcctccacctgattgagatatgtgacgtcacattattcccatagctaaacatttaagagcctgggtacagtggctcacgcctgtaatcccaacaatttggaagcccagcaggaggactgcttgaggcctggaacccaagaccagcctgggtaacagagcaagaccttgtctctccaaaaaatttaaaaatttagccaggcgtggtggtgaccatctgtagtcccaggagctgagtcaggagaatcacttgagcccaggagttcaaagttacagtgagctatgatcatgccactgcactccaagcttgaatgacatagcaagacctcatcttctaaaaaggaaagtaaaaacaaacaaaaatattt

SEQ ID NO: 15959 - DNA, 190 bp, Homo sapiens
aaaaaaaaaaaaaaaaaaaaagaaagccagacatggtggtgaatgcttatagtcctagctactcagggggctgaggtgggagaatcacttgagcccaagagtttgaggctgcagtgagctatgatcaagtcaaaacacataatagataaaatgtaatattaaaaaatgttcaagtaacccaaaaggagat

SEQ ID NO: 15960 - DNA, 201 bp, Homo sapiens
catatgaactatcaggaaattatttggacattcaaaaatattaaattttctataatacaaccataaggacaccagtaagtgaacagagcataagattccaaaaagagaagtaagcagaagcatctgttttttagggttacatttttatgatttcagcaaataatatggtaagaagagtttcataggatatatattttttaa

SEQ ID NO: 15961 - DNA, 344 bp, Homo sapiens
tgccccaccaggccccacccgtctggcttgtggcctctggagaatccactcctaccccaacccccaccccatcccttcactgctcctggagacacctcactgctggatgtgggactttaggagttccacgtcccacggaaattggcattttaaacagagacaacgggaagggaatactaggaagacaaagaaactagtccataggacagatgttgagttctcatgcagtgacaccagcaccccaggtgctgatgaccaaccccacccgtgcctccactcggagcacatcaacactgcccagctttccagcccctgctgtcacctgccagagcccccagtgttca

SEQ ID NO: 15962 - DNA, 597 bp, Homo sapiens
attttggacaaaatcttaaatgatgagtagaatttagagacatagactgaaaaagcaaaggaggatggatagtccaagctaaatgagcatcatgaagaaaagtacaatatcaggatttagtttaatatgatagaacattattggtaaggaaggccggttacaactaaagaggaataattgaaaataggcttattggtaaagtggagtgagatgaaaacaagaagagtttaaactcagtgtagaagttgggtccactgttgatctctttccaaattctctcaccaggatcacctgttaatatttgagatttggaatgggggttcatacaaacagccattcaactcactccagagaatccatcatgatttcttagtttggtagcataccacagtggttttcagaggccttctgtatagccttaataattatatatcactgttagatttgtaaaaagtgggtcaacagggacaaaaatcaaaccaaaccaaacaataggctgaaatttattcccaaaaccatagctatgtaattaagagaaaaacacaagaggaatatgaagataatgaagacacccgtttttgtgtgtttttcacccca

SEQ ID NO: 15963 - DNA, 1361 bp, Homo sapiens
gtcgggcgccgcggggcggaagacgagggcggcgaggtcgggttccgggcgcttggagaagatggtgctgcggcggctgctggccgccctgctgcacagcccgcagctggtggaacgtctgtcagagtcgcggcctatccgacgtgcggcgcagctcacggccttcgcactgctgcaggcccagctgcggggccaggacgcggcccgccgcctgcaggacctcgcggctgggcccgtgggctccctgtgccgccgcgctgagcgatttagagacgccttcacccaggagctacgccgcggcctccgaggccgctcggggccaccaccaggtagccagaggggccctggcgcaaacatttaatcctgggctgtgcggggccgaggctgcttgcttttccttccgggctctacagtggcatcaatgtggaggggtcattccgggcactgcgcgcggcttcgaatcccgactgggattgttggcctgcagacatcccacgcataagagcctaggccagaccgcccgctccgttgaagtcttgtgattggacaagacacagtgtggagaaagacccctaagcctaacagagatgaaggtaggctgggtccagacacggcacctacggagagccacggaccgaagccagagagcctttcctctgcaagtgggactgaaactcttgacagatgctgctcaatctgactggtatagcaggacagttaattccagggacgatatggatgaaaagacaaccctacagctgccaaattcctttgattaaatgtgtgagctggttgataggcatgagtgtgatacttctcaggcaagatgtgttaagaataccggggactgtaggcctatggtaataataaacacgtattttatgaaatgagtcttctgtgctgggacttgctcattgcactctatgtgttatctcactccttacaacgacattcacatgaggaagcagattactttttggatttttttgtagagatggggtggtctcgaactcttgggcgcaagtgatcctcccgcctcagcctcccaaagtgctgggattataggcaagagccactgcgatggaaacagaggctgctgcttaagttgcccaaagtcttgcagagtgggatgtgagcagaggcatttgactccagggcctaagtccttaacacagctctgcagcatttaccctgatactcaaccccttccttccccaaccccccaccatcaggcattaagactactgcctaggggcagggcctggtggcagttgtgtcttatcccagccactgcagaggcaggaggatcgcatgagcctgagatgagaccagcctgggtagcatagcgagaacctttctca

SEQ ID NO: 15964 - DNA, 881 bp, Homo sapiens
gtcgggcgccgcggggcggaagacgagggcggcgaggtcgggttccgggcgcttggagaagatggtgctgcggcggctgctggccgccctgctgcacagcccgcagctggtggaacgtctgtcagagtcgcggcctatccgacgtgcggcgcagctcacggccttcgcactgctgcaggcccagctgcggggccaggacgcggcccgccgcctgcaggacctcgcggctgggcccgtgggctccctgtgccgccgcgctgagcgatttagagacgccttcacccaggagctacgccgcggcctccgaggccgctcggggccaccaccaggtagccagaggggccctggcgcaaacatttaatcctgggctgtgcggggccgaggctgcttgcttttccttccgggctctacagtggcatcaatgtggaggggtcattccgggcactgcgcgcggcttcgaatcccgactgggattgttggcctgcagacatcccacgcataagagcctaggccagaccgcccgctccgttgaagtcttgtgattggacaagacacagtgtggagaaagacccctaagcctaacagagatgaaggtaggctgggtccagacacggcacctacggagagccacggaccgaagccagagagcctttcctctgcaagtgggactgaaactcttgacagatgctgctcaatctgactggtatagcaggacagttaattccagggacgatatggatgaaaagacaaccctacagctgccaaattcctttgattaaatgtgtgagctggttgataggcatgagtgtgatacttctcaggcaagatgtgttaagaataccggggactgtaggcctatggtaataataaacacgtatttt

SEQ ID NO: 15965 - DNA, 961 bp, Homo sapiens
cttaggctagtagaggctggtttaatcggccgaggagaagatggtgctgcggcggctgctggccgccctgctgcacagcccgcagctggtggaacgtctgtcagagtcgcggcctatccgacgtgcggcgcagctcacggccttcgcactgctgcaggcccagctgcggggccaggacgcggcccgccgcctgcaggacctcgcggctgggcccgtgggctccctgtgccgccgcgctgagcgatttagagacgccttcacccaggagctacgccgcggcctccgaggccgctcggggccaccaccaggtagccagaggggccctggcgcaaacatttaatcctgggctgtgcggggccgaggctgcttgcttttccttccgggctctacagtggcatcaatgtggaggggtcattccgggcactgcgcgcggcttcgaatcccgactgggattgttggcctgcagacatcccacgcataagagcctaggccagaccgcccgctccgttgaagtcttgtgattggacaagacacagtgtggagaaagacccctaagcctaacagagatgaaggtaggctgggtccagacacggcacctacggagagccacggaccgaagccagagagcctttcctctgcaagtgggactgaaactcttgacagatgctgctcaatctgactggtatagcaggacagttaattccagggacgatatggatgaaaagacaaccctacagctgccaaattcctttgattaaatgtgtgagctggttgataggcatgagtgtgatacttctcaggcaagatgtgttaagaataccggggactgtaggcctatggtaataataaacacgtattttgaatgaacaaaaaaaaaaccgggcacaagcgggcgggaaaaggttaatggctgtttaatgtcggacattttgtcagggaaagggccaaaggagaaaaacaa

SEQ ID NO: 15966 - DNA, 831 bp, Homo sapiens
tatttccagcatttggtacagtatctcactgcctggtgcttactgtgtgctcaaatgtttattgattgaaagaaaactatattattgtaagttccttgaaggcagagacagtgtcttatctttgtatctctgatggttgctagtgaacattaagccctcaatatttgtttaatcagtgctatcaaagtggtttaaatggatgtagtctccaggggtctctgagctttttgatgttttaaaaatttgctatttaatttggagctaggaaaaaaaattaagtatatttagaatcattccggatgactaccattttataccaaatgttgccatgagatttcagtgcaagtacttgaatttgtgtcagatgtttatgttataaacacacagagaggtacagtttattgtgaagtttttctaaatccaaacctccaaaggaaaatctggctctatctattacaagggtttagacattacttgcttttgagagactgcttacatgaataaacactattcctgaagtctgacctttacatgctacttgaagattccacctgccatgttttcttgtctttttgcatatgcatggggtattgtcttcctccagcattactgggtttttcctatatgttatttgtagtaaatttcttttactagggtgataggttctgtctcctctagcaaaattagtgatttatttaaaacaggtgtcattgggcttgtacatagaaccactctattggaagtttgaattattgtgaactaaagttataaaacaatttttaaggagcttcagacagagtatttgtagttgtacttgagaacaaattctga

SEQ ID NO: 15967 - DNA, 426 bp, Homo sapiens
tttgtgcattcagggtaacctgtacgtccttccttcccagcaccaatctcctttctttttaatgtgttttaaggtatgtgcctctcattccaaattgtatctgacacagggcctggcacgcagtctaatttctcagtaaagatttattgaatttctgaatggatggataaatggtgggggcatagacaagtagacagcaaattatgatttaagacagaatgaaatgataattaccaccactaacattttttgaggacttactatatacaaatccaatgctagttcctttacatgcattctctcacatcattctcacagctacaacatgaggtacatagcatcgtgtctcttccagatgaggaaacagaggctcagagaggttaaatgacttgcccaagacaccaaggtcacctgaagacctgggaa

SEQ ID NO: 15968 - DNA, 520 bp, Homo sapiens
acaataactagatgatcattcattttacatttaatgagcaattgctaactgcttaggatataagtgaaacgaactccttgcccttaaacggttcactctctaggggagagacaaatatacacatgagcagattattatgtaagcttggaagaaagttgcttaacctggccagaagaaacaggaaaggcgtcttggagtaagatgtccaaatcataaggggcaagcatgttgagaatcacacctagcagggaggatattatgagcaaagacaagcaagtgaaagtgggatgtgtataagaattacaaagagtttggtattgctagagcaagataaagtcctgggcaggcgtcaagggtatggtacttggtagcagagaaacattttgtcaagaaaattctcctcctaggctgggcttggtggattacacctgtaatcccagcactttgggaagcagaggtgagaggatggcttgagcacaggagtttgagccaacagagcaagaccctgtctcaaaagaaa

SEQ ID NO: 15969 - DNA, 1083 bp, Homo sapiens
gaccacgccctgcctgcgctaaggcccgggtcggcgcagtagctggtgccttcccggaagggctcagaggcgggctcgggcaagcactttaaccttttaagcccaaccagatgagttgcctgcagttttggaggccttcagagcatttcactagacctctgtctgtgtcggtccagtgtctttagccaagctttgattaaagatgacttccttgtttgctcaagaaattcgcctttctaaaagacatgaagaaatagtatcacaaagattaatgttacttcaacaaatggagaataaattgggtgatcaacacacagaaaaggcatctcaactccaaactgttgagactgcttttaaaaggaaccttagtcttttaaaggatatagaagcagcagaaaagtcactacagaccaggattcacccacttccacggcctgaggtggtttctcttgagactcgttactgggcatcagtagaagaatatattcccaaatgggaacagtttcttttaggaagagcaccatatccttttgctgttgaaaatcaaaatgaagcagaaaataccattcaaaatgaggcacagcgataacttcttcacatgctatttcaaaaagcctgtttaataaagctgaatgttaaggtgtatgtaggttattgcaggaactttaggaattaaatatgttcatattcttcgattatctcctaagtgacagtgaagatatgagaatttactggcaagtcacatgttatcacctactactatttcaaggtcatgaatttgctttctaccaaacccatagatgtgttaaacacgaatattaaaaggtggactctttattaattaaattattgtcagtgttgtgagtgtgttgctttaaaaaaaaaaaaatttacaatcattctcctctaagcaggtatcttggttctggttttaagttaagttttttagaatccttactttttagggacaaggtataggatcaacatggttcttttttttttttaaaccattattgtttcttttaacaaattaaaagacaatgacacctaaactgctctagcaaaataacttatgagaaaata

SEQ ID NO: 15970 - DNA, 1067 bp, Homo sapiens
aactatataatttctttttatatttaactaaaggttttaagagggcttagtctctaaatcagtaacaattagtcataacaccatacaaacacatttaaatattcagaggcgggctcgggcaagcactttaaccttttaagcccaaccagatgagttgcctgcagttttggaggccttcagagcatttcactagacctctgtctgtgtcggtccagtgtctttagccaagctttgattaaagatgacttccttgtttgctcaagaaattcgcctttctaaaagacatgaagaaatagtatcacaaagattaatgttacttcaacaaatggagaataaattgggtgatcaacacacagaaaaggcatctcaactccaaactgttgagactgcttttaaaaggaaccttagtcttttaaaggatatagaagcagcagaaaagtcactacagaccaggattcacccacttccacggcctgaggtggtttctcttgagactcgttactgggcatcagtagaagaatatattcccaaatgggaacagtttcttttaggaagagcaccatatccttttgctgttgaaaatcaaaatgaagcagaaaataccattcaaaatgaggcacagcgataacttcttcacatgctatttcatttaggaattaaatatgttcatattcttcgattatctcctaagtgacagtgaagatatgagaatttactggcaagtcacatgttatcacctactactatttcaaggtcatgaatttgctttctaccaaacccatagatgtgttaaacacgaatattaaaaggtggactctttattaattaaattattgtcagtgttgtgagtgtgttgctttaaaaaaaaaaaaatttacaatcattctcctctaagcaggtatcttggttctggttttaagttaagttttttagaatccttactttttagggacaaggtataggatcaacatggttcttttttttttttaaaccattattgtttcttttaacaaattaaaagacaatgacacctaaactgctctagcaaaataacttatgagaaaata

SEQ ID NO: 15971 - DNA, 590 bp, Homo sapiens
gaccacgccctgcctgcgctaaggcccgggtcggcgcagtagctggtgccttcccggaagggctcagaggcgggctcgggcaagcactttaaccttttaagcccaaccagatgagttgcctgcagttttggaggccttcagagcatttcactagacctctgtctgtgtcggtccagtgtctttagccaagctttgattaaagatgacttccttgtttgctcaagaaattcgcctttctaaaagacatgaagaaatagtatcacaaagattaatgttacttcaacaaatggagaataaattgggtgatcaacacacagaaaaggcatctcaactccaaactgttgagactgcttttaaaaggaaccttagtcttttaaagtacttcaataaacatttattgagcatctattatatcacaaacacagtgcttgctgctagagatgctgcctcttctctttttttgcattctttgagtcattgcatatgcaatttttaaaatcctactttcctcgtatgtttttaaactttggaaagaattttagtggctctaccatagaagtcattatgaaagtaaaataaatgagacttag

SEQ ID NO: 15972 - DNA, 1260 bp, Homo sapiens
gaccacgccctgcctgcgctaaggcccgggtcggcgcagtagctggtgccttcccggaagggctcagaggcgggctcggtgagtggagtcggacagtgggtgggtgccctgactgcctgacggccgcgcagggccttgcaggaccgctggggaggatgttgttaacgtaaagagccaggctgatgaggaaggttcatgagtcctttgggtataagcgggagttggggcggccggagggcagatgactctgagaagggcaagcactttaaccttttaagcccaaccagatgagttgcctgcagttttggaggccttcagagcatttcactagacctctgtctgtgtcggtccagtgtctttagccaagctttgattaaagatgacttccttgtttgctcaagaaattcgcctttctaaaagacatgaagaaatagtatcacaaagattaatgttacttcaacaaatggagaataaattgggtgatcaacacacagaaaaggcatctcaactccaaactgttgagactgcttttaaaaggaaccttagtcttttaaaggatatagaagcagcagaaaagtcactacagaccaggattcacccacttccacggcctgaggtggtttctcttgagactcgttactgggcatcagtagaagaatatattcccaaatgggaacagtttcttttaggaagagcaccatatccttttgctgttgaaaatcaaaatgaagcagaaaataccattcaaaatgaggcacagcgataacttcttcacatgctatttcaaaaagcctgtttaataaagctgaatgttaaggtgtatgtaggttattgcaggaactttaggaattaaatatgttcatattcttcgattatctcctaagtgacagtgaagatatgagaatttactggcaagtcacatgttatcacctactactatttcaaggtcatgaatttgctttctaccaaacccatagatgtgttaaacacgaatattaaaaggtggactctttattaattaaattattgtcagtgttgtgagtgtgttgctttaaaaaaaaaaaaatttacaatcattctcctctaagcaggtatcttggttctggttttaagttaagttttttagaatccttactttttagggacaaggtataggatcaacatggttcttttttttttttaaaccattattgtttcttttaacaaattaaaagacaatgacacctaaactgctctagcaaaataacttatgagaaaata

SEQ ID NO: 15973 - DNA, 1122 bp, Homo sapiens
aactatataatttctttttatatttaactaaaggttttaagagggcttagtctctaaatcagtaacaattagtcataacaccatacaaacacatttaaatattcagaggcgggctcgggcaagcactttaaccttttaagcccaaccagatgagttgcctgcagttttggaggccttcagagcatttcactagacctctgtctgtgtcggtccagtgtctttagccaagctttgattaaagatgacttccttgtttgctcaagaaattcgcctttctaaaagacatgaagaaatagtatcacaaagattaatgttacttcaacaaatggagaataaattgggtgatcaacacacagaaaaggcatctcaactccaaactgttgagactgcttttaaaaggaaccttagtcttttaaaggatatagaagcagcagaaaagtcactacagaccaggattcacccacttccacggcctgaggtggtttctcttgagactcgttactgggcatcagtagaagaatatattcccaaatgggaacagtttcttttaggaagagcaccatatccttttgctgttgaaaatcaaaatgaagcagaaaataccattcaaaatgaggcacagcgataacttcttcacatgctatttcaaaaagcctgtttaataaagctgaatgttaaggtgtatgtaggttattgcaggaactttaggaattaaatatgttcatattcttcgattatctcctaagtgacagtgaagatatgagaatttactggcaagtcacatgttatcacctactactatttcaaggtcatgaatttgctttctaccaaacccatagatgtgttaaacacgaatattaaaaggtggactctttattaattaaattattgtcagtgttgtgagtgtgttgctttaaaaaaaaaaaaatttacaatcattctcctctaagcaggtatcttggttctggttttaagttaagttttttagaatccttactttttagggacaaggtataggatcaacatggttcttttttttttttaaaccattattgtttcttttaacaaattaaaagacaatgacacctaaactgctctagcaaaataacttatgagaaaata

SEQ ID NO: 15974 - DNA, 1212 bp, Homo sapiens
gaccacgccctgcctgcgctaaggcccgggtcggcgcagtagctggtgccttcccggaagggctcagaggcgggctcgtgctgatagtgggcctcacagaaaagttaccatgaaccgactttccgggattcccttggcgctgcattaattggcctcgttgcaaaaggaaaccgagaggaaggcggcaagacttggcctgcgggtgatggcaagcactttaaccttttaagcccaaccagatgagttgcctgcagttttggaggccttcagagcatttcactagacctctgtctgtgtcggtccagtgtctttagccaagctttgattaaagatgacttccttgtttgctcaagaaattcgcctttctaaaagacatgaagaaatagtatcacaaagattaatgttacttcaacaaatggagaataaattgggtgatcaacacacagaaaaggcatctcaactccaaactgttgagactgcttttaaaaggaaccttagtcttttaaaggatatagaagcagcagaaaagtcactacagaccaggattcacccacttccacggcctgaggtggtttctcttgagactcgttactgggcatcagtagaagaatatattcccaaatgggaacagtttcttttaggaagagcaccatatccttttgctgttgaaaatcaaaatgaagcagaaaataccattcaaaatgaggcacagcgataacttcttcacatgctatttcaaaaagcctgtttaataaagctgaatgttaaggtgtatgtaggttattgcaggaactttaggaattaaatatgttcatattcttcgattatctcctaagtgacagtgaagatatgagaatttactggcaagtcacatgttatcacctactactatttcaaggtcatgaatttgctttctaccaaacccatagatgtgttaaacacgaatattaaaaggtggactctttattaattaaattattgtcagtgttgtgagtgtgttgctttaaaaaaaaaaaaatttacaatcattctcctctaagcaggtatcttggttctggttttaagttaagttttttagaatccttactttttagggacaaggtataggatcaacatggttcttttttttttttaaaccattattgtttcttttaacaaattaaaagacaatgacacctaaactgctctagcaaaataacttatgagaaaata

SEQ ID NO: 15975 - DNA, 1036 bp, Homo sapiens
tgatgtaagagctaaattaatgcactgagcagtattataagacactcttggtgcatgaattactgacatttactagctattcaaaagtgaaaaggcagaacttagaagtaccacctcccccacccctatcaaaataagaaatgctgtattctttatctgaaatggattaattgaacaatgatcagttttcctaccatagtgtgcctccatccattcagattatatccagagaagagttgaggtgagagatttgggatacagatattgctagtacaggtgccatttgttttatgtaaatccactttaatataaaatgccgatatctgttacaggatatagaagcagcagaaaagtcactacagaccaggattcacccacttccacggcctgaggtggtttctcttgagactcgttactgggcatcagtagaagaatatattcccaaatgggaacagtttcttttaggaagagcaccatatccttttgctgttgaaaatcaaaatgaagcagaaaataccattcaaaatgaggcacagcgataacttcttcacatgctatttcaaaaagcctgtttaataaagctgaatgttaaggtgtatgtaggttattgcaggaactttaggaattaaatatgttcatattcttcgattatctcctaagtgacagtgaagatatgagaatttactggcaagtcacatgttatcacctactactatttcaaggtcatgaatttgctttctaccaaacccatagatgtgttaaacacgaatattaaaaggtggactctttattaattaaattattgtcagtgttgtgagtgtgttgctttaaaaaaaaaaaaatttacaatcattctcctctaagcaggtatcttggttctggttttaagttaagttttttagaatccttactttttagggacaaggtataggatcaacatggttcttttttttttttaaaccattattgtttcttttaacaaattaaaagacaatgacacctaaactgctctagcaaaataacttatgagaaaata

SEQ ID NO: 15976 - DNA, 186 bp, Homo sapiens
  misc_feature (182)..(182): n is a, c, g, or t
actgcaaccggcataggacagattttccagctggaagccacttgttcacagttggtaaattatttctgagtcccaagggctgggagtagctgcctgaaatgctgcgctgggaagtgttctgtggctccatctggcactgttgcaagtgtgtaagtaagtcctacgtatgtgaatatctcatnccaa

SEQ ID NO: 15977 - DNA, 454 bp, Homo sapiens
gggtctaatagccaccagtgacttggtacagcctctggggggatcagtttataatagtgatgtctactacagtcttaaatggaaataattcagcactttcattgtggtatatttattgtacagatctataagagaatatttatttctaaaatagcaagaaattctgggccgggcatggtggctcacacctctaatcccagcactttgggaggccaaagcaggtggattgcttgagcccaggatttcgagaccagcctgggcaatatagtgagacccccatctctgcaagaaattttaaaaattagccggatgtggtggtgtgcacctgttgttctagcttctcaggaggctgaggaggaaggatcacctgagcctgggaggttgagattgtggtgagctgtgatggcatcactgtactccagcctgggtgacagagtgagaccctgtctcaggg

SEQ ID NO: 15978 - DNA, 198 bp, Homo sapiens
cgaactccaattttgggaggttcccactacccagccctagaaaggctgggatccatagcaaagccttcccatcctgtaccttgggctccagctccctgacaacctatggctcctgtcatgtccttagtccaccgccacctaagtcccgacctccctttctccaggttgaatggtttattaaactgtaaagtctcctgt

SEQ ID NO: 15979 - DNA, 661 bp, Homo sapiens
aagggacttacatcctatctgtctgtcttccacaatcccacccacacacgtgtataaatatatacacatacaaatataaaggtatatagtatattaattctataattaatgatatatgaaaatataggaaaaatgtttcccagagggcctcacttggccagccataccctgggggatcttgtaaattccagactcctctgcaatggttttgcacaatgatgcccaaaccaaatatacatttggtagccagaaaagggggtggtagtggtgctagtgtagaacctaacagctcccaattacgtgttacctacttagtctacacgaccacttgcaaggtaagtattctcacgtcatatagatgaggaaacaggcttagatgttaaatatcttcacaatgccacatagacagtaagtgcatagctgagatcgagacctcagtcacaggttccaaactccatgttcttccactcaaagctataggttgaccctgatcctgacaacctgggccccacccagcacctgtgtatacctaccaatatattctcacaggccagtggcttacacctgtaatcccagcactttgggagaccaaagcaggtggattgtttcagcccaggagtgcgagactagcctgggcaacatggtgaaactccatctctac

SEQ ID NO: 15980 - DNA, 536 bp, Homo sapiens
ggaactggtgggttcttggtctcactgacttaagaaagaagccgcggaccctcggaaactcctggagggcagaggcatgctgcatcttcatcattgcattaccaccacccaacactatcgggggacctgccctgataatcagtctacaggtgtatccagcagctccagagagacagcgaccagcaagaaggggccatgatgatggaggtggttttgtcaaaacgaaaatggggatatgtagggaaaagaaagagagatcagactgttactgtgtctacatagaaagggaagacataagagactccattttgaaaaagacctgtactttaaacaattgctttgctgagatgttgttaatctgtagctttgccccagccactttgccccaaccactttgacccaatctggagctcataaaaacatgtgttgtatgaaatcaagggttaaggcatgtagggctgtgcaggacgtgccttgttaaccaaatgtttgcaagcagtatacttggtaaaagtcatcaccattctctcatctca

SEQ ID NO: 15981 - DNA, 391 bp, Homo sapiens
aaacaggagcgtagtatcttggaagttaacaaagggtcatatttcaagaagaatagatgtaaagtgtcaaatgctgctgaaaggtcaatggaactgaaccagaacagatgtgaagtatccctatcacgtgcagctttgctgacgtcattgagagataaattaggtacaagtgggcagagaattgtatgtgaggttagggagtttagactccatatttatttaatgctttcaggaagtttttctatgaaggtgagcagaggagggaaaaagccagtgttagaaggtcttttatgatgaaaaatgctagatgaaacaaatcaaggagtcgtggagcaatcacacatacaggcacacagacaaagccatctgagaaggtaggagatggtattca

SEQ ID NO: 15982 - DNA, 442 bp, Homo sapiens
ataagatgaaagcttccctccgtggcaccgttaattgaacatgtgaaatgagaggaagatcgttcaaaaacattgcaaagcatgtctttctaccgaatgggcatttaaaaaattgccaccaatgaccacacactgcaactgaccctaagacaacctgaattaatttgagaacatgtggttcacacctaagtgcaaggagtatccaacatagtggtactttgctatctcacaaaagacagactgtcttctgggggttcagtggaaagacttctagaatttaaatcaagaggtgtgttgttacccttaactatgcagcctgcgcaagtcacctctttgccccgccacgatcctcatttctgaatgagaatgtgggctgtggttgtctcaagagtactttccagctttcaaagtccataagttcatgccctccagtataaaactt

SEQ ID NO: 15983 - DNA, 435 bp, Homo sapiens
gccattaatctatattagaaaatgtagaggccccagtgttaaccttcctgaagcttgtctccccacccccaattctataggttctattatatctccgctggtttaaggcaactgctgtttcttttaggagttttcttttctttccttgctgaatatctgcacttagcaatactgcccaggcacatgggctgtggctcaagttttcagtgcaggacagtgtgtcattgcaggagaagacagaacccggccagatcctcccgctgccggcaagcggagtcagttactgggaagccataataattctttcttctagagaattttggcaaaaatgtgcctccatcttacatcaacaatttttcatctttctggaatttttatttccccttcccctcttgttcctttttatcctcctggtgaagtatctccttttcccta

SEQ ID NO: 15984 - DNA, 577 bp, Homo sapiens
aacaaacctgcacattctgcacatgcaccccagaacttacagtattaaaaaaaagaagaacagaaaccaaaatagatccatccttgtatggttaattaacatacagacaaaggtgccaaagcaatccaatgggaaaagaaagtctttttaacaaatggtgttgaacaactagacatcagtatggaaaataacaatgttgtctcctaccttataccatagacagaagttaatttgagttggcgatgtggtttggatttgtgtttccacccaaatatcatgtcaaattgtaatccccaatgttgcgggaggggcctgctgggaggtaattggatcatggaagcacatttcccactagctgttctcatgatagtgagttctcacgagatctgattgtttaaaagtgtgtagcacctcccacttcactctcttcctcctgctccagccatgtaagatgtgcttgcttccctttctaccatgactgaaaatttcctgaggcatgcccagggatgcttcctgtatagcctgtggaaccatgaaccaattcaaaataaaaaaaaaaaaaaacaaaaaaacaaac

SEQ ID NO: 15985 - DNA, 580 bp, Homo sapiens
gaaaatgctgtttctgtacctaaagtgttgggattttcagattgttttcatgagttacagacacacggagcagcatgcttgaacttagaccctttctgcaaatgtcaggctgtatgataattgagccagaatgttactcgagctttctgacacattttttgagacctcccatccagtattctcatacagaaatatggctcctccaggtgtgcacttaacactcgcttctttgcagccaggggaacctttagctaaggaaaaaaaagccctcctacccttggtttcaaaaggttttgaaatgctaattcacaaccatgaagtattctgacagcctggaatgttattcagggcaatcaggcaccttgattattacagaagtgtgaaaggtaaattgctgctacccaagaagtcacccagcttttcaagagaaagctcagaaaaatagcacataaaattatgttcggggattacacttcatgtatcgtgtgatggggtgctctgacacccagcgtgtctgtaggtgtcacaacgtcagctcgtagtagaaatgtaacagcatttgccagcgtcgcccttaagt

SEQ ID NO: 15986 - DNA, 397 bp, Homo sapiens
ctgagtcaggcatggttttccctttaaacataccagtcagctctttccctggaagggtttgtatgttgatatttattaattttaccttttattatagattttatgagctcattcagtgtggagtagtcactggcctgcccatatgtcttgttaccactttcagttgacctaataaaattgatgtggtcatgatacactttgcacagttttctttaatgcattctgataatcctctgctacaggaggttgttatggactaaggaaattgagtttaaattttactattgtcttgggaggctgaggcaggagaattgcttgaacctgggaggcggaggttgcagtgagctgagatcgcaccactgcactccagcctgggcgacagagtgaaactccattt

SEQ ID NO: 15987 - DNA, 1074 bp, Homo sapiens
ggatctctctgtattattatttacaactacatgtgaatctacagttatctcagttttttagaaaaataacttacctagaaaaaaatttttcttgatcgctctttcacatacatttatgtacttctgttttcttgtctttctaactgtttcctcctcctgggacccataaattccacatgtggaattttgagtcaaaattaggatgtttgttaagggcccgcactatgccacaccctgtgacgttagtacttgggaatgaggagcgtgactaacggggcataactgctgcctgcacattgtttacaatccagcaagcaaggggcaccgaacagcagctcgggcagcctgtgctgtggcctgcagagaattccaggtgacgccccagagggcctaggagaggatacccttctgagaacagccgtggctcgcccggcatcaccccactcaagaggccagacggggtcccagctggggtgacacagcgccagtcacatccactcatggacactcagtaggccacactcccgatcacccagccacagtcctagatcagtcactgactcacagtctgccacttgtatttccattgtctctgggcttcctctgccttcaccttccaacagtgtggtacctgcctgagagcagcggcccccagtgggacatgagagccaggaccctgtcattaactgaaccaacacaaagggcacagccattgtcatagataagtgttcaagccggacgtgttctccgtaccggctcctgtgtcacagtaacgggaagcctcaggagtgggagtccttgtggagggagaggtgactaacttggtaggtgagtgtcgggagcatcacgtgttctagaatccagtaaatacacgttagtccccaagaactctgaaactcacaaatgccagtgtcctctccattcggattggtttcggctgtggcctggggacaggcgtgccctggagggtatttgctaatgcagcctgtgctccagaaagaccctaggttctcattcttcctttcccctaggctggcatccttcagaaaaagcatcctgagggggaaaaaaaaa

SEQ ID NO: 15988 - DNA, 464 bp, Homo sapiens
gcttctatccctcacctacaagggccttcccttggaagagacagacctatctcatcagtagggcttggatgaagactcagctgcatggggggccttttttggagaggcagattttctcttcctacttgtgtgggaaatctgggatgccaagcctgcctgtgactggaaaggtgagtgtctaaagcccatctggtcacaaatctaagacatgtgctctgatcagctatatcagtaataaagctgatattcaggccatcaattgtctgacttctggctccttccttaattggatctgaattcagaaggttaaaaagtagctattactcaactctctttcttcccaaatgaaaccccaaacatgcaatacagtgcaaaacaaataattctttgatccccttacaagaggtttaataagaactggaagtaccatctttctccaaggggaggtgtacaaaaaaaaaaaa

SEQ ID NO: 15989 - DNA, 127 bp, Homo sapiens
ttcaccagcacaccaataataattaatgccaatatgagtttgtgaaacttttgcaatgaaactttaattgggattgatctagagggaaaaggaaatgtaagagaaaaatttcaactctagatttttt

SEQ ID NO: 15990 - DNA, 869 bp, Homo sapiens
tatttccttcattgtaactcaaattagtaatttaaaggaaactgcactcagttatttgtccttgtataaagttattttgagcattttttattttaaggagctgcttaattttctgtcatcatttaaggagaaaaatattcagttatctgccatcatattacttgcctggtgttatatcctctttttaatgttctactaacataaaacagttttaaagtaaaaggagtgtagtttcttaaatgttcagttttaaagggaaagataaattaatatagacgaactctgtgttgtctgataaaagagataaaggtcagtagagaaattatggtttatgatggtagtcagctccttcttccccctcaagccacgacactgaatttagcctcagtttgttgttgccattcagtctagctagagcttacaaaaaatacaaaacccccaaatttggattcaaatttcaattcttgtacccatcaccagacacacccccacatggtgattactaatgattattaaaatactctttgggcccagtatgcaaaaaggacatctttttcctgggaccagcacaatctttagcctgtaggagaagcctctgtttaatgcagagctgtggaaggtttacaattaaatgatggtaggtgttattatattcatttattgaaaaggaagccttgtgggattaagcttagaggaaagaatttttgttgttgctgttcagcccagtctttttcataaaaaatgcttgtggcagggtacagtggctcacaccagtaatcccagcactttgggaggccaaggcaggagcatagcttgaccccaggagttcaagaccagcctgggtaacatagtgagaccctgtctctaaa

SEQ ID NO: 15991 - DNA, 670 bp, Homo sapiens
tgtcaaccagtataaacatacttggaaggttaacccaggagttagtaccaggatgtgaaatgcttagaggtgaaactgaccagagggaggaggtgatgttgccacagtttcatctggctgtagtctcctctggctgtacagtggagaacagactgtggggttgagagaggaggaaataagatgagagttgaggcttttgccgtaatccaagtgagggttaacagactaagattcatggctaaggagatgtggctggattcaaagttgatattttgttacagcatctaggtttcctaatacacaaagtaagggcatgaagagagcaatcaggatcccgaggtttttggtcttagtagctgtagctatggaagctgcatcagctgagatgagcatgttggtaataaacataattagaatattatgcaaatatcaggatgactgttatggccatatgaagagtcagagacgaataagtgtaggcatcaaatggctatggacatgcaggttggggtatctggaaagggattgacactggagacatctaatatatggtagctaatgtgtatgctatggtgagtgagccatgggtcacattaaggagaacacacttcagattctggtggtaaatcttttaggggaccagaaagcagtggttgaatgatgaggactg

SEQ ID NO: 15992 - DNA, 453 bp, Homo sapiens
aagatcatctctggatggattgaatgggggtggtgtgggagatagaggcattaagaatgtcccccagtttgggaacatgagtaaatgaaaacgagttttgccttcattgagatcaagaagtgaaataaggaacaagttgatggaaggatcagaagtgatgatagatagatagatagatagatagatagatagatagatagatagatagatagagatggataatttaagttagtgtcattgctacataaatagtatttgaaacaatgggaataaaatatatcaccttgagaacagaaaagtattgagcactgagctatgagaaatttcatcagtcagtagttaaataaagaattagataggaaagaaagaaaaaggtggagggataggagaaggtaaatagcagatggtggagtgggcaaagctaaagagaaaaaagagggataggcaagagac

SEQ ID NO: 15993 - DNA, 1084 bp, Homo sapiens
gaagcagtaccccgtctcgctcggttccgcggcggccacgctccgggagacttccggcagggcgggcgcggggtcttggcgaacggtcttcggaagcggcggcggcgcgatgaccacgctacgggcctttacctgcgacgacctgttccgcttcaacaacattaacttggatccacttacagaaacttatgggattcctttctacctacaatacctcgcccactggccagagtatttcattgttgcagaggcacctggtggagaattaatgggttatattatgggtaaagcagaaggctcagtagctagggaagaatggcacgggcacgtcacagctctgtctgttgccccagaatttcgacgccttggtttggctgctaaacttatggagttactagaggagatttcagaaagaaagggtggattttttgtggatctctttgtaagagtatctaaccaagttgcagttaacatgtacaagcagttgggctacagtgtatataggacggtcatagagtactattcggccagcaacggggagcctgatgaggacgcttatgatatgaggaaagcactttccagggatactgagaagaaatccatcataccattacctcatcctgtgaggcctgaagacattgaataaccctgggcagtggttcttaggcagatactctagatgctttatggacaatattattttcattggatgattctggagctctattaggagaaaagtaatcattttaggtcttaaagacttcaagaaaatacaggttatcaatttattttaaatctcattgtttccagttagcaatatcatacctattaaagctgttcattgtaacaaaattcaatcaaaaaggcagctaggtcagaaggaaacataccactctcatggttcatagtattcactgtatgtatgctagggaaaagacttgctccagtctcctcctcagttctgtgcctgagaaccactgctgcatatatttgtttttaaattttgtattgaactgttaattgaagctttaaaagcatatatgaaatgtataaatctaagatgtataatacattattgactcta

SEQ ID NO: 15994 - DNA, 797 bp, Homo sapiens
  misc_feature (119)..(119): n is a, c, g, or t
  misc_feature (123)..(124): n is a, c, g, or t
  misc_feature (126)..(126): n is a, c, g, or t
tctccctactgtatcctagcaaatcttattaaatattaaagtgaactactgattagaatagtgcctgtcaatggtgactcaataatgatttcttgaatgataaatacctttacctgcgncacnngntccgcttcaacaacattaacttggatccacttacagaaacttatgggattcctttctacctacaatacctcgcccactggccagagtatttcattgttgcagaggcacctggtggagaattaatgggttatattatgggtaaagcagaaggctcagtagctagggaagaatggcacgggcacgtcacagctctgtctgttgccccagaatttcgacgccttggtttggctgctaaacttatggagttactagaggagatttcagaaagaaagggtggattttttgtggatctctttgtaagagtatctaaccaagttgcagttaacatgtacaagcagttgggctacagtgtatataggacggtcatagagtactattcggccagcaacggggagcctgatgaggacgcttatggtaagctcccttccatggcagtatccccaagaagtcgaaacagttacattctttctacagattgtagtatttgattattttaataaatgtagaatatttgactttaaaatttaaatttccctcaacctacctttatcaacctattagtagtagtaattaacttacctattaactaaccaatgggttaatttctgtaccttactgtttcactctgttacatacatattattttgctaacagggaaacgtgtattgtga

SEQ ID NO: 15995 - DNA, 334 bp, Homo sapiens
gaagcagtaccccgtctcgctcggttccgcggcggccacgctccgggagacttccggcagggcgggcgcggggtcttggcgaacggtcttcggaagcggcggcggcgcgatgaccacgctacgggcctttacctgcgacgacctgttccgcttcaacaacattaacttggatccacttacagaaacttatgggattcctttctacctacaatacctcgcccactggactgctgcatatatttgtttttaaattttgtattgaactgttaattgaagctttaaaagcatatatgaaatgtataaatctaagatgtataatacattattgactcta

SEQ ID NO: 15996 - DNA, 222 bp, Homo sapiens
tttaaaaaaacaacagggcggtatgtgaaaactaaggacaaagtggttccgattcaagtgtcaggaagatggaaagaactatgggataagatggctgggaacatttcaaagagggggtgagccttgaagatggataacacattgtaacttggatccacttacagaaacttatccttttttacaaaaaaaaaaaagttgaatgaagatttactgagaataaag

SEQ ID NO: 15997 - DNA, 1280 bp, Homo sapiens
gaagcagtaccccgtctcgctcggttccgcggcggccacgctccgggagacttccggcagggcgggcgcggggtcttggcgaacggtcttcggaagcggcggcggcgcgatgaccacgctacgggcctttacctgcgacgacctgttccgcttcaacaacattaacttggatccacttacagaaacttatgggattcctttctacctacaatacctcgcccactggccagagtatttcattgttgcagaggcacctggtggagaattaatgggttatattatgggtaaagcagaaggctcagtagctagggaagaatggcacgggcacgtcacagctctgtctgttgccccagaatttcgacgccttggtttggctgctaaacttatggagttactagaggagatttcagaaagaaagggtggattttttgtggatctctttgtaagagtatctaaccaagttgcagttaacatgtacaagcagttgggctacagtgtatataggacggtcatagagtactattcggccagcaacggggagcctgatgaggacgcttatgatatgaggaaagcactttccagggatactgagaagaaatccatcataccattacctcatcctgtgaggcctgaagacattgaataaccctgggcagtggttcttaggcagatactctagatgctttatggacaatattattttcattggatgattctggagctctattaggagaaaagtaatcattttaggtcttaaagacttcaagaaaatacaggttatcaatttattttaaatctcattgtttccagttagcaatatcatacctattaaagctgttcattgtaacaaaattcaatcaaaaaggcagctaggtcagaaggaaacataccactctcatggttcatagtattcactgtatgtatgctagggaaaagacttgctccagtctcctcctcagttctgtgcctgagaaccactgctgcatatatttgtttttaaattttgtattgaactgttaattgaagctttaaaagcatatatgaaatgtataaatctaagatgtataatacattattgactctaaaaaaaaaaaaggggggggggttaaagaattccttgagggccaggttaggttaccagtttttggacaaggggcctaaggggaggttaaagaaggagggggggtaaaggtcggtgggaagggtggattgggagaagcttgggggaattgagccaaggaaagccggaaaagttagggaagtcgggaggcgtaaaaagc

SEQ ID NO: 15998 - DNA, 1684 bp, Homo sapiens
  misc_feature (1684)..(1684): n is a, c, g, or t
gaagcagtaccccgtctcgctcggttccgcggcggccacgctccgggagacttccggcagggcgggcgcggggtcttggcgaacggtcttcggaagcggcggcggcgcgatgaccacgctacgggcctttacctgcgacgacctgttccgcttcaacaacattaacttggatccacttacagaaacttatgggattcctttctacctacaatacctcgcccactggccagagtatttcattgttgcagaggcacctggtggagaattaatgggttatattatgggtaaagcagaaggctcagtagctagggaagaatggcacgggcacgtcacagctctgtctgttgccccagaatttcgacgccttggtttggctgctaaacttatggagttactagaggagatttcagaaagaaagggtggattttttgtggatctctttgtaagagtatctaaccaagttgcagttaacatgtacaagcagttgggctacagtgtatataggacggtcatagagtactattcggccagcaacggggagcctgatgaggacgcttatgatatgaggaaagcactttccagggatactgagaagaaatccatcataccattacctcatcctgtgaggcctgaagacattgaataaccctgggcagtggttcttaggcagatactctagatgctttatggacaatattattttcattggatgattctggagctctattaggagaaaagtaatcattttaggtcttaaagacttcaagaaaatacaggttatcaatttattttaaatctcattgtttccagttagcaatatcatacctattaaagctgttcattgtaacaaaattcaatcaaaaaggcagctaggtcagaaggaaacataccactctcatggttcatagtattcactgtatgtatgctagggaaaagacttgctccagtctcctcctcagttctgtgcctgagaaccactgctgcatatatttgtttttaaattttgtattgaactgttaattgaagctttaaaagcatatatgaaatgtataaatctaagatgtataatacattattgactctaaaaaaaaaaaaaacaaaagaaaaaaaaaaactgtggggcgcccgccttgggccctggaaaggttttaaacacaattccggctgggggcggggggccccattaggtagggggaaacggggcccaaggcggctcccaaaggagacccgggcagtggacttaggggcgtgggttccacccaataataaaaagcggcggcgggacccgcgcttctggaacacactcaagtggggtccgcagccagcgcggggcctaatccacagggagtccagaggcgccggttaaatttccggcccggccgacgggtggagaaataagaacagaacgaagaagaaacacaaacgagacacgcagagacgaacacgagaggacaaacgaagcacaagagcgagacacagaaacgacaatgatacaaagaacgaagcgacacagcgatgaagagaagacagacgacagacgaacaaacacaaaaaaggaaataaagacgagaaagcaagaaggaatagagagagaaaaaagtgaaaaaagaaacaacgcaacaaacaacgacatcacgaaagtaagaaacaagacgaaggaagaagcatgagaaggacgcagaan

SEQ ID NO: 15999 - DNA, 1646 bp, Homo sapiens
gaagcagtaccccgtctcgctcggttccgcggcggccacgctccgggagacttccggcagggcgggcgcggggtcttggcgaacggtcttcggaagcggcggcggcgcgatgaccacgctacgggcctttacctgcgacgacctgttccgcttcaacaacattaacttggatccacttacagaaacttatgggattcctttctacctacaatacctcgcccactggccagagtatttcattgttgcagaggcacctggtggagaattaatgggttatattatgggtaaagcagaaggctcagtagctagggaagaatggcacgggcacgtcacagctctgtctgttgccccagaatttcgacgccttggtttggctgctaaacttatggagttactagaggagatttcagaaagaaagggtggattttttgtggatctctttgtaagagtatctaaccaagttgcagttaacatgtacaagcagttgggctacagtgtatataggacggtcatagagtactattcggccagcaacggggagcctgatgaggacgcttatgatatgaggaaagcactttccagggatactgagaagaaatccatcataccattacctcatcctgtgaggcctgaagacattgaataaccctgggcagtggttcttaggcagatactctagatgctttatggacaatattattttcattggatgattctggagctctattaggagaaaagtaatcattttaggtcttaaagacttcaagaaaatacaggttatcaatttattttaaatctcattgtttccagttagcaatatcatacctattaaagctgttcattgtaacaaaattcaatcaaaaaggcagctaggtcagaaggaaacataccactctcatggttcatagtattcactgtatgtatgctagggaaaagacttgctccagtctcctcctcagttctgtgcctgagaaccactgctgcatatatttgtttttaaattttgtattgaactgttaattgaagctttaaaagcatatatgaaatgtataaatctaagatgtataatacattattgactctaactctatgaatgttttctgaagtttgttagtcatttgtaaaactaaatcagattgtaatcccagtactttgggaggccaaggcaggctgattgcttgaggtcaggagtttgagaccagcctggccaaaatctatactaaaaaaaatacaaaaattagctgggcatcccagctatgcagaagctgaagcacaagaattgcttgaaccctggaggtggaggttgcagtgagctgagatcgtcccactgcactccagcccgggcaacagagtaagaccctgcctcaagaaaaaaaaaaaaaaaaaaaatcaggattgtgaaaggtcatcatcatttaagatacgtttaattaaattgtgacttccatacgtagtattttaaaaatgcacacttgaagcaatcactgtccagcatacttaagaagctcccttcttatcgtgtagtaaattcttcccagtcacctgcgttcataccattatactgtttgtttgttagtcctagatcttttctcctcttcacaatgctttgcttaaatcctgcccttctaaaaagccaaaaaaaaaaa

SEQ ID NO: 16000 - DNA, 1157 bp, Homo sapiens
tgggcttctcgccctgccctactgcttgctggttcgtggccgggccgcgcctcttctgggcagagggcaccgccgacggccaggccgcagagggggcttgcgaggatcggaagctggtcagcagctgttgggatgtgtacatcgtgaagcccacctggtggccgtggttaaattgtatccaaatgaaatgacactgatcactgcgtcccctgcagcagatgctgtctcagtcatgtaacttggatccacttacagaaacttatgggattcctttctacctacaatacctcgcccactggccagagtatttcattgttgcagaggcacctggtggagaattaatgggttatattatgggtaaagcagaaggctcagtagctagggaagaatggcacgggcacgtcacagctctgtctgttgccccagaatttcgacgccttggtttggctgctaaacttatggagttactagaggagatttcagaaagaaagggtggattttttgtggatctctttgtaagagtatctaaccaagttgcagttaacatgtacaagcagttgggctacagtgtatataggacggtcatagagtactattcggccagcaacggggagcctgatgaggacgcttatgatatgaggaaagcactttccagggatactgagaagaaatccatcataccattacctcatcctgtgaggcctgaagacattgaataaccctgggcagtggttcttaggcagatactctagatgctttatggacaatattattttcattggatgattctggagctctattaggagaaaagtaatcattttaggtcttaaagacttcaagaaaatacaggttatcaatttattttaaatctcattgtttccagttagcaatatcatacctattaaagctgttcattgtaacaaaattcaatcaaaaaggcagctaggtcagaaggaaacataccactctcatggttcatagtattcactgtatgtatgctagggaaaagacttgctccagtctcctcctcagttctgtgcctgagaaccactgctgcatatatttgtttttaaattttgtattgaactgttaattgaagctttaaaagcatatatgaaatgtataaatctaagatgtataatacattattgactcta

SEQ ID NO: 16001 - DNA, 1064 bp, Homo sapiens
  misc_feature (119)..(119): n is a, c, g, or t
  misc_feature (123)..(124): n is a, c, g, or t
  misc_feature (126)..(126): n is a, c, g, or t
tctccctactgtatcctagcaaatcttattaaatattaaagtgaactactgattagaatagtgcctgtcaatggtgactcaataatgatttcttgaatgataaatacctttacctgcgncacnngntccgcttcaacaacattaacttggatccacttacagaaacttatgggattcctttctacctacaatacctcgcccactggccagagtatttcattgttgcagaggcacctggtggagaattaatgggttatattatgggtaaagcagaaggctcagtagctagggaagaatggcacgggcacgtcacagctctgtctgttgccccagaatttcgacgccttggtttggctgctaaacttatggagttactagaggagatttcagaaagaaagggtggattttttgtggatctctttgtaagagtatctaaccaagttgcagttaacatgtacaagcagttgggctacagtgtatataggacggtcatagagtactattcggccagcaacggggagcctgatgaggacgcttatgatatgaggaaagcactttccagggatactgagaagaaatccatcataccattacctcatcctgtgaggcctgaagacattgaataaccctgggcagtggttcttaggcagatactctagatgctttatggacaatattattttcattggatgattctggagctctattaggagaaaagtaatcattttaggtcttaaagacttcaagaaaatacaggttatcaatttattttaaatctcattgtttccagttagcaatatcatacctattaaagctgttcattgtaacaaaattcaatcaaaaaggcagctaggtcagaaggaaacataccactctcatggttcatagtattcactgtatgtatgctagggaaaagacttgctccagtctcctcctcagttctgtgcctgagaaccactgctgcatatatttgtttttaaattttgtattgaactgttaattgaagctttaaaagcatatatgaaatgtataaatctaagatgtataatacattattgactcta

SEQ ID NO: 16002 - DNA, 1077 bp, Homo sapiens
gaagcagtaccccgtctcgctcggttccgcggcggccacgctccgggagacttccggcagggcgggcgcggggtcttggcgaacggtcttcggaagcggcggcggcgcgatgaccacgctacgggcctttacctgcgacgacctgttccgcttcaacaacattccttaacaggactctagtatgggattcctttctacctacaatacctcgcccactggccagagtatttcattgttgcagaggcacctggtggagaattaatgggttatattatgggtaaagcagaaggctcagtagctagggaagaatggcacgggcacgtcacagctctgtctgttgccccagaatttcgacgccttggtttggctgctaaacttatggagttactagaggagatttcagaaagaaagggtggattttttgtggatctctttgtaagagtatctaaccaagttgcagttaacatgtacaagcagttgggctacagtgtatataggacggtcatagagtactattcggccagcaacggggagcctgatgaggacgcttatgatatgaggaaagcactttccagggatactgagaagaaatccatcataccattacctcatcctgtgaggcctgaagacattgaataaccctgggcagtggttcttaggcagatactctagatgctttatggacaatattattttcattggatgattctggagctctattaggagaaaagtaatcattttaggtcttaaagacttcaagaaaatacaggttatcaatttattttaaatctcattgtttccagttagcaatatcatacctattaaagctgttcattgtaacaaaattcaatcaaaaaggcagctaggtcagaaggaaacataccactctcatggttcatagtattcactgtatgtatgctagggaaaagacttgctccagtctcctcctcagttctgtgcctgagaaccactgctgcatatatttgtttttaaattttgtattgaactgttaattgaagctttaaaagcatatatgaaatgtataaatctaagatgtataatacattattgactcta

SEQ ID NO: 16003 - DNA, 1045 bp, Homo sapiens
gaagcagtaccccgtctcgctcggttccgcggcggccacgctccgggagacttccggcagggcgggcgcggggtcttggcgaacggtcttcggaagcggcggcggcgcgatgaccacgctacgggcctttacctgcgacgacctgttccgcttcaacaacattaacttggatccacttacagaaactccagagtatttcattgttgcagaggcacctggtggagaattaatgggttatattatgggtaaagcagaaggctcagtagctagggaagaatggcacgggcacgtcacagctctgtctgttgccccagaatttcgacgccttggtttggctgctaaacttatggagttactagaggagatttcagaaagaaagggtggattttttgtggatctctttgtaagagtatctaaccaagttgcagttaacatgtacaagcagttgggctacagtgtatataggacggtcatagagtactattcggccagcaacggggagcctgatgaggacgcttatgatatgaggaaagcactttccagggatactgagaagaaatccatcataccattacctcatcctgtgaggcctgaagacattgaataaccctgggcagtggttcttaggcagatactctagatgctttatggacaatattattttcattggatgattctggagctctattaggagaaaagtaatcattttaggtcttaaagacttcaagaaaatacaggttatcaatttattttaaatctcattgtttccagttagcaatatcatacctattaaagctgttcattgtaacaaaattcaatcaaaaaggcagctaggtcagaaggaaacataccactctcatggttcatagtattcactgtatgtatgctagggaaaagacttgctccagtctcctcctcagttctgtgcctgagaaccactgctgcatatatttgtttttaaattttgtattgaactgttaattgaagctttaaaagcatatatgaaatgtataaatctaagatgtataatacattattgactcta

SEQ ID NO: 16004 - DNA, 1021 bp, Homo sapiens
tgggcttctcgccctgccctactgcttgctggttcgtggccgggccgcgcctcttctgggcagagggcaccgccgacggccaggccgcagagggggcttgcgaggatcggaagctggtcagcagctgttgggatgtgtacatcgtgaagcccacctggtggccgtggttaaattgtatccaaatgaaatgacactgatcactgcgtcccctgcagcagatgctgtctcagtcatgtaacttggatccacttacagaaacttatgggattcctttctacctacaatacctcgcccactggccagagtatttcattgttgcagaggcacctggtggagaattaatgggttataaaagggtggattttttgtggatctctttgtaagagtatctaaccaagttgcagttaacatgtacaagcagttgggctacagtgtatataggacggtcatagagtactattcggccagcaacggggagcctgatgaggacgcttatgatatgaggaaagcactttccagggatactgagaagaaatccatcataccattacctcatcctgtgaggcctgaagacattgaataaccctgggcagtggttcttaggcagatactctagatgctttatggacaatattattttcattggatgattctggagctctattaggagaaaagtaatcattttaggtcttaaagacttcaagaaaatacaggttatcaatttattttaaatctcattgtttccagttagcaatatcatacctattaaagctgttcattgtaacaaaattcaatcaaaaaggcagctaggtcagaaggaaacataccactctcatggttcatagtattcactgtatgtatgctagggaaaagacttgctccagtctcctcctcagttctgtgcctgagaaccactgctgcatatatttgtttttaaattttgtattgaactgttaattgaagctttaaaagcatatatgaaatgtataaatctaagatgtataatacattattgactcta

SEQ ID NO: 16005 - DNA, 715 bp, Homo sapiens
gacttcaaatgattacttttctcctaatagagctccagaatcatccaatgaaaataatattgtccataaagcatctagagtatctaaccaagttgcagttaacatgtacaagcagttgggctacagtgtatataggacggtcatagagtactattcggccagcaacggggagcctgatgaggacgcttatgatatgaggaaagcactttccagggatactgagaagaaatccatcataccattacctcatcctgtgaggcctgaagacattgaataaccctgggcagtggttcttaggcagatactctagatgctttatggacaatattattttcattggatgattctggagctctattaggagaaaagtaatcattttaggtcttaaagacttcaagaaaatacaggttatcaatttattttaaatctcattgtttccagttagcaatatcatacctattaaagctgttcattgtaacaaaattcaatcaaaaaggcagctaggtcagaaggaaacataccactctcatggttcatagtattcactgtatgtatgctagggaaaagacttgctccagtctcctcctcagttctgtgcctgagaaccactgctgcatatatttgtttttaaattttgtattgaactgttaattgaagctttaaaagcatatatgaaatgtataaatctaagatgtataatacattattgactcta

SEQ ID NO: 16006 - DNA, 938 bp, Homo sapiens
gaagcagtaccccgtctcgctcggttccgcggcggccacgctccgggagacttccggcagggcgggcgcggggtcttggcgaacggtcttcggaagcggcggcggcgcgatgaccacgctacgggcctttacctgcgacgacctgttccgcttcaacaacattaacttggatccacttacagaaacttatgggattcctttctacctacaatacctcgcccactggccagagtatttcattgttgcagaggcacctggtggagaattaatgggttatattatgggtaaagcagaaggctcagtagctagggaagaatggcacgggcacgtcacagctctgtctgttgccccagaatttcgacgccttggtttggctgctaaacttatggagttactagaggagatttcagaaagatatgaggaaagcactttccagggatactgagaagaaatccatcataccattacctcatcctgtgaggcctgaagacattgaataaccctgggcagtggttcttaggcagatactctagatgctttatggacaatattattttcattggatgattctggagctctattaggagaaaagtaatcattttaggtcttaaagacttcaagaaaatacaggttatcaatttattttaaatctcattgtttccagttagcaatatcatacctattaaagctgttcattgtaacaaaattcaatcaaaaaggcagctaggtcagaaggaaacataccactctcatggttcatagtattcactgtatgtatgctagggaaaagacttgctccagtctcctcctcagttctgtgcctgagaaccactgctgcatatatttgtttttaaattttgtattgaactgttaattgaagctttaaaagcatatatgaaatgtataaatctaagatgtataatacattattgactcta

SEQ ID NO: 16007 - DNA, 701 bp, Homo sapiens
aggtctggttagcatctggtacacttggcaattgggagacatttataaatacattttgcttagaatatggtgaagtgggggtagggataaaacctcttatgggaactttacctatacactttacatttgatataatacattttttgggtgtttatattaaactttgcttctttacagatatgaggaaagcactttccagggatactgagaagaaatccatcataccattacctcatcctgtgaggcctgaagacattgaataaccctgggcagtggttcttaggcagatactctagatgctttatggacaatattattttcattggatgattctggagctctattaggagaaaagtaatcattttaggtcttaaagacttcaagaaaatacaggttatcaatttattttaaatctcattgtttccagttagcaatatcatacctattaaagctgttcattgtaacaaaattcaatcaaaaaggcagctaggtcagaaggaaacataccactctcatggttcatagtattcactgtatgtatgctagggaaaagacttgctccagtctcctcctcagttctgtgcctgagaaccactgctgcatatatttgtttttaaattttgtattgaactgttaattgaagctttaaaagcatatatgaaatgtataaatctaagatgtataatacattattgactcta

SEQ ID NO: 16008 - DNA, 756 bp, Homo sapiens
gaagcagtaccccgtctcgctcggttccgcggcggccacgctccgggagacttccggcagggcgggcgcggggtcttggcgaacggtcttcggaagcggcggcggcgcgatgaccacgctacgggcctttacctgcgacgacctgttccgcttcaacaacattaacttggatccacttacagaaacttatgggattcctttctacctacaatacctcgcccactggccagagtatttcattgttgcagaggcacctggtggagaattaatgggttatattatgggtaaagcagaaggctcagtagctagggaagaatggcacgggcacgtcacagctctgtctgttgccccagaatttcgacgccttggtttggctgctaaacttatggagttactagaggagatttcagaaagaaagggtggattttttgtggatctctttgtaagagtatctaaccaagttgcagttaacatgtacaagcagttgggctacagtgtatataggacggtcatagagtactattcggccagcaacggggagcctgatgaggacgcttatgatatgaggaaagcactttccagggatactgagaagaaatccatcataccattacctcatcctgtgaggcctgaagacattgaataaccactgctgcatatatttgtttttaaattttgtattgaactgttaattgaagctttaaaagcatatatgaaatgtataaatctaagatgtataatacattattgactcta

SEQ ID NO: 16009 - DNA, 817 bp, Homo sapiens
gaagcagtaccccgtctcgctcggttccgcggcggccacgctccgggagacttccggcagggcgggcgcggggtcttggcgaacggtcttcggaagcggcggcggcgcgatgaccacgctacgggcctttacctgcgacgacctgttccgcttcaacaacattaacttggatccacttacagaaacttatgggattcctttctacctacaatacctcgcccactggccagagtatttcattgttgcagaggcacctggtggagaattaatgggttatattatgggtaaagcagaaggctcagtagctagggaagaatggcacgggcacgtcacagctctgtctgttgccccagaatttcgacgccttggtttggctgctaaacttatggagttactagaggagatttcagaaagaaagggtggattttttgtggatctctttgtaagagtatctaaccaagttgcagttaacatgtacaagcagttgggctacagtgtatataggacggtcatagagtactattcggccagcaacggggagcctgatgaggacgcttatggtaagctcccttccatggcagtatccccaagaagtcgaaacagttacattctttctacagattgtagtatttgattattttaataaatgtagaatatttgactttaaaatttaaatttccctcaacctacctttatcaacctattagtagtagtaattaacttacctattaactaaccaatgggttaatttctgtaccttactgtttcactctgttacatacatattattttgctaacagggaaacgtgtattgtga

SEQ ID NO: 16010 - DNA, 332 bp, Homo sapiens
ctccagttccattagcaatttattgccacttagaaaacacaagatgtagatttattaacttgaattttaaagaagcaagtagcagttaagtgaaaaaatatgtaaacaccttaatagtggctgtgacagcttattatggctattaggtagattaaatcatctgcctcagccctaaagttggccttaaagttgttgatgaaacatgttttgttttccttgtggcatattactgttagctttagcaggcttatttcaactggttattgtaaacgctgcttactagagacatttctcttgtttctttcagtaacttggatccacttacagaaact

SEQ ID NO: 16011 - DNA, 455 bp, Homo sapiens
caaaattagttgtgttttaagtatatcgttcttttttgttctaattctgattttagaactattctaaatgtaacagatagtgttacatttacaagtgaatttcaaataaaagcactaactgttagctggatgacctcaggtggtacttaaaaacttctttattagtttcctttgtaataaaaacatactgaacagtaattctatatttatgtgtaaatcaatgtctagttactgaatgtgatttttgttgttgttggcagttatgggtaaagcagaaggctcagtagctagggaagaatggcacgggcacgtcacagctctgtctgttgccccagaatttcgacgccttggtttggctgctaaacttatggagttactagaggagatttcagaaaggtgagattcagtttttcaaatacacttagtgatttgtggacccctaaccattttcttcc

SEQ ID NO: 16012 - DNA, 3369 bp, Homo sapiens
cgccgccgccgacttaaactttggagggggaaaaagagctactggcgcctggcgaccctccctgccccccacccaaccccgctccggcaacgcccccttcctcacggctcccgaccgaacttttctccaacttctgcgactcgtgagattcccttctacccactccggccctcgggacccctctgcccatcccctggccggtcgggtccctgcgaacccctttatctctggaatccactcggtccccgactcagagactcctgccctccacccccaaggaccccgccatcctcaggtcccctccgcctgccagatcttttctcggatccccgctctcccaccacctgctcacgagatcccgcggatctagaacccagggtcccccggggccccccggccgggtcccgggtgggctccaggcggccggtccccggcctccccccatggccaccgccccctcttatcccgccgggctccctggctctcccgggccggggtctcctccgccccccggcggcctagagctgcagtcgccgccaccgctactgccccagatcccggccccgggttccggggtctcctttcacatccagatcgggctgacccgcgagttcgtgctgttgcccgccgcctccgagctggctcatgtgaagcagctggcctgttccatcgtggaccagaagttccctgagtgtggcttctacggcctttacgacaagatcctgcttttcaaacatgaccccacgtcggccaacctcctgcagctggtgcgctcgtccggagacatccaggagggcgacctggtggaggtggtgctgtcggcctcggccaccttcgaggacttccagatccgcccgcacgccctcacggtgcactcctatcgggcgcctgccttctgtgatcactgcggggagatgctcttcggcctagtgcgccagggcctcaagtgcgatggctgcgggctgaactaccacaagcgctgtgccttcagcatccccaacaactgtagtggggcccgcaaacggcgcctgtcatccacgtctctggccagtggccactcggtgcgcctcggcacctccgagtccctgccctgcacggctgaagagctgagccgtagcaccaccgaactcctgcctcgccgtcccccgtcatcctcttcctcctcttctgcctcatcgtatacgggccgccccattgagctggacaagatgctgctctccaaggtcaaggtgccgcacaccttcctcatccacagctatacacggcccaccgtttgccaggcttgcaagaaactcctcaagggcctcttccggcagggcctgcaatgcaaagactgcaagtttaactgtcacaaacgctgcgccacccgcgtccctaatgactgcctgggggaggcccttatcaatggagatgtgccgatggaggaggccaccgatttcagcgaggctgacaagagcgccctcatggatgagtcagaggactccggtgtcatccctggctcccactcagagaatgcgctccacgccagtgaggaggaggaaggcgagggaggcaaggcccagagctccctggggtacatccccctaatgagggtggtgcaatcggtgcgacacacgacgcggaaatccagcaccacgctgcgggagggttgggtggttcattacagcaacaaggacacgctgagaaagcggcactattggcgcctggactgcaagtgtatcacgctcttccagaacaacacgaccaacagatactataaggaaattccgctgtcagaaatcctcacggtggagtccgcccagaacttcagccttgtgccgccgggcaccaacccacactgctttgagatcgtcactgccaatgccacctacttcgtgggcgagatgcctggcgggactccgggtgggccaagtgggcagggggctgaggccgcccggggctgggagacagccatccgccaggccctgatgcccgtcatccttcaggacgcacccagcgccccaggccacgcgccccacagacaagcttctctgagcatctctgtgtccaacagtcagatccaagagaatgtggacattgccactgtctaccagatcttccctgacgaagtgctgggctcagggcagtttggagtggtctatggaggaaaacaccggaagacaggccgggacgtggcagttaaggtcattgacaaactgcgcttccctaccaagcaggagagccagctccggaatgaagtggccattctgcagagcctgcggcatcccgggatcgtgaacctggagtgcatgttcgagacgcctgagaaagtgtttgtggtgatggagaagctgcatggggacatgttggagatgatcctgtccagtgagaagggccggctgcctgagcgcctcaccaagttcctcatcacccagatcctggtggctttgagacaccttcacttcaagaacattgtccactgtgacttgaaaccagaaaacgtgttgctggcatcagcagacccatttcctcaggtgaagctgtgtgactttggctttgctcgcatcatcggcgagaagtcgttccgccgctcagtggtgggcacgccggcctacctggcacccgaggtgctgctcaaccagggctacaaccgctcgctggacatgtggtcagtgggcgtgatcatgtacgtcagcctcagcggcaccttccctttcaacgaggatgaggacatcaatgaccagatccagaacgccgccttcatgtacccggccagcccctggagccacatctcagctggagccattgacctcatcaacaacctgctgcaggtgaagatgcgcaaacgctacagcgtggacaaatctctcagccacccctggttacaggagtaccagacgtggctggacctccgagagctggaggggaagatgggagagcgatacatcacgcatgagagtgacgacgcgcgctgggagcagtttgcagcagagcatccgctgcctgggtctgggctgcccacggacagggatctcggtggggcctgtccaccacaggaccacgacatgcaggggctggcggagcgcatcagtgttctctgaggtcctgtgccctcgtccagctgctgccctccacagcggttcttcacaggatcccagcaatgaactgttctagggaaagtggcttcctgcccaaactggatgggacacgtggggagtggggtggggggagctatttccaaggcccctccctgtttccccagcaattaaaacggactcatctctggccccatggccttgatctcagcacacggcactctcgaatcattactctgttgtaccaacatggagttcatctggaaggaggactgcctgaaaagaggaaggatgg

SEQ ID NO: 16013 - DNA, 3005 bp, Homo sapiens
attcagcatcccctcccacctccgccaggttccggaaaattcgaggtgtccacgctcccggagccactctccctcccaccccagctcccccttccagccaccaaacccacgccggcgccccctccccgtacaattggggcgctggcatcctgcccggctcgcgctggggttgggagggggcaggcaggaagcgagggcctgcggggtctctgcgtttccgggggaaacagccggccctgccctgggagggtcacagtccgcccgctgctgaaggcggctctgagcttttccgtcgccacatccctctcccgcccctcagttccctgagtgtggcttctacggcctttacgacaagatcctgcttttcaaacatgaccccacgtcggccaacctcctgcagctggtgcgctcgtccggagacatccaggagggcgacctggtggaggtggtgctgtcggcctcggccaccttcgaggacttccagatccgcccgcacgccctcacggtgcactcctatcgggcgcctgccttctgtgatcactgcggggagatgctcttcggcctagtgcgccagggcctcaagtgcgatggctgcgggctgaactaccacaagcgctgtgccttcagcatccccaacaactgtagtggggcccgcaaacggcgcctgtcatccacgtctctggccagtggccactcggtgcgcctcggcacctccgagtccctgccctgcacggctgaagagctgagccgtagcaccaccgaactcctgcctcgccgtcccccgtcatcctcttcctcctcttctgcctcatcgtatacgggccgccccattgagctggacaagatgctgctctccaaggtcaaggtgccgcacaccttcctcatccacagctatacacggcccaccgtttgccaggcttgcaagaaactcctcaagggcctcttccggcagggcctgcaatgcaaagactgcaagtttaactgtcacaaacgctgcgccacccgcgtccctaatgactgcctgggggaggcccttatcaatggagatgtgccgatggaggaggccaccgatttcagcgaggctgacaagagcgccctcatggatgagtcagaggactccggtgtcatccctggctcccactcagagaatgcgctccacgccagtgaggaggaggaaggcgagggaggcaaggcccagagctccctggggtacatccccctaatgagggtggtgcaatcggtgcgacacacgacgcggaaatccagcaccacgctgcgggagggttgggtggttcattacagcaacaaggacacgctgagaaagcggcactattggcgcctggactgcaagtgtatcacgctcttccagaacaacacgaccaacagatactataaggaaattccgctgtcagaaatcctcacggtggagtccgcccagaacttcagccttgtgccgccgggcaccaacccacactgctttgagatcgtcactgccaatgccacctacttcgtgggcgagatgcctggcgggactccgggtgggccaagtgggcagggggctgaggccgcccggggctgggagacagccatccgccaggccctgatgcccgtcatccttcaggacgcacccagcgccccaggccacgcgccccacagacaagcttctctgagcatctctgtgtccaacagtcagatccaagagaatgtggacattgccactgtctaccagatcttccctgacgaagtgctgggctcagggcagtttggagtggtctatggaggaaaacaccggaagacaggccgggacgtggcagttaaggtcattgacaaactgcgcttccctaccaagcaggagagccagctccggaatgaagtggccattctgcagagcctgcggcatcccgggatcgtgaacctggagtgcatgttcgagacgcctgagaaagtgtttgtggtgatggagaagctgcatggggacatgttggagatgatcctgtccagtgagaagggccggctgcctgagcgcctcaccaagttcctcatcacccagatcctggtggctttgagacaccttcacttcaagaacattgtccactgtgacttgaaaccagaaaacgtgttgctggcatcagcagacccatttcctcaggtgaagctgtgtgactttggctttgctcgcatcatcggcgagaagtcgttccgccgctcagtggtgggcacgccggcctacctggcacccgaggtgctgctcaaccagggctacaaccgctcgctggacatgtggtcagtgggcgtgatcatgtacgtcagcctcagcggcaccttccctttcaacgaggatgaggacatcaatgaccagatccagaacgccgccttcatgtacccggccagcccctggagccacatctcagctggagccattgacctcatcaacaacctgctgcaggtgaagatgcgcaaacgctacagcgtggacaaatctctcagccacccctggttacaggagtaccagacgtggctggacctccgagagctggaggggaagatgggagagcgatacatcacgcatgagagtgacgacgcgcgctgggagcagtttgcagcagagcatccgctgcctgggtctgggctgcccacggacagggatctcggtggggcctgtccaccacaggaccacgacatgcaggggctggcggagcgcatcagtgttctctgaggtcctgtgccctcgtccagctgctgccctccacagcggttcttcacaggatcccagcaatgaactgttctagggaaagtggcttcctgcccaaactggatgggacacgtggggagtggggtggggggagctatttccaaggcccctccctgtttccccagcaattaaaacggactcatctctggccccatggccttgatctcagcacacggcactctcgaatcattactctgttgtaccaacatggagttcatctggaaggaggactgcctgaaaagaggaaggatgg

SEQ ID NO: 16014 - DNA, 3347 bp, Homo sapiens
cgccgccgccgacttaaactttggagggggaaaaagagctactggcgcctggcgaccctccctgccccccacccaaccccgctccggcaacgcccccttcctcacggctcccgaccgaacttttctccaacttctgcgactcgtgagattcccttctacccactccggccctcgggacccctctgcccatcccctggccggtcgggtccctgcgaacccctttatctctggaatccactcggtccccgactcagagactcctgccctccacccccaaggaccccgccatcctcaggtcccctccgcctgccagatcttttctcggatccccgctctcccaccacctgctcacgagatcccgcggatctagaacccagggtcccccggggccccccggccgggtcccgggtgggctccaggcggccggtccccggcctccccccatggccaccgccccctcttatcccgccgggctccctggctctcccgggccggggtctcctccgccccccggcggcctagagctgcagtcgccgccaccgctactgccccagatcccggccccgggttccggggtctcctttcacatccagatcgggctgacccgcgagttcgtgctgttgcccgccgcctccgagctggctcatgtgaagcagctggcctgttccatcgtggaccagaagttccctgagtgtggcttctacggcctttacgacaagatcctgcttttcaaacatgaccccacgtcggccaacctcctgcagctggtgcgctcgtccggagacatccaggagggcgacctggtggaggtggtgctgtcggcctcggccaccttcgaggacttccagatccgcccgcacgccctcacggtgcactcctatcgggcgcctgccttctgtgatcactgcggggagatgctcttcggcctagtgcgccagggcctcaagtgcgatggctgcgggctgaactaccacaagcgctgtgccttcagcatccccaacaactgtagtggggcccgcaaacggcgcctgtcatccacgtctctggccagtggccactcggtgcgcctcggcacctccgagtccctgccctgcacggctgaagagctgagccgtagcaccaccgaactcctgcctcgccgtcccccgtcatcctcttcctcctcttctgcctcatcgtatacgggccgccccattgagctggacaagatgctgctctccaaggtcaaggtgccgcacaccttcctcatccacagctatacacggcccaccgtttgccaggcttgcaagaaactcctcaagggcctcttccggcagggcctgcaatgcaaagactgcaagtttaactgtcacaaacgctgcgccacccgcgtccctaatgactgcctgggggaggcccttatcaatggagcgatttcagcgaggctgacaagagcgccctcatggatgagtcagaggactccggtgtcatccctggctcccactcagagaatgcgctccacgccagtgaggaggaggaaggcgagggaggcaaggcccagagctccctggggtacatccccctaatgagggtggtgcaatcggtgcgacacacgacgcggaaatccagcaccacgctgcgggagggttgggtggttcattacagcaacaaggacacgctgagaaagcggcactattggcgcctggactgcaagtgtatcacgctcttccagaacaacacgaccaacagatactataaggaaattccgctgtcagaaatcctcacggtggagtccgcccagaacttcagccttgtgccgccgggcaccaacccacactgctttgagatcgtcactgccaatgccacctacttcgtgggcgagatgcctggcgggactccgggtgggccaagtgggcagggggctgaggccgcccggggctgggagacagccatccgccaggccctgatgcccgtcatccttcaggacgcacccagcgccccaggccacgcgccccacagacaagcttctctgagcatctctgtgtccaacagtcagatccaagagaatgtggacattgccactgtctaccagatcttccctgacgaagtgctgggctcagggcagtttggagtggtctatggaggaaaacaccggaagacaggccgggacgtggcagttaaggtcattgacaaactgcgcttccctaccaagcaggagagccagctccggaatgaagtggccattctgcagagcctgcggcatcccgggatcgtgaacctggagtgcatgttcgagacgcctgagaaagtgtttgtggtgatggagaagctgcatggggacatgttggagatgatcctgtccagtgagaagggccggctgcctgagcgcctcaccaagttcctcatcacccagatcctggtggctttgagacaccttcacttcaagaacattgtccactgtgacttgaaaccagaaaacgtgttgctggcatcagcagacccatttcctcaggtgaagctgtgtgactttggctttgctcgcatcatcggcgagaagtcgttccgccgctcagtggtgggcacgccggcctacctggcacccgaggtgctgctcaaccagggctacaaccgctcgctggacatgtggtcagtgggcgtgatcatgtacgtcagcctcagcggcaccttccctttcaacgaggatgaggacatcaatgaccagatccagaacgccgccttcatgtacccggccagcccctggagccacatctcagctggagccattgacctcatcaacaacctgctgcaggtgaagatgcgcaaacgctacagcgtggacaaatctctcagccacccctggttacaggagtaccagacgtggctggacctccgagagctggaggggaagatgggagagcgatacatcacgcatgagagtgacgacgcgcgctgggagcagtttgcagcagagcatccgctgcctgggtctgggctgcccacggacagggatctcggtggggcctgtccaccacaggaccacgacatgcaggggctggcggagcgcatcagtgttctctgaggtcctgtgccctcgtccagctgctgccctccacagcggttcttcacaggatcccagcaatgaactgttctagggaaagtggcttcctgcccaaactggatgggacacgtggggagtggggtggggggagctatttccaaggcccctccctgtttccccagcaattaaaacggactcatctctggccccatggccttgatctcagcacacggcactctcgaatcattactctgttgtaccaacatggagttcatctggaaggaggactgcctgaaaagaggaaggatgg

SEQ ID NO: 16015 - DNA, 2157 bp, Homo sapiens
acaaacaaacagaaaaccaaccctaaattttcccactgagtctatcctggaggctacagtgttacccagggccccaaaaaacccacataatgaatattttattactattacacaattcagtttccttaagttcaccaatatcattatacatcctgtgcaatcaagaaattcactccaggcacattctccaatattggaatgtgccgatggaggaggccaccgatttcagcgaggctgacaagagcgccctcatggatgagtcagaggactccggtgtcatccctggctcccactcagagaatgcgctccacgccagtgaggaggaggaaggcgagggaggcaaggcccagagctccctggggtacatccccctaatgagggtggtgcaatcggtgcgacacacgacgcggaaatccagcaccacgctgcgggagggttgggtggttcattacagcaacaaggacacgctgagaaagcggcactattggcgcctggactgcaagtgtatcacgctcttccagaacaacacgaccaacagatactataaggaaattccgctgtcagaaatcctcacggtggagtccgcccagaacttcagccttgtgccgccgggcaccaacccacactgctttgagatcgtcactgccaatgccacctacttcgtgggcgagatgcctggcgggactccgggtgggccaagtgggcagggggctgaggccgcccggggctgggagacagccatccgccaggccctgatgcccgtcatccttcaggacgcacccagcgccccaggccacgcgccccacagacaagcttctctgagcatctctgtgtccaacagtcagatccaagagaatgtggacattgccactgtctaccagatcttccctgacgaagtgctgggctcagggcagtttggagtggtctatggaggaaaacaccggaagacaggccgggacgtggcagttaaggtcattgacaaactgcgcttccctaccaagcaggagagccagctccggaatgaagtggccattctgcagagcctgcggcatcccgggatcgtgaacctggagtgcatgttcgagacgcctgagaaagtgtttgtggtgatggagaagctgcatggggacatgttggagatgatcctgtccagtgagaagggccggctgcctgagcgcctcaccaagttcctcatcacccagatcctggtggctttgagacaccttcacttcaagaacattgtccactgtgacttgaaaccagaaaacgtgttgctggcatcagcagacccatttcctcaggtgaagctgtgtgactttggctttgctcgcatcatcggcgagaagtcgttccgccgctcagtggtgggcacgccggcctacctggcacccgaggtgctgctcaaccagggctacaaccgctcgctggacatgtggtcagtgggcgtgatcatgtacgtcagcctcagcggcaccttccctttcaacgaggatgaggacatcaatgaccagatccagaacgccgccttcatgtacccggccagcccctggagccacatctcagctggagccattgacctcatcaacaacctgctgcaggtgaagatgcgcaaacgctacagcgtggacaaatctctcagccacccctggttacaggagtaccagacgtggctggacctccgagagctggaggggaagatgggagagcgatacatcacgcatgagagtgacgacgcgcgctgggagcagtttgcagcagagcatccgctgcctgggtctgggctgcccacggacagggatctcggtggggcctgtccaccacaggaccacgacatgcaggggctggcggagcgcatcagtgttctctgaggtcctgtgccctcgtccagctgctgccctccacagcggttcttcacaggatcccagcaatgaactgttctagggaaagtggcttcctgcccaaactggatgggacacgtggggagtggggtggggggagctatttccaaggcccctccctgtttccccagcaattaaaacggactcatctctggccccatggccttgatctcagcacacggcactctcgaatcattactctgttgtaccaacatggagttcatctggaaggaggactgcctgaaaagaggaaggatgg

SEQ ID NO: 16016 - DNA, 3422 bp, Homo sapiens
cgccgccgccgacttaaactttggagggggaaaaagagctactggcgcctggcgaccctccctgccccccacccaaccccgctccggcaacgcccccttcctcacggctcccgaccgaacttttctccaacttctgcgactcgtgagattcccttctacccactccggccctcgggacccctctgcccatcccctggccggtcgggtccctgcgaacccctttatctctggaatccactcggtccccgactcagagactcctgccctccacccccaaggaccccgccatcctcaggtcccctccgcctgccagatcttttctcggatccccgctctcccaccacctgctcacgagatcccgcggatctagaacccagggtcccccggggccccccggccgggtcccgggtgggctccaggcggccggtccccggcctccccccatggccaccgccccctcttatcccgccgggctccctggctctcccgggccggggtctcctccgccccccggcggcctagagctgcagtcgccgccaccgctactgccccagatcccggccccgggttccggggtctcctttcacatccagatcgggctgacccgcgagttcgtgctgttgcccgccgcctccgagctggctcatgtgaagcagctggcctgttccatcgtggaccagaagttccctgagtgtggcttctacggcctttacgacaagatcctgcttttcaaacatgaccccacgtcggccaacctcctgcagctggtgcgctcgtccggagacatccaggagggcgacctggtggaggtggtgctgtcggcctcggccaccttcgaggacttccagatccgcccgcacgccctcacggtgcactcctatcgggcgcctgccttctgtgatcactgcggggagatgctcttcggcctagtgcgccagggcctcaagtgcgatggctgcgggctgaactaccacaagcgctgtgccttcagcatccccaacaactgtagtggggcccgcaaacggcgcctgtcatccacgtctctggccagtggccactcggtgcgcctcggcacctccgagtccctgccctgcacggctgaagagctgagccgtagcaccaccgaactcctgcctcgccgtcccccgtcatcctcttcctcctcttctgcctcatcgtatacgggccgccccattgagctggacaagatgctgctctccaaggtcaaggtgccgcacaccttcctcatccacagctatacacggcccaccgtttgccaggcttgcaagaaactcctcaagggcctcttccggcagggcctgcaatgcaaagactgcaagtttaactgtcacaaacgctgcgccacccgcgtccctaatgactgcctgggggaggcccttatcaatggagatgtgccgatggaggaggccaccgatttcagcgaggctgacaagagcgccctcatggatgagtcagaggactccggtgtcatccctggctcccactcagagaatgcgctccacgccagtgaggaggaggaaggcgagggaggcaaggcccagagctccctggggtacatccccctaatgagggtggtgcaatcggtgcgacacacgacgcggaaatccagcaccacgctgcgggagggttgggtggttcattacagcaacaaggacacgctgagaaagcggcactattggcgcctggactgcaagtgtatcacgctcttccagaacaacacgaccaacagatactataaggaaattccgctgtcagaaatcctcacggtggagtccgcccagaacttcagccttgtgccgccgggcaccaacccacactgctttgagatcgtcactgccaatgccacctacttcgtgggcgagatgcctggcgggactccgggtgggccaagtgggcagggggctgaggccgcccggggctgggagacagccatccgcaggcctgatgcccgtcatccttcagggcctggcggatggctgtctcccagccccaggccctgatgcccgtcatccttcaggacgcacccagcgccccaggccacgcgccccacagacaagcttctctgagcatctctgtgtccaacagtcagatccaagagaatgtggacattgccactgtctaccagatcttccctgacgaagtgctgggctcagggcagtttggagtggtctatggaggaaaacaccggaagacaggccgggacgtggcagttaaggtcattgacaaactgcgcttccctaccaagcaggagagccagctccggaatgaagtggccattctgcagagcctgcggcatcccgggatcgtgaacctggagtgcatgttcgagacgcctgagaaagtgtttgtggtgatggagaagctgcatggggacatgttggagatgatcctgtccagtgagaagggccggctgcctgagcgcctcaccaagttcctcatcacccagatcctggtggctttgagacaccttcacttcaagaacattgtccactgtgacttgaaaccagaaaacgtgttgctggcatcagcagacccatttcctcaggtgaagctgtgtgactttggctttgctcgcatcatcggcgagaagtcgttccgccgctcagtggtgggcacgccggcctacctggcacccgaggtgctgctcaaccagggctacaaccgctcgctggacatgtggtcagtgggcgtgatcatgtacgtcagcctcagcggcaccttccctttcaacgaggatgaggacatcaatgaccagatccagaacgccgccttcatgtacccggccagcccctggagccacatctcagctggagccattgacctcatcaacaacctgctgcaggtgaagatgcgcaaacgctacagcgtggacaaatctctcagccacccctggttacaggagtaccagacgtggctggacctccgagagctggaggggaagatgggagagcgatacatcacgcatgagagtgacgacgcgcgctgggagcagtttgcagcagagcatccgctgcctgggtctgggctgcccacggacagggatctcggtggggcctgtccaccacaggaccacgacatgcaggggctggcggagcgcatcagtgttctctgaggtcctgtgccctcgtccagctgctgccctccacagcggttcttcacaggatcccagcaatgaactgttctagggaaagtggcttcctgcccaaactggatgggacacgtggggagtggggtggggggagctatttccaaggcccctccctgtttccccagcaattaaaacggactcatctctggccccatggccttgatctcagcacacggcactctcgaatcattactctgttgtaccaacatggagttcatctggaaggaggactgcctgaaaagaggaaggatgg

SEQ ID NO: 16017 - DNA, 3266 bp, Homo sapiens
cgccgccgccgacttaaactttggagggggaaaaagagctactggcgcctggcgaccctccctgccccccacccaaccccgctccggcaacgcccccttcctcacggctcccgaccgaacttttctccaacttctgcgactcgtgagattcccttctacccactccggccctcgggacccctctgcccatcccctggccggtcgggtccctgcgaacccctttatctctggaatccactcggtccccgactcagagactcctgccctccacccccaaggaccccgccatcctcaggtcccctccgcctgccagatcttttctcggatccccgctctcccaccacctgctcacgagatcccgcggatctagaacccagggtcccccggggccccccggccgggtcccgggtgggctccaggcggccggtccccggcctccccccatggccaccgccccctcttatcccgccgggctccctggctctcccgggccggggtctcctccgccccccggcggcctagagctgcagtcgccgccaccgctactgccccagatcccggccccgggttccggggtctcctttcacatccagatcgggctgacccgcgagttcgtgctgttgcccgccgcctccgagctggctcatgtgaagcagctggcctgttccatcgtggaccagaagttccctgagtgtggcttctacggcctttacgacaagatcctgcttttcaaacatgaccccacgtcggccaacctcctgcagctggtgcgctcgtccggagacatccaggagggcgacctggtggaggtggtgctgtcggcctcggccaccttcgaggacttccagatccgcccgcacgccctcacggtgcactcctatcgggcgcctgccttctgtgatcactgcggggagatgctcttcggcctagtgcgccagggcctcaagtgcgatggctgcgggctgaactaccacaagcgctgtgccttcagcatccccaacaactgtagtggggcccgcaaacggcgcctgtcatccacgtctctggccagtggccactcggtgcgcctcggcacctccgagtccctgccctgcacggctgaagagctgagccgtagcaccaccgaactcctgcctcgccgtcccccgtcatcctcttcctcctcttctgcctcatcgtatacgggccgccccattgagctggacaagatgctgctctccaaggtcaaggtgccgcacaccttcctcatccacagctatacacggcccaccgtttgccaggcttgcaagaaactcctcaagggcctcttccggcagggcctgcaatgcaaagactgcaagtttaactgtcacaaacgctgcgccacccgcgtccctaatgactgcctgggggaggcccttatcaatggagatgtgccgatggaggaggccaccgatttcagcgaggctgacaagagcgccctcatggatgagtcagaggactccggtgtcatccctggctcccactcagagaatgcgctccacgccagtgaggaggaggaaggcgagggaggcaaggcccagagctccctggggtacatccccctaatgagggtggtgcaatcggtgcgacacacgacgcggaaatccagcaccacgctgcgggagggttgggtggttcattacagcaacaaggacacgctgagaaagcggcactattggcgcctggactgcaagtgtatcacgctcttccagaacaacacgaccaacagatactataaggaaattccgctgtcagaaatcctcacggtggagtccgcccagaacttcagccttgtgccgccgggcaccaacccacactgctttgagatcgtcactgccaatgccacctacttcgtgggcgagatgcctggcgggactccgggtgggccaagtgggcagggggctgaggccgcccggggctgggagacagccatccgccaggccctgatgcccgtcatccttcaggacgcacccagcgccccaggccacgcgccccacagacaagcttctctgagcatctctgtgtccaacagtcagatccaagagaatgtggacattgccactgtctaccagatcttccctgacgaagtgctgggctcagggcagtttggagtggtctatggaggaaaacaccggaagacaggccgggacgtggcagttaaggtcattgacaaactgcgcttccctaccaagcaggagagccagctccggaatgaagtggccattctgcagagcctgcggcatcccgggatcgtgaacctggagtgcatgttcgagacgcctgagaaagtgtttgtggtgatggagaagctgcatggggacatgttggagatgatcctgtccagtgagaagggccggctgcctgagcgcctcaccaagttcctcatcacccagatcctggtggctttgagacaccttcacttcaagaacattgtccactgtgacttgaaaccagaaaacgtgttgctggcatcagcagacccatttcctcaggtgaagctgtgtgactttggctttgctcgcatcatcggcgagaagtcgttccgccgctcagtggtgggcacgccggcctacctggcacccgaggtgctgctcaaccagggctacaaccgctcgctggacatgtggtcagtgggcgtgatcatgtacgtcagcctcagcggcaccttccctttcaacgaggatgaggacatcaatgaccagatccagaacgccgccttcatgtacccggccagcccctggagccacatctcagctggagccattgacctcatcaacaacctgctgcaggtgaagatgcgcaaacgctacagcgtggacaaatctctcagccacccctggttacaggagtaccagacgtggctggacctccgagagctggaggggaagatgggagagcgatacatcacgcatgagagtgacgacgcgcgctgggagcagtttgcagcagagcatccgctgcctgggtctgggctgcccacggacagggatctcggtggggcctgtccaccacaggaccacgacatgcaggggctggcggagcgcatcagtgttctctgaggtcctgtgccctcgtccagctgctgccctccacagcggttcttcacaggatcccagcaatgaactgttctagggaaagtggcttcctgcccaaactggatgggacacgtggggagtggggtggggggagctatttccaaggcccctccctgtttccccagcaattaaaacggactcatctctggc

SEQ ID NO: 16018 - DNA, 1835 bp, Homo sapiens
ggtggggtggggttacggcgtagggtaggtgctagagttacggcgtgcacgtggtgctccaggcacctggagccccaagcagctccacgggatagggactgggcaggaaagtctggcggttcacgtgactcttcaaacatctctgcagagaaagcggcactattggcgcctggactgcaagtgtatcacgctcttccagaacaacacgaccaacagatactataaggaaattccgctgtcagaaatcctcacggtggagtccgcccagaacttcagccttgtgccgccgggcaccaacccacactgctttgagatcgtcactgccaatgccacctacttcgtgggcgagatgcctggcgggactccgggtgggccaagtgggcagggggctgaggccgcccggggctgggagacagccatccgccaggccctgatgcccgtcatccttcaggacgcacccagcgccccaggccacgcgccccacagacaagcttctctgagcatctctgtgtccaacagtcagatccaagagaatgtggacattgccactgtctaccagatcttccctgacgaagtgctgggctcagggcagtttggagtggtctatggaggaaaacaccggaagacaggccgggacgtggcagttaaggtcattgacaaactgcgcttccctaccaagcaggagagccagctccggaatgaagtggccattctgcagagcctgcggcatcccgggatcgtgaacctggagtgcatgttcgagacgcctgagaaagtgtttgtggtgatggagaagctgcatggggacatgttggagatgatcctgtccagtgagaagggccggctgcctgagcgcctcaccaagttcctcatcacccagatcctggtggctttgagacaccttcacttcaagaacattgtccactgtgacttgaaaccagaaaacgtgttgctggcatcagcagacccatttcctcaggtgaagctgtgtgactttggctttgctcgcatcatcggcgagaagtcgttccgccgctcagtggtgggcacgccggcctacctggcacccgaggtgctgctcaaccagggctacaaccgctcgctggacatgtggtcagtgggcgtgatcatgtacgtcagcctcagcggcaccttccctttcaacgaggatgaggacatcaatgaccagatccagaacgccgccttcatgtacccggccagcccctggagccacatctcagctggagccattgacctcatcaacaacctgctgcaggtgaagatgcgcaaacgctacagcgtggacaaatctctcagccacccctggttacaggagtaccagacgtggctggacctccgagagctggaggggaagatgggagagcgatacatcacgcatgagagtgacgacgcgcgctgggagcagtttgcagcagagcatccgctgcctgggtctgggctgcccacggacagggatctcggtggggcctgtccaccacaggaccacgacatgcaggggctggcggagcgcatcagtgttctctgaggtcctgtgccctcgtccagctgctgccctccacagcggttcttcacaggatcccagcaatgaactgttctagggaaagtggcttcctgcccaaactggatgggacacgtggggagtggggtggggggagctatttccaaggcccctccctgtttccccagcaattaaaacggactcatctctggccccatggccttgatctcagcacacggcactctcgaatcattactctgttgtaccaacatggagttcatctggaaggaggactgcctgaaaagaggaaggatgg

SEQ ID NO: 16019 - DNA, 3315 bp, Homo sapiens
cgccgccgccgacttaaactttggagggggaaaaagagctactggcgcctggcgaccctccctgccccccacccaaccccgctccggcaacgcccccttcctcacggctcccgaccgaacttttctccaacttctgcgactcgtgagattcccttctacccactccggccctcgggacccctctgcccatcccctggccggtcgggtccctgcgaacccctttatctctggaatccactcggtccccgactcagagactcctgccctccacccccaaggaccccgccatcctcaggtcccctccgcctgccagatcttttctcggatccccgctctcccaccacctgctcacgagatcccgcggatctagaacccagggtcccccggggccccccggccgggtcccgggtgggctccaggcggccggtccccggcctccccccatggccaccgccccctcttatcccgccgggctccctggctctcccgggccggggtctcctccgccccccggcggcctagagctgcagtcgccgccaccgctactgccccagatcccggccccgggttccggggtctcctttcacatccagatcgggctgacccgcgagttcgtgctgttgcccgccgcctccgagctggctcatgtgaagcagctggcctgttccatcgtggaccagaagttccctgagtgtggcttctacggcctttacgacaagatcctgcttttcaaacatgaccccacgtcggccaacctcctgcagctggtgcgctcgtccggagacatccaggagggcgacctggtggaggtggtgctgtcggcctcggccaccttcgaggacttccagatccgcccgcacgccctcacggtgcactcctatcgggcgcctgccttctgtgatcactgcggggagatgctcttcggcctagtgcgccagggcctcaagtgcgatggctgcgggctgaactaccacaagcgctgtgccttcagcatccccaacaactgtagtggggcccgcaaacggcgcctgtcatccacgtctctggccagtggccactcggtgcgcctcggcacctccgagtccctgccctgcacggctgaagagctgagccgtagcaccaccgaactcctgcctcgccgtcccccgtcatcctcttcctcctcttctgcctcatcgtatacgggccgccccattgagctggacaagatgctgctctccaaggtcaaggtgccgcacaccttcctcatccacagctatacacggcccaccgtttgccaggcttgcaagaaactcctcaagggcctcttccggcagggcctgcaatgcaaagactgcaagtttaactgtcacaaacgctgcgccacccgcgtccctaatgactgcctgggggaggcccttatcaatggagatgtgccgatggaggaggccaccgatttcagcgaggctgacaagagcgccctcatggatgagtcagaggactccggtgtcatccctggctcccactcagagaatgcgctccacgccagtgaggaggaggaaggcgagggaggcaaggcccagagctccctggggtacatccccctaatgagggtggtgcaatcggtgcgacacacgacgcggaaatccagcaccacgctgcgggagggttgggtggttcattacagcaacaaggacacgctgagaaagcggcactattggcgcctggactgcaagtgtatcacgctcttccagaacaacacgaccaacagatactataaggaaattccgctgtcagaaatcctcacggtggagtccgcccagaacttcagccttgtgccgccgggcaccaacccacactgctttgagatcgtcactgccaatgccacctacttcgtgggcgagatgcctggcgggactccgggtgggccaagtgggcagggggctgaggccgcccggggctgggagacagccatccgccaggccctgatgcccgtcatccttcaggacgcacccagcgccccaggccacgcgccccacagacaagcttctctgagcatctctgtgtccaacagtcagatccaagagaatgtggacattgccactgtctaccagatcttccctgacgaagtgctgggctcagggcagtttggagtggtctatggaggcttccctaccaagcaggagagccagctccggaatgaagtggccattctgcagagcctgcggcatcccgggatcgtgaacctggagtgcatgttcgagacgcctgagaaagtgtttgtggtgatggagaagctgcatggggacatgttggagatgatcctgtccagtgagaagggccggctgcctgagcgcctcaccaagttcctcatcacccagatcctggtggctttgagacaccttcacttcaagaacattgtccactgtgacttgaaaccagaaaacgtgttgctggcatcagcagacccatttcctcaggtgaagctgtgtgactttggctttgctcgcatcatcggcgagaagtcgttccgccgctcagtggtgggcacgccggcctacctggcacccgaggtgctgctcaaccagggctacaaccgctcgctggacatgtggtcagtgggcgtgatcatgtacgtcagcctcagcggcaccttccctttcaacgaggatgaggacatcaatgaccagatccagaacgccgccttcatgtacccggccagcccctggagccacatctcagctggagccattgacctcatcaacaacctgctgcaggtgaagatgcgcaaacgctacagcgtggacaaatctctcagccacccctggttacaggagtaccagacgtggctggacctccgagagctggaggggaagatgggagagcgatacatcacgcatgagagtgacgacgcgcgctgggagcagtttgcagcagagcatccgctgcctgggtctgggctgcccacggacagggatctcggtggggcctgtccaccacaggaccacgacatgcaggggctggcggagcgcatcagtgttctctgaggtcctgtgccctcgtccagctgctgccctccacagcggttcttcacaggatcccagcaatgaactgttctagggaaagtggcttcctgcccaaactggatgggacacgtggggagtggggtggggggagctatttccaaggcccctccctgtttccccagcaattaaaacggactcatctctggccccatggccttgatctcagcacacggcactctcgaatcattactctgttgtaccaacatggagttcatctggaaggaggactgcctgaaaagaggaaggatgg

SEQ ID NO: 16020 - DNA, 1341 bp, Homo sapiens
catttccatttgcacccctgacctgccctgtcttcaccctgtaggacattgccactgtctaccagatcttccctgacgaagtgctgggctcagggcagtttggagtggtctatggaggaaaacaccggaagacaggccgggacgtggcagttaaggtcattgacaaactgcgcttccctaccaagcaggagagccagctccggaatgaagtggccattctgcagagcctgcggcatcccgggatcgtgaacctggagtgcatgttcgagacgcctgagaaagtgtttgtggtgatggagaagctgcatggggacatgttggagatgatcctgtccagtgagaagggccggctgcctgagcgcctcaccaagttcctcatcacccagatcctggtggctttgagacaccttcacttcaagaacattgtccactgtgacttgaaaccagaaaacgtgttgctggcatcagcagacccatttcctcaggtgaagctgtgtgactttggctttgctcgcatcatcggcgagaagtcgttccgccgctcagtggtgggcacgccggcctacctggcacccgaggtgctgctcaaccagggctacaaccgctcgctggacatgtggtcagtgggcgtgatcatgtacgtcagcctcagcggcaccttccctttcaacgaggatgaggacatcaatgaccagatccagaacgccgccttcatgtacccggccagcccctggagccacatctcagctggagccattgacctcatcaacaacctgctgcaggtgaagatgcgcaaacgctacagcgtggacaaatctctcagccacccctggttacaggagtaccagacgtggctggacctccgagagctggaggggaagatgggagagcgatacatcacgcatgagagtgacgacgcgcgctgggagcagtttgcagcagagcatccgctgcctgggtctgggctgcccacggacagggatctcggtggggcctgtccaccacaggaccacgacatgcaggggctggcggagcgcatcagtgttctctgaggtcctgtgccctcgtccagctgctgccctccacagcggttcttcacaggatcccagcaatgaactgttctagggaaagtggcttcctgcccaaactggatgggacacgtggggagtggggtggggggagctatttccaaggcccctccctgtttccccagcaattaaaacggactcatctctggccccatggccttgatctcagcacacggcactctcgaatcattactctgttgtaccaacatggagttcatctggaaggaggactgcctgaaaagaggaaggatgg

SEQ ID NO: 16021 - DNA, 3821 bp, Homo sapiens
  misc_feature (3212)..(3212): n is a, c, g, or t
  misc_feature (3243)..(3243): n is a, c, g, or t
cgccgccgccgacttaaactttggagggggaaaaagagctactggcgcctggcgaccctccctgccccccacccaaccccgctccggcaacgcccccttcctcacggctcccgaccgaacttttctccaacttctgcgactcgtgagattcccttctacccactccggccctcgggacccctctgcccatcccctggccggtcgggtccctgcgaacccctttatctctggaatccactcggtccccgactcagagactcctgccctccacccccaaggaccccgccatcctcaggtcccctccgcctgccagatcttttctcggatccccgctctcccaccacctgctcacgagatcccgcggatctagaacccagggtcccccggggccccccggccgggtcccgggtgggctccaggcggccggtccccggcctccccccatggccaccgccccctcttatcccgccgggctccctggctctcccgggccggggtctcctccgccccccggcggcctagagctgcagtcgccgccaccgctactgccccagatcccggccccgggttccggggtctcctttcacatccagatcgggctgacccgcgagttcgtgctgttgcccgccgcctccgagctggctcatgtgaagcagctggcctgttccatcgtggaccagaagttccctgagtgtggcttctacggcctttacgacaagatcctgcttttcaaacatgaccccacgtcggccaacctcctgcagctggtgcgctcgtccggagacatccaggagggcgacctggtggaggtggtgctgtcggcctcggccaccttcgaggacttccagatccgcccgcacgccctcacggtgcactcctatcgggcgcctgccttctgtgatcactgcggggagatgctcttcggcctagtgcgccagggcctcaagtgcgatggctgcgggctgaactaccacaagcgctgtgccttcagcatccccaacaactgtagtggggcccgcaaacggcgcctgtcatccacgtctctggccagtggccactcggtgcgcctcggcacctccgagtccctgccctgcacggctgaagagctgagccgtagcaccaccgaactcctgcctcgccgtcccccgtcatcctcttcctcctcttctgcctcatcgtatacgggccgccccattgagctggacaagatgctgctctccaaggtcaaggtgccgcacaccttcctcatccacagctatacacggcccaccgtttgccaggcttgcaagaaactcctcaagggcctcttccggcagggcctgcaatgcaaagactgcaagtttaactgtcacaaacgctgcgccacccgcgtccctaatgactgcctgggggaggcccttatcaatggagatgtgccgatggaggaggccaccgatttcagcgaggctgacaagagcgccctcatggatgagtcagaggactccggtgtcatccctggctcccactcagagaatgcgctccacgccagtgaggaggaggaaggcgagggaggcaaggcccagagctccctggggtacatccccctaatgagggtggtgcaatcggtgcgacacacgacgcggaaatccagcaccacgctgcgggagggttgggtggttcattacagcaacaaggacacgctgagaaagcggcactattggcgcctggactgcaagtgtatcacgctcttccagaacaacacgaccaacagatactataaggaaattccgctgtcagaaatcctcacggtggagtccgcccagaacttcagccttgtgccgccgggcaccaacccacactgctttgagatcgtcactgccaatgccacctacttcgtgggcgagatgcctggcgggactccgggtgggccaagtgggcagggggctgaggccgcccggggctgggagacagccatccgccaggccctgatgcccgtcatccttcaggacgcacccagcgccccaggccacgcgccccacagacaagcttctctgagcatctctgtgtccaacagtcagatccaagagaatgtggacattgccactgtctaccagatcttccctgacgaagtgctgggctcagggcagtttggagtggtctatggaggaaaacaccggaagacaggccgggacgtggcagttaaggtcattgacaaactgcgcttccctaccaagcaggagagccagctccggaatgaagtggccattctgcagagcctgcggcatcccgggatcgtgaacctggagtgcatgttcgagacgcctgagaaagtgtttgtggtgatggagaagctgcatggggacatgttggagatgatcctgtccagtgagaagggccggctgcctgagcgcctcaccaagttcctcatcacccagatcctggtggctttgagacaccttcacttcaagaacattgtccactgtgacttgaaaccagaaaacgtgttgctggcatcagcagacccatttcctcaggtgaagctgtgtgactttggctttgctcgcatcatcggcgagaagtcgttccgccgctcagtggtgggcacgccggcctacctggcacccgaggtgctgctcaaccagggctacaaccgctcgctggacatgtggtcagtgggcgtgatcatgtacgtcagcctcagcggcaccttccctttcaacgaggatgaggacatcaatgaccagatccagaacgccgccttcatgtacccggccagcccctggagccacatctcagctggagccattgacctcatcaacaacctgctgcaggtgaagatgcgcaaacgctacagcgtggacaaatctctcagccacccctggttacaggagtaccagacgtggctggacctccgagagctggaggggaagatgggagagcgatacatcacgcatgagagtgacgacgcgcgctgggagcagtttgcagcagagcatccgctgcctgggtctgggctgcccacggacagggatctcggtggggcctgtccaccacaggaccacgacatgcaggggctggcggagcgcatcagtgttctctgaggtcctgtgccctcgtccagctgctgccctccacagcggttcttcacaggatcccagcaatgaactgttctagggaaagtggcttcctgcccaaactggatgggacacgtggggagtggggtggggggggtngggggcgagctattttccaaaggggcccccncccccccccaacccccccccggcccccccccccccgtttttttttttttttcccccccgccccccccccctttttgggggatttttttcaccccccaatggccaaaattttaaaaagaccggtgacctccaattctgtcccgttggggggcccccccccccaattttggggggccccttttttggaaaacacaaaaaacacgagtacaacaaacaacaagaacatataattatagtattaaacaacaagaagaagaggcgcggcgcggcgcggcggcgctcctcctattaaagaggaagaagttattattctctctctcttcggagaggggggggggcccccccaagagcttcttttgatgcagcgcgcgtttttctcccccgagggctctttttctcttgttggtttcccaacacgggtggtgggtggggttctcccccttttatttgaggtgatgagagctctgcggtatattattatttagcgccctatgagggcacccgcgtgggccgcccgctctgctgttttttttaccacacacgcgctcttccgtgtgacatgcgtggggggacaacaaa

SEQ ID NO: 16022 - DNA, 1252 bp, Homo sapiens
ggtggggtggggttacggcgtagggtaggtgctagagttacggcgtgcacgtggtgctccaggcacctggagccccaagcagctccacgggatagggactgggcaggaaagtctggcggttcacgtgactcttcaaacatctctgcagagaaagcggcactattggcgcctggactgcaagtgtatcacgctcttccagaacaacacgaccaacagatactataaggaaattccgctgtcagaaatcctcacggtggagtccgcccagaacttcagccttgtgccgccgggcaccaacccacactgctttgagatcaccttcacttcaagaacattgtccactgtgacttgaaaccagaaaacgtgttgctggcatcagcagacccatttcctcaggtgaagctgtgtgactttggctttgctcgcatcatcggcgagaagtcgttccgccgctcagtggtgggcacgccggcctacctggcacccgaggtgctgctcaaccagggctacaaccgctcgctggacatgtggtcagtgggcgtgatcatgtacgtcagcctcagcggcaccttccctttcaacgaggatgaggacatcaatgaccagatccagaacgccgccttcatgtacccggccagcccctggagccacatctcagctggagccattgacctcatcaacaacctgctgcaggtgaagatgcgcaaacgctacagcgtggacaaatctctcagccacccctggttacaggagtaccagacgtggctggacctccgagagctggaggggaagatgggagagcgatacatcacgcatgagagtgacgacgcgcgctgggagcagtttgcagcagagcatccgctgcctgggtctgggctgcccacggacagggatctcggtggggcctgtccaccacaggaccacgacatgcaggggctggcggagcgcatcagtgttctctgaggtcctgtgccctcgtccagctgctgccctccacagcggttcttcacaggatcccagcaatgaactgttctagggaaagtggcttcctgcccaaactggatgggacacgtggggagtggggtggggggagctatttccaaggcccctccctgtttccccagcaattaaaacggactcatctctggccccatggccttgatctcagcacacggcactctcgaatcattactctgttgtaccaacatggagttcatctggaaggaggactgcctgaaaagaggaaggatgg

SEQ ID NO: 16023 - DNA, 1097 bp, Homo sapiens
aaaaaaaaaaaaagaaaattttcaaaaaaaaaaaaaaaaaaaaaaaaaaaagtatggatgggtttggagggctggctgctgaggttgggatttggctgagtacctatctacctttcttactgggcccatctgctcccctcagatcctggtggctttgagacaccttcacttcaagaacattgtccactgtgacttgaaaccagaaaacgtgttgctggcatcagcagacccatttcctcaggtgaagctgtgtgactttggctttgctcgcatcatcggcgagaagtcgttccgccgctcagtggtgggcacgccggcctacctggcacccgaggtgctgctcaaccagggctacaaccgctcgctggacatgtggtcagtgggcgtgatcatgtacgtcagcctcagcggcaccttccctttcaacgaggatgaggacatcaatgaccagatccagaacgccgccttcatgtacccggccagcccctggagccacatctcagctggagccattgacctcatcaacaacctgctgcaggtgaagatgcgcaaacgctacagcgtggacaaatctctcagccacccctggttacaggagtaccagacgtggctggacctccgagagctggaggggaagatgggagagcgatacatcacgcatgagagtgacgacgcgcgctgggagcagtttgcagcagagcatccgctgcctgggtctgggctgcccacggacagggatctcggtggggcctgtccaccacaggaccacgacatgcaggggctggcggagcgcatcagtgttctctgaggtcctgtgccctcgtccagctgctgccctccacagcggttcttcacaggatcccagcaatgaactgttctagggaaagtggcttcctgcccaaactggatgggacacgtggggagtggggtggggggagctatttccaaggcccctccctgtttccccagcaattaaaacggactcatctctggccccatggccttgatctcagcacacggcactctcgaatcattactctgttgtaccaacatggagttcatctggaaggaggactgcctgaaaagaggaaggatgg

SEQ ID NO: 16024 - DNA, 2871 bp, Homo sapiens
cgccgccgccgacttaaactttggagggggaaaaagagctactggcgcctggcgaccctccctgccccccacccaaccccgctccggcaacgcccccttcctcacggctcccgaccgaacttttctccaacttctgcgactcgtgagattcccttctacccactccggccctcgggacccctctgcccatcccctggccggtcgggtccctgcgaacccctttatctctggaatccactcggtccccgactcagagactcctgccctccacccccaaggaccccgccatcctcaggtcccctccgcctgccagatcttttctcggatccccgctctcccaccacctgctcacgagatcccgcggatctagaacccagggtcccccggggccccccggccgggtcccgggtgggctccaggcggccggtccccggcctccccccatggccaccgccccctcttatcccgccgggctccctggctctcccgggccggggtctcctccgccccccggcggcctagagctgcagtcgccgccaccgctactgccccagatcccggccccgggttccggggtctcctttcacatccagatcgggctgacccgcgagttcgtgctgttgcccgccgcctccgagctggctcatgtgaagcagctggcctgttccatcgtggaccagaagttccctgagtgtggcttctacggcctttacgacaagatcctgcttttcaaacatgaccccacgtcggccaacctcctgcagctggtgcgctcgtccggagacatccaggagggcgacctggtggaggtggtgctgtcggcctcggccaccttcgaggacttccagatccgcccgcacgccctcacggtgcactcctatcgggcgcctgccttctgtgatcactgcggggagatgctcttcggcctagtgcgccagggcctcaagtgcgatggctgcgggctgaactaccacaagcgctgtgccttcagcatccccaacaactgtagtggggcccgcaaacggcgcctgtcatccacgtctctggccagtggccactcggtgcgcctcggcacctccgagtccctgccctgcacggctgaagagctgagccgtagcaccaccgaactcctgcctcgccgtcccccgtcatcctcttcctcctcttctgcctcatcgtatacgggccgccccattgagctggacaagatgctgctctccaaggtcaaggtgccgcacaccttcctcatccacagctatacacggcccaccgtttgccaggcttgcaagaaactcctcaagggcctcttccggcagggcctgcaatgcaaagactgcaagtttaactgtcacaaacgctgcgccacccgcgtccctaatgactgcctgggggaggcccttatcaatggagatgtgccgatggaggaggccaccgatttcagcgaggctgacaagagcgccctcatggatgagtcagaggactccggtgtcatccctggctcccactcagagaatgcgctccacgccagtgaggaggaggaaggcgagggaggcaaggcccagagctccctggggtacatccccctaatgagggtggtgcaatcggtgcgacacacgacgcggaaatccagcaccacgctgcgggagggttgggtggttcattacagcaacaaggacacgctgagaaagcggcactattggcgcctggactgcaagtgtatcacgctcttccagaacaacacgaccaacagatactataaggaaattccgctgtcagaaatcctcacggtggagtccgcccagaacttcagccttgtgccgccgggcaccaacccacactgctttgagatcgtcactgccaatgccacctacttcgtgggcgagatgcctggcgggactccgggtgggccaagtgggcagggggctgaggccgcccggggctgggagacagccatccgccaggccctgatgcccgtcatccttcaggacgcacccagcgccccaggccacgcgccccacagacaagcttctctgagcatctctgtgtccaacagtcagatccaagagaatgtggacattgccactgtctaccagatcttccctgacgaagtgctgggctcagggcagtttggagtggtctatggaggaaaacaccggaagacaggccgggacgtggcagttaaggtcattgacaaactgcgcttccctaccaagcaggagagccagctccggaatgaagtggccattctgcagagcctgcggcatcccgggatcgtgaacctggagtgcatgttcgagacgcctgagaaagtgtttgtggtgatggagaagctgcatggggacatgttggagatgatcctgtccagtgagaagggccggctgcctgagcgcctcaccaagttcctcatcacccagatcctggtggctttgagacaccttcacttcaagaacattgtccactgtgacttgaaaccagaaaacgtgttgctggcatcagcagacccatttcctcaggtgaagctgtgtgactttggctttgctcgcatcatcggcgagaagtcgttccgccgctcagtggtgggcacgccggcctacctggcacccgaggtgctgctcaaccagggctacaaccgctcgctggacatgtggtcagtgggcgtgatcatgtacgtcagcctcagcggcaccttccctttcaacgaggatgaggacatcaatgaccagatccagaacgccgccttcatgtacccggccagcccctggagccacatctcagctggagccagggctggccgggtacatgaaggggccaagccccctgggaagcccacattctccaagcttggaagcccatttggaccttcattcaaca

SEQ ID NO: 16025 - DNA, 2725 bp, Homo sapiens
cgccgccgccgacttaaactttggagggggaaaaagagctactggcgcctggcgaccctccctgccccccacccaaccccgctccggcaacgcccccttcctcacggctcccgaccgaacttttctccaacttctgcgactcgtgagattcccttctacccactccggccctcgggacccctctgcccatcccctggccggtcgggtccctgcgaacccctttatctctggaatccactcggtccccgactcagagactcctgccctccacccccaaggaccccgccatcctcaggtcccctccgcctgccagatcttttctcggatccccgctctcccaccacctgctcacgagatcccgcggatctagaacccagggtcccccggggccccccggccgggtcccgggtgggctccaggcggccggtccccggcctccccccatggccaccgccccctcttatcccgccgggctccctggctctcccgggccggggtctcctccgccccccggcggcctagagctgcagtcgccgccaccgctactgccccagatcccggccccgggttccggggtctcctttcacatccagatcgggctgacccgcgagttcgtgctgttgcccgccgcctccgagctggctcatgtgaagcagctggcctgttccatcgtggaccagaagttccctgagtgtggcttctacggcctttacgacaagatcctgcttttcaaacatgaccccacgtcggccaacctcctgcagctggtgcgctcgtccggagacatccaggagggcgacctggtggaggtggtgctgtcggcctcggccaccttcgaggacttccagatccgcccgcacgccctcacggtgcactcctatcgggcgcctgccttctgtgatcactgcggggagatgctcttcggcctagtgcgccagggcctcaagtgcgatggctgcgggctgaactaccacaagcgctgtgccttcagcatccccaacaactgtagtggggcccgcaaacggcgcctgtcatccacgtctctggccagtggccactcggtgcgcctcggcacctccgagtccctgccctgcacggctgaagagctgagccgtagcaccaccgaactcctgcctcgccgtcccccgtcatcctcttcctcctcttctgcctcatcgtatacgggccgccccattgagctggacaagatgctgctctccaaggtcaaggtgccgcacaccttcctcatccacagctatacacggcccaccgtttgccaggcttgcaagaaactcctcaagggcctcttccggcagggcctgcaatgcaaagactgcaagtttaactgtcacaaacgctgcgccacccgcgtccctaatgactgcctgggggaggcccttatcaatggagatgtgccgatggaggaggccaccgatttcagcgaggctgacaagagcgccctcatggatgagtcagaggactccggtgtcatccctggctcccactcagagaatgcgctccacgccagtgaggaggaggaaggcgagggaggcaaggcccagagctccctggggtacatccccctaatgagggtggtgcaatcggtgcgacacacgacgcggaaatccagcaccacgctgcgggagggttgggtggttcattacagcaacaaggacacgctgagaaagcggcactattggcgcctggactgcaagtgtatcacgctcttccagaacaacacgaccaacagatactataaggaaattccgctgtcagaaatcctcacggtggagtccgcccagaacttcagccttgtgccgccgggcaccaacccacactgctttgagatcgtcactgccaatgccacctacttcgtgggcgagatgcctggcgggactccgggtgggccaagtgggcagggggctgaggccgcccggggctgggagacagccatccgccaggccctgatgcccgtcatccttcaggacgcacccagcgccccaggccacgcgccccacagacaagcttctctgagcatctctgtgtccaacagtcagatccaagagaatgtggacattgccactgtctaccagatcttccctgacgaagtgctgggctcagggcagtttggagtggtctatggaggaaaacaccggaagacaggccgggacgtggcagttaaggtcattgacaaactgcgcttccctaccaagcaggagagccagctccggaatgaagtggccattctgcagagcctgcggcatcccgggatcgtgaacctggagtgcatgttcgagacgcctgagaaagtgtttgtggtgatggagaagctgcatggggacatgttggagatgatcctgtccagtgagaagggccggctgcctgagcgcctcaccaagttcctcatcacccagatcctggtggctttgagacaccttcacttcaagaacattgtccactgtgacttgaaaccagaaaacgtgttgctggcatcagcagacccatttcctcaggtcagttatgtcccctcctgatttggggaaatccaggcaacactgatggccggggtgggggtggggaaggggattatactaatcaagatgtgggggcgaggcacagtggctcttgcctgtaatcagcattttgagaggctgaggcaggaggatcatttgagcccaagagtttgagaccagcctgggcaacatagcgagacctcatctataca

SEQ ID NO: 16026 - DNA, 2498 bp, Homo sapiens
cgccgccgccgacttaaactttggagggggaaaaagagctactggcgcctggcgaccctccctgccccccacccaaccccgctccggcaacgcccccttcctcacggctcccgaccgaacttttctccaacttctgcgactcgtgagattcccttctacccactccggccctcgggacccctctgcccatcccctggccggtcgggtccctgcgaacccctttatctctggaatccactcggtccccgactcagagactcctgccctccacccccaaggaccccgccatcctcaggtcccctccgcctgccagatcttttctcggatccccgctctcccaccacctgctcacgagatcccgcggatctagaacccagggtcccccggggccccccggccgggtcccgggtgggctccaggcggccggtccccggcctccccccatggccaccgccccctcttatcccgccgggctccctggctctcccgggccggggtctcctccgccccccggcggcctagagctgcagtcgccgccaccgctactgccccagatcccggccccgggttccggggtctcctttcacatccagatcgggctgacccgcgagttcgtgctgttgcccgccgcctccgagctggctcatgtgaagcagctggcctgttccatcgtggaccagaagttccctgagtgtggcttctacggcctttacgacaagatcctgcttttcaaacatgaccccacgtcggccaacctcctgcagctggtgcgctcgtccggagacatccaggagggcgacctggtggaggtggtgctgtcggcctcggccaccttcgaggacttccagatccgcccgcacgccctcacggtgcactcctatcgggcgcctgccttctgtgatcactgcggggagatgctcttcggcctagtgcgccagggcctcaagtgcgatggctgcgggctgaactaccacaagcgctgtgccttcagcatccccaacaactgtagtggggcccgcaaacggcgcctgtcatccacgtctctggccagtggccactcggtgcgcctcggcacctccgagtccctgccctgcacggctgaagagctgagccgtagcaccaccgaactcctgcctcgccgtcccccgtcatcctcttcctcctcttctgcctcatcgtatacgggccgccccattgagctggacaagatgctgctctccaaggtcaaggtgccgcacaccttcctcatccacagctatacacggcccaccgtttgccaggcttgcaagaaactcctcaagggcctcttccggcagggcctgcaatgcaaagactgcaagtttaactgtcacaaacgctgcgccacccgcgtccctaatgactgcctgggggaggcccttatcaatggagatgtgccgatggaggaggccaccgatttcagcgaggctgacaagagcgccctcatggatgagtcagaggactccggtgtcatccctggctcccactcagagaatgcgctccacgccagtgaggaggaggaaggcgagggaggcaaggcccagagctccctggggtacatccccctaatgagggtggtgcaatcggtgcgacacacgacgcggaaatccagcaccacgctgcgggagggttgggtggttcattacagcaacaaggacacgctgagaaagcggcactattggcgcctggactgcaagtgtatcacgctcttccagaacaacacgaccaacagatactataaggaaattccgctgtcagaaatcctcacggtggagtccgcccagaacttcagccttgtgccgccgggcaccaacccacactgctttgagatcgtcactgccaatgccacctacttcgtgggcgagatgcctggcgggactccgggtgggccaagtgggcagggggctgaggccgcccggggctgggagacagccatccgccaggccctgatgcccgtcatccttcaggacgcacccagcgccccaggccacgcgccccacagacaagcttctctgagcatctctgtgtccaacagtcagatccaagagaatgtggacattgccactgtctaccagatcttccctgacgaagtgctgggtctgggctgcccacggacagggatctcggtggggcctgtccaccacaggaccacgacatgcaggggctggcggagcgcatcagtgttctctgaggtcctgtgccctcgtccagctgctgccctccacagcggttcttcacaggatcccagcaatgaactgttctagggaaagtggcttcctgcccaaactggatgggacacgtggggagtggggtggggggagctatttccaaggcccctccctgtttccccagcaattaaaacggactcatctctggccccatggccttgatctcagcacacggcactctcgaatcattactctgttgtaccaacatggagttcatctggaaggaggactgcctgaaaagaggaaggatgg

SEQ ID NO: 16027 - DNA, 1997 bp, Homo sapiens
cgccgccgccgacttaaactttggagggggaaaaagagctactggcgcctggcgaccctccctgccccccacccaaccccgctccggcaacgcccccttcctcacggctcccgaccgaacttttctccaacttctgcgactcgtgagattcccttctacccactccggccctcgggacccctctgcccatcccctggccggtcgggtccctgcgaacccctttatctctggaatccactcggtccccgactcagagactcctgccctccacccccaaggaccccgccatcctcaggtcccctccgcctgccagatcttttctcggatccccgctctcccaccacctgctcacgagatcccgcggatctagaacccagggtcccccggggccccccggccgggtcccgggtgggctccaggcggccggtccccggcctccccccatggccaccgccccctcttatcccgccgggctccctggctctcccgggccggggtctcctccgccccccggcggcctagagctgcagtcgccgccaccgctactgccccagatcccggccccgggttccggggtctcctttcacatccagatcgggctgacccgcgagttcgtgctgttgcccgccgcctccgagctggctcatgtgaagcagctggcctgttccatcgtggaccagaagttccctgagtgtggcttctacggcctttacgacaagatcctgcttttcaaacatgaccccacgtcggccaacctcctgcagctggtgcgctcgtccggagacatccaggagggcgacctggtggaggtggtgctgtcggcctcggccaccttcgaggacttccagatccgcccgcacgccctcacggtgcactcctatcgggcgcctgccttctgtgatcactgcggggagatgctcttcggcctagtgcgccagggcctcaagtgcgatggctgcgggctgaactaccacaagcgctgtgccttcagcatccccaacaactgtagtggggcccgcaaacggcgcctgtcatccacgtctctggccagtggccactcggtgcgcctcggcacctccgagtccctgccctgcacggctgaagagctgagccgtagcaccaccgaactcctgcctcgccgtcccccgtcatcctcttcctcctcttctgcctcatcgtatacgggccgccccattgagctggacaagatgctgctctccaaggtcaaggtgccgcacaccttcctcatccacagctatacacggcccaccgtttgccaggcttgcaagaaactcctcaagggcctcttccggcagggcctgcaatgcaaagactgcaagtttaactgtcacaaacgctgcgccacccgcgtccctaatgactgcctgggggaggcccttatcaatggagatgtgccgatggaggaggccaccgatttcagcgaggctgacaagagcgccctcatggatgagtcagaggactccggtgtcatccctggctcccactcagagaatgcgctccacgccagtgaggaggaggaaggcgagggaggcaaggcccagagctccctggggtacatccccctaatgagggtggtgcaatcggtgcgacacacgacgcggaaatccagcaccacgctgcgggagggttgggtggttcattacagcaacaaggacacgctgagaaagcggcactattggcgcctggactgcaagtgtatcacgctcttccagaacaacacgaccaacagatactataaggaaattccgctgtcagaaatcctcacggtggagtccgcccagaatggatgggacacgtggggagtggggtggggggagctatttccaaggcccctccctgtttccccagcaattaaaacggactcatctctggccccatggccttgatctcagcacacggcactctcgaatcattactctgttgtaccaacatggagttcatctggaaggaggactgcctgaaaagaggaaggatgg

SEQ ID NO: 16028 - DNA, 1894 bp, Homo sapiens
cgccgccgccgacttaaactttggagggggaaaaagagctactggcgcctggcgaccctccctgccccccacccaaccccgctccggcaacgcccccttcctcacggctcccgaccgaacttttctccaacttctgcgactcgtgagattcccttctacccactccggccctcgggacccctctgcccatcccctggccggtcgggtccctgcgaacccctttatctctggaatccactcggtccccgactcagagactcctgccctccacccccaaggaccccgccatcctcaggtcccctccgcctgccagatcttttctcggatccccgctctcccaccacctgctcacgagatcccgcggatctagaacccagggtcccccggggccccccggccgggtcccgggtgggctccaggcggccggtccccggcctccccccatggccaccgccccctcttatcccgccgggctccctggctctcccgggccggggtctcctccgccccccggcggcctagagctgcagtcgccgccaccgctactgccccagatcccggccccgggttccggggtctcctttcacatccagatcgggctgacccgcgagttcgtgctgttgcccgccgcctccgagctggctcatgtgaagcagctggcctgttccatcgtggaccagaagttccctgagtgtggcttctacggcctttacgacaagatcctgcttttcaaacatgaccccacgtcggccaacctcctgcagctggtgcgctcgtccggagacatccaggagggcgacctggtggaggtggtgctgtcggcctcggccaccttcgaggacttccagatccgcccgcacgccctcacggtgcactcctatcgggcgcctgccttctgtgatcactgcggggagatgctcttcggcctagtgcgccagggcctcaagtgcgatggctgcgggctgaactaccacaagcgctgtgccttcagcatccccaacaactgtagtggggcccgcaaacggcgcctgtcatccacgtctctggccagtggccactcggtgcgcctcggcacctccgagtccctgccctgcacggctgaagagctgagccgtagcaccaccgaactcctgcctcgccgtcccccgtcatcctcttcctcctcttctgcctcatcgtatacgggccgccccattgagctggacaagatgctgctctccaaggtcaaggtgccgcacaccttcctcatccacagctatacacggcccaccgtttgccaggcttgcaagaaactcctcaagggcctcttccggcagggcctgcaatgcaaagactgcaagtttaactgtcacaaacgctgcgccacccgcgtccctaatgactgcctgggggaggcccttatcaatggagatgtgccgatggaggaggccaccgatttcagcgaggctgacaagagcgccctcatggatgagtcagaggactccggtgtcatccctggctcccactcagagaatgcgctccacgccagtgaggaggaggaaggcgagggaggcaaggcccagagctccctggggtacatccccctaatgagggtggtgcaatcggtgcgacacacgacgcggaaatccagcaccacgctgcgggagggttgggtggttcattacagcaacaaggacacgctgagaaagcggcactattggcgcctggactgcaagtgtatcacgctcttccagaacaacacgaccaacagatactataaggaaattccgctgtcagaaatcctcacggtggagtccgcccagaatggatgggacacgtggggagtggggtggggggagctatttccaaggcccctccctgtttccccagcaattaaaacggactcatctctggc

SEQ ID NO: 16029 - DNA, 1975 bp, Homo sapiens
cgccgccgccgacttaaactttggagggggaaaaagagctactggcgcctggcgaccctccctgccccccacccaaccccgctccggcaacgcccccttcctcacggctcccgaccgaacttttctccaacttctgcgactcgtgagattcccttctacccactccggccctcgggacccctctgcccatcccctggccggtcgggtccctgcgaacccctttatctctggaatccactcggtccccgactcagagactcctgccctccacccccaaggaccccgccatcctcaggtcccctccgcctgccagatcttttctcggatccccgctctcccaccacctgctcacgagatcccgcggatctagaacccagggtcccccggggccccccggccgggtcccgggtgggctccaggcggccggtccccggcctccccccatggccaccgccccctcttatcccgccgggctccctggctctcccgggccggggtctcctccgccccccggcggcctagagctgcagtcgccgccaccgctactgccccagatcccggccccgggttccggggtctcctttcacatccagatcgggctgacccgcgagttcgtgctgttgcccgccgcctccgagctggctcatgtgaagcagctggcctgttccatcgtggaccagaagttccctgagtgtggcttctacggcctttacgacaagatcctgcttttcaaacatgaccccacgtcggccaacctcctgcagctggtgcgctcgtccggagacatccaggagggcgacctggtggaggtggtgctgtcggcctcggccaccttcgaggacttccagatccgcccgcacgccctcacggtgcactcctatcgggcgcctgccttctgtgatcactgcggggagatgctcttcggcctagtgcgccagggcctcaagtgcgatggctgcgggctgaactaccacaagcgctgtgccttcagcatccccaacaactgtagtggggcccgcaaacggcgcctgtcatccacgtctctggccagtggccactcggtgcgcctcggcacctccgagtccctgccctgcacggctgaagagctgagccgtagcaccaccgaactcctgcctcgccgtcccccgtcatcctcttcctcctcttctgcctcatcgtatacgggccgccccattgagctggacaagatgctgctctccaaggtcaaggtgccgcacaccttcctcatccacagctatacacggcccaccgtttgccaggcttgcaagaaactcctcaagggcctcttccggcagggcctgcaatgcaaagactgcaagtttaactgtcacaaacgctgcgccacccgcgtccctaatgactgcctgggggaggcccttatcaatggagcgatttcagcgaggctgacaagagcgccctcatggatgagtcagaggactccggtgtcatccctggctcccactcagagaatgcgctccacgccagtgaggaggaggaaggcgagggaggcaaggcccagagctccctggggtacatccccctaatgagggtggtgcaatcggtgcgacacacgacgcggaaatccagcaccacgctgcgggagggttgggtggttcattacagcaacaaggacacgctgagaaagcggcactattggcgcctggactgcaagtgtatcacgctcttccagaacaacacgaccaacagatactataaggaaattccgctgtcagaaatcctcacggtggagtccgcccagaatggatgggacacgtggggagtggggtggggggagctatttccaaggcccctccctgtttccccagcaattaaaacggactcatctctggccccatggccttgatctcagcacacggcactctcgaatcattactctgttgtaccaacatggagttcatctggaaggaggactgcctgaaaagaggaaggatgg

SEQ ID NO: 16030 - DNA, 457 bp, Homo sapiens
cgaacccctttatctctggaatccactcggtccccgactcagagactcctgccctccacccccaaggtgaattcccccgggccgccttctgagtgggatcctcttcttggagcactggatcctgggattccctctgcccccttctcaatccctcctctagggaaggggcctttgaatcgcgggctctcctgatccctgtgaccccgacctactagatttcctctcaggcttcttggaatctcaatcgctgggacctccaacccactacttttctcctttctgatcttctgggagccctggattccgggcctctgacccactatagtgcctttctctccttcccaggaccccgccatcctcaggtcccctccgcctgccagatcttttctcggatccccgctctcccaccacctgctcacgagatcccgcggatctagaacccagggtcccccggggc

SEQ ID NO: 16031 - DNA, 2699 bp, Homo sapiens
actcagcccagtggccctctgagctgttccttcttgaccggcacacacagctcgcttcttcactttcttttccatccactgccggacccaagccagccttccagggagcagccatgccttacctctaccgggccccagggcctcaggcacacccggttcccaaggacgcccggatcacccactcctcaggccagagctttgagcaaatgaggcaggagtgcctgcagagaggcaccctgtttgaggatgcagacttcccagccagcaattcctccctgttctacagtgagaggccgcagatcccctttgtgtggaaacgaccaggggaaatcgtgaaaaacccagaattcattcttggaggggccaccaggactgatatctgccagggagagctgggagactgctggctattagccgccatcgcctcccttacgcttaatcaaaaagcactggccagagtcatcccccaggaccaaagctttggccctggttatgccgggatattccatttccagttctggcagcacagtgagtggctggacgtggtgatcgatgaccgcctgcccaccttcagggaccgcttggttttcctccactctgccgaccacaacgagttctggagcgccttgctggaaaaagcctacgccaagctaaatgggagctatgaagctctgaagggaggcagcgccatcgaggccatggaagacttcactgggggtgtggcagagaccttccaaactaaagaggcccccgagaacttctatgagattctagagaaggctttgaagagaggctccctgctgggctgcttcattgataccagaagtgctgcagaatctgaggcccggacgccgtttggtcttattaagggtcatgcctacagtgtaacgggaattgaccaggtaagcttccgaggccagagaatcgagctcatccgaatccggaacccttggggccaggttgagtggaacgggtcgtggagcgacagttctccggagtggcgttctgttggtccagctgagcagaagcgtctgtgtcacactgctctggatgatggggaattctggatggcatttaaggacttcaaggcccactttgataaagtggagatctgcaacctcactcccgatgccctggaggaagacgcgatccacaaatgggaggtgacggtccatcagggaagctgggttcgcggctccacggctgggggctgccgcaatttcctggataccttttggaccaatccacaaataaaattgtctctgactgagaaagatgaggggcaggaggagtgtagtttccttgtagccctgatgcagaaagatagaaggaaactcaagagatttggtgccaatgtgctgacaatcggctatgccatttatgagtgccctgacaaagacgaacacctgaacaaagacttcttcagataccacgcttctcgggccagaagcaagacgttcatcaacctgagagaagtctccgaccggttcaagctgccccctggggagtacatcctgattcccagcacttttgagccccaccaggaagctgatttctgtctgagaatcttttcagagaaaaaagccattacccgggatatggatggaaatgtagacattgaccttcctgagcctccaaagccaactccacctgaccaggagacagaggaggagcagcggtttcgggctctgtttgaacaagtcgctggtgaggacatggaggtgacagcagaggaacttgagtatgttttaaatgctgtgctgcaaaagaaaaaggacatcaaattcaagaagctaagcctgatctcctgtaaaaacatcatttccctgatggacaccagcggcaatgggaagctggagtttgatgaattcaaagtgttctgggacaagctgaagcagtggattaaccttttccttcggtttgatgctgacaagtccggcaccatgtctacctatgaactacggactgcactgaaagctgcaggctttcagctgagcagccacctcctgcagctgattgtgctcaggtatgcggatgaggagctccagctggacttcgatgacttcctcaactgcctggtccggctggagaatgcgagccgggtgttccaggctctcagtacaaagaacaaggagttcattcatctcaatataaatgagttcatccatttgacaatgaacatctgaggctgccttgtagagatgcagcctgcccagctgaatcttggcttctggaccttgaccttcagaacttctcttggtgtggaaccattacgcccagggttcactcccctctcatcgtccggccttctcccttcatcttgatctgggaagaatgaaatgaactcagctacactctctgattttgtgctactcctttgtaaagtcactgccttaagggggctgatggcgccacctgtgccttacatccaggttcaggcatcactagctttcccacactctactttccttatttccttccattaagaattactcagagttctaacgcacagaatcctgacttccatgtagctccagtcattgtgatcagacatcctttataaaacatgtttttataaatgtgtatgtggaataagatgaggaggaaaaggagtgaggtcataatttagcatttctgcatcataagtgtgcttccttatcagggaagacatcaggtagttccgataattggacaagagt

SEQ ID NO: 16032 - DNA, 2621 bp, Homo sapiens
actcagcccagtggccctctgagctgttccttcttgaccggcacacacagctcgcttcttcactttcttttccatccactgccggacccaagccagccttccagggagcagccatgccttacctctaccgggccccagggcctcaggcacacccggttcccaaggacgcccggatcacccactcctcaggccagagctttgagcaaatgaggcaggagtgcctgcagagaggcaccctgtttgaggatgcagacttcccagccagcaattcctccctgttctacagtgagaggccgcagatcccctttgtgtggaaacgaccaggggaaatcgtgaaaaacccagaattcattcttggaggggccaccaggactgatatctgccagggagagctgggagactgctggctattagccgccatcgcctcccttacgcttaatcaaaaagcactggccagagtcatcccccaggaccaaagctttggccctggttatgccgggatattccatttccagttctggcagcacagtgagtggctggacgtggtgatcgatgaccgcctgcccaccttcagggaccgcttggttttcctccactctgccgaccacaacgagttctggagcgccttgctggaaaaagcctacgccaagctaaatgggagctatgaagctctgaagggaggcagcgccatcgaggccatggaagacttcactgggggtgtggcagagaccttccaaactaaagaggcccccgagaacttctatgagattctagagaaggctttgaagagaggctccctgctgggctgcttcattgataccagaagtgctgcagaatctgaggcccggacgccgtttggtcttattaagggtcatgcctacagtgtaacgggaattgaccaggtaagcttccgaggccagagaatcgagctcatccgaatccggaacccttggggccaggttgagtggaacgggtcgtggagcgacaggatggcatttaaggacttcaaggcccactttgataaagtggagatctgcaacctcactcccgatgccctggaggaagacgcgatccacaaatgggaggtgacggtccatcagggaagctgggttcgcggctccacggctgggggctgccgcaatttcctggataccttttggaccaatccacaaataaaattgtctctgactgagaaagatgaggggcaggaggagtgtagtttccttgtagccctgatgcagaaagatagaaggaaactcaagagatttggtgccaatgtgctgacaatcggctatgccatttatgagtgccctgacaaagacgaacacctgaacaaagacttcttcagataccacgcttctcgggccagaagcaagacgttcatcaacctgagagaagtctccgaccggttcaagctgccccctggggagtacatcctgattcccagcacttttgagccccaccaggaagctgatttctgtctgagaatcttttcagagaaaaaagccattacccgggatatggatggaaatgtagacattgaccttcctgagcctccaaagccaactccacctgaccaggagacagaggaggagcagcggtttcgggctctgtttgaacaagtcgctggtgaggacatggaggtgacagcagaggaacttgagtatgttttaaatgctgtgctgcaaaagaaaaaggacatcaaattcaagaagctaagcctgatctcctgtaaaaacatcatttccctgatggacaccagcggcaatgggaagctggagtttgatgaattcaaagtgttctgggacaagctgaagcagtggattaaccttttccttcggtttgatgctgacaagtccggcaccatgtctacctatgaactacggactgcactgaaagctgcaggctttcagctgagcagccacctcctgcagctgattgtgctcaggtatgcggatgaggagctccagctggacttcgatgacttcctcaactgcctggtccggctggagaatgcgagccgggtgttccaggctctcagtacaaagaacaaggagttcattcatctcaatataaatgagttcatccatttgacaatgaacatctgaggctgccttgtagagatgcagcctgcccagctgaatcttggcttctggaccttgaccttcagaacttctcttggtgtggaaccattacgcccagggttcactcccctctcatcgtccggccttctcccttcatcttgatctgggaagaatgaaatgaactcagctacactctctgattttgtgctactcctttgtaaagtcactgccttaagggggctgatggcgccacctgtgccttacatccaggttcaggcatcactagctttcccacactctactttccttatttccttccattaagaattactcagagttctaacgcacagaatcctgacttccatgtagctccagtcattgtgatcagacatcctttataaaacatgtttttataaatgtgtatgtggaataagatgaggaggaaaaggagtgaggtcataatttagcatttctgcatcataagtgtgcttccttatcagggaagacatcaggtagttccgataattggacaagagt

SEQ ID NO: 16033 - DNA, 525 bp, Homo sapiens
  misc_feature (68)..(68): n is a, c, g, or t
  misc_feature (89)..(89): n is a, c, g, or t
  misc_feature (133)..(133): n is a, c, g, or t
acagtactctcatttgatgacgaggtgaagggtgtatgtacacccgtcacctgcaccagccacccagncaggaggcagaggatggtggncctcaggctcacaccgcaggagccatctcagactggggtgctcnttccgcataccctcggggctcggatacagcgagtcctgggtctcctcctttgtccccacaggctttcagctgagcagccacctcctgcagctgattgtgctcaggtatgcggatgaggagctccagctggacttcgatgacttcctcaactgcctggtccggctggagaatgcgagccgtaagtgtccagcgaggctgagggtgcacctcggggtggcatcttcagtcaccctccatgagcgcatgagaaacagcctggttaaagtaatggcaaagatagaccacagagagccatggtctgatgtgtgtggacccatgggcctgtgcggttagctaaggagcagaatgtgccagcctcccctgcagcacgtttcttagcatcgcctttcttt

SEQ ID NO: 16034 - DNA, 2373 bp, Homo sapiens
actcagcccagtggccctctgagctgttccttcttgaccggcacacacagctcgcttcttcactttcttttccatccactgccggacccaagccagccttccagggagcagccatgccttacctctaccgggccccagggcctcaggcacacccggttcccaaggacgcccggatcacccactcctcaggccagagctttgagcaaatgaggcaggagtgcctgcagagaggcaccctgtttgaggatgcagacttcccagccagcaattcctccctgttctacagtgagaggccgcagatcccctttgtgtggaaacgaccagggttctggcagcacagtgagtggctggacgtggtgatcgatgaccgcctgcccaccttcagggaccgcttggttttcctccactctgccgaccacaacgagttctggagcgccttgctggaaaaagcctacgccaagctaaatgggagctatgaagctctgaagggaggcagcgccatcgaggccatggaagacttcactgggggtgtggcagagaccttccaaactaaagaggcccccgagaacttctatgagattctagagaaggctttgaagagaggctccctgctgggctgcttcattgataccagaagtgctgcagaatctgaggcccggacgccgtttggtcttattaagggtcatgcctacagtgtaacgggaattgaccaggtaagcttccgaggccagagaatcgagctcatccgaatccggaacccttggggccaggttgagtggaacgggtcgtggagcgacaggatggcatttaaggacttcaaggcccactttgataaagtggagatctgcaacctcactcccgatgccctggaggaagacgcgatccacaaatgggaggtgacggtccatcagggaagctgggttcgcggctccacggctgggggctgccgcaatttcctggataccttttggaccaatccacaaataaaattgtctctgactgagaaagatgaggggcaggaggagtgtagtttccttgtagccctgatgcagaaagatagaaggaaactcaagagatttggtgccaatgtgctgacaatcggctatgccatttatgagtgccctgacaaagacgaacacctgaacaaagacttcttcagataccacgcttctcgggccagaagcaagacgttcatcaacctgagagaagtctccgaccggttcaagctgccccctggggagtacatcctgattcccagcacttttgagccccaccaggaagctgatttctgtctgagaatcttttcagagaaaaaagccattacccgggatatggatggaaatgtagacattgaccttcctgagcctccaaagccaactccacctgaccaggagacagaggaggagcagcggtttcgggctctgtttgaacaagtcgctggtgaggacatggaggtgacagcagaggaacttgagtatgttttaaatgctgtgctgcaaaagaaaaaggacatcaaattcaagaagctaagcctgatctcctgtaaaaacatcatttccctgatggacaccagcggcaatgggaagctggagtttgatgaattcaaagtgttctgggacaagctgaagcagtggattaaccttttccttcggtttgatgctgacaagtccggcaccatgtctacctatgaactacggactgcactgaaagctgcaggctttcagctgagcagccacctcctgcagctgattgtgctcaggtatgcggatgaggagctccagctggacttcgatgacttcctcaactgcctggtccggctggagaatgcgagccttcatccatttgacaatgaacatctgaggctgccttgtagagatgcagcctgcccagctgaatcttggcttctggaccttgaccttcagaacttctcttggtgtggaaccattacgcccagggttcactcccctctcatcgtccggccttctcccttcatcttgatctgggaagaatgaaatgaactcagctacactctctgattttgtgctactcctttgtaaagtcactgccttaagggggctgatggcgccacctgtgccttacatccaggttcaggcatcactagctttcccacactctactttccttatttccttccattaagaattactcagagttctaacgcacagaatcctgacttccatgtagctccagtcattgtgatcagacatcctttataaaacatgtttttataaatgtgtatgtggaataagatgaggaggaaaaggagtgaggtcataatttagcatttctgcatcataagtgtgcttccttatcagggaagacatcaggtagttccgataattggacaagagt

SEQ ID NO: 16035 - DNA, 2047 bp, Homo sapiens
actcagcccagtggccctctgagctgttccttcttgaccggcacacacagctcgcttcttcactttcttttccatccactgccggacccaagccagccttccagggagcagccatgccttacctctaccgggccccagggcctcaggcacacccggttcccaaggacgcccggatcacccactcctcaggccagagctttgagcaaatgaggcaggagtgcctgcagagaggcaccctgtttgaggatgcagacttcccagccagcaattcctccctgttctacagtgagaggccgcagatcccctttgtgtggaaacgaccagggttctggcagcacagtgagtggctggacgtggtgatcgatgaccgcctgcccaccttcagggaccgcttggttttcctccactctgccgaccacaacgagttctggagcgccttgctggaaaaagcctacgccaagctaaatgggagctatgaagctctgaagggaggcagcgccatcgaggccatggaagacttcactgggggtgtggcagagaccttccaaactaaagaggcccccgagaacttctatgagattctagagaaggctttgaagagaggctccctgctgggctgcttcattgataccagaagtgctgcagaatctgaggcccggacgccgtttggtcttattaagggtcatgcctacagtgtaacgggaattgaccaggtaagcttccgaggccagagaatcgagctcatccgaatccggaacccttggggccaggttgagtggaacgggtcgtggagcgacaggatggcatttaaggacttcaaggcccactttgataaagtggagatctgcaacctcactcccgatgccctggaggaagacgcgatccacaaatgggaggtgacggtccatcagggaagctgggttcgcggctccacggctgggggctgccgcaatttcctggataccttttggaccaatccacaaataaaattgtctctgactgagaaagatgaggggcaggaggagtgtagtttccttgtagccctgatgcagaaagatagaaggaaactcaagagatttggtgccaatgtgctgacaatcggctatgccatttatgagtgccctgacaaagacgaacacctgaacaaagacttcttcagataccacgcttctcgggccagaagcaagacgttcatcaacctgagagaagtctccgaccggttcaagctgccccctggggagtacatcctgattcccagcacttttgagccccaccaggaagctgatttctgtctgagaatcttttcagagaaaaaagccattacccgggatatggatggaaatgtagacattgaccttcctgagcctccaaagccaactccacctgaccaggagacagaggaggagcagcggtttcgggctctgtttgaacaagtcgctggtgaggacatggaggtgacagcagaggaacttgagtatgttttaaatgctgtgctgcaaaagaaaaaggacatcaaattcaagaagctaagcctgatctcctgtaaaaacatcatttccctgatggacaccagcggcaatgggaagctggagtttgatgaattcaaagtgttctgggacaagctgaagcagtggattaaccttttccttcggtttgatgctgacaagtccggcaccatgtctacctatgaactacggactgcactgaaagctgcaggctttcagctgagcagccacctcctgcagctgattgtgctcaggtatgcggatgaggagctccagctggacttcgatgacttcctcaactgcctggtccggctggagaatgcgagccgtaagtgtccagcgaggctgagggtgcacctcggggtggcatcttcagtcaccctccatgagcgcatgagaaacagcctggttaaagtaatggcaaagatagaccacagagagccatggtctgatgtgtgtggacccatgggcctgtgcggttagctaaggagcagaatgtgccagcctcccctgcagcacgtttcttagcatcgcctttcttt

SEQ ID NO: 16036 - DNA, 837 bp, Homo sapiens
acactttccatatagaccctgttgtccatcctatcttaggaagacaatgcactcaagaggaaggtaacatctaccttcggactccagaggctccaaggagcctctctctctcttcaagacaggcttcacctccaccttcatacagtggtactgggagatgaacaggggtagggcgatcaagatttagttcaacctgtagttccagtcgggtggtgcttggtagttgactcattttggtcccatttgatatttgcagccacctgctgggataggtgtaactgttgctcctatttcacagattaggacaggatagtttgctagaggtcagaggacgagttgcgggagggaatggttgtcagttaggtttttaaccttagagcctcatgttttcttaggatcttgcagggagaccttgggcaaattccttttcctcttggggggtcttcattacctttttgtaagttaaagagttctgcccagtttgtgattctctgtactttaatgttcaaacttatcacttggataggttttttaaaatggggattctgggtacccccaatatatttaatttctctggggtgaggccgagattcatcttcgctgagctacatctgtagagattctgttttgataccattggttggactgtggctcggtaatttgcatttctccaaagtgagtccagtcagctggtcaaccgccccgcctgtctctctgtgaccccttccgggcgtccgctctgcttctgtacttgcatcctgtgggaatgagattggcgcaagcagccctcttttagtaccgccgggggcacgctagccaagcctttaaaaaccacgc

SEQ ID NO: 16037 - DNA, 485 bp, Homo sapiens
tcatgttactcttttagtgcacattttcagataatgctctttttatttttgctgactttccaaagataattttctctttaaccttttttaatatgaaaaaatttaaccatatgtacagagagtagtaaaataacactccagtgttcccgtgtctcatctttaactgttatcaacagcctgccacttcttgttttatctgtcctccccgccccccgtataattattttctgtagtattttaaagcaaatcttgaattcagatgattcttaaagaaaaacatttacagaattaggtcattgttacatttcagaagccaagcagcagtgtgtctgcctctgtcagaactgtcttaataattgtgtctttacctgggctgcagctttgaagaggcttattccaggtgcttattttactgagtggatgggaaatgctaagataaccataaggccctcctactggagtttatcttctcctaagcctagaaa

SEQ ID NO: 16038 - DNA, 327 bp, Homo sapiens
caactggtcacctaaggttgctgagttattatttattactctgaaaattgataagagggaaagaatcaaacatttcttcttcctgtcctatacaggccatgattgagggtaattcagcagttgatgaagtagtgtagttctttgtataggaaaatcacagctaataaatgcaaaagaaatgattgaatcagaaagtcaccattttgcagcctcttatgaaatagtggatctagacctgtcgttttttaaccagggatgatgccatccccctccccgaagggacagatatctagagacagttatggttgtcacaactggtgggggcag

SEQ ID NO: 16039 - DNA, 600 bp, Homo sapiens
agagaaggaaaccactgcagattacccaatgtcacgcaattaaaaagtggtgaaggggatttgaacctagtctatgcatctgcagaacgcacactcttgggctgcccaccccgacacctctgagggcagtgatgaagaatcccacctcacagaggagacggaggccaggagtgaggccctgccggagcctgagcccaagccttctagctctgaggccactgctctcccttcaaccctgttgctgccccgcaacagaaagtttgtcattggtccctcacagccacaccacagccctttgggcaaaatcagccccttcccagcctggccagttctgggggaaaatgacacctgacacctgacacctatccatttttttttttttttttgaaatgaggtctccctctgtcaaccaggctggagtgcagtgactcttctcaattgactgcaacctctgcttcccaggctcaagtgatccttccacctcagctacttgggaggttgaggcgggagaatcgcttgaacctgggaggtggaggttgcagtgagccaagatcacaccactgcactccagcttgggctacagagtgagactccatctga

SEQ ID NO: 16040 - DNA, 539 bp, Homo sapiens
cttgatctcctgaccttgtgatctgcccaacttggcctcccaaagtgctgggattacaggcatgagccactgcgcccggctcccactgtcattctttattgccattgcctttaagttttctccttagcttttattaccacttgcacattatgtatttgttttatgtaaattccttgagagcggggactttcttttgctctctgctgtatccttaggctttggaacagtccccagcccatagtagcacgaggctggtagttttgaatggatggatggatggatgaccttctaactggatagctgccattgactcccacttggcctccttcttgcctcttcctggtgtgcctctgctgtacctggctagtactcagcgagtattcagcatggtgattcctccgaaacatctgtttgccctgacagttccttgcagagaagcacctcatatgactcttgactgccccaccggtccccttctcagccttactgaatgtccttcattttttgactatgccaccatgttgctccctcttttctct

SEQ ID NO: 16041 - DNA, 657 bp, Homo sapiens
tgatggaaactacagagctgtttgggagctctgagaatgtgggggggagtcttccgtaggctttaggcctcactgtaggataatctggatgagctcttcagttgggaactttccaacattggtatcgtagagtctttcttcctgagatggtaaaataacttagaaaaagactcttctaatcttcatgtagcgtaaaggcctggctgccagaattatagaagctgagtgtggaaagaaggcataggaatctacatatattcttgtaatcttactttttttttagtatattgtcacttcctgcatctatgcctctgttttaccctcttcaaagattaaacctccagcgtttcccttagtgagattggggcacttctcaactcaaagtgggaagagactcttgaggatctgaatgtttgctaaaaagactttcaacagacttcttatttcagccaccttccttccacttcaccctccacttccagatttcctaaatccttagactttgaggaattctgcagtgcaaatctgattggttctcagctttccctgctgcttatttaggcttccattttctcctgtctggtaagtcacttatcactcatctatatgtcatcacatttaccttattcccacaaaatattccattattgggaagat

SEQ ID NO: 16042 - DNA, 598 bp, Homo sapiens
gatgagagtacatacctcctgggatggtcgtgggattaaagaagataccatattgtattgattctaagatgcatcctccaaaacacacatactcttgagcatttgtgaatcaggatcttacaatcgatgctgtgtcagaggttaactcgcagctttttctttcttggtggtacattcaataatggtgcatcttaaaatcgatggcatcttaggttagataatatactgtaaaaagtaggtagcacttaacacagtgcctggcaggaaataaatgttcaggagggttagttgttactgctttatcaatgtggttatcatcatcaaggaaggagattagctaacattcatttggtgttttctgtgtttcagtatctaattcttagaacccacaagacaaagatttttatccccattttacaaatgagaaaactgaggttcaggaagttcaggcaattcccctccacccatagagctggtaaggggcaggcctgagggtccatccaggagtctaagcccccgcctactggccaaagccagctgcctgttttcatagccgcctgcaagctatgaatggtttttacatttttaaacagttgag

SEQ ID NO: 16043 - DNA, 528 bp, Homo sapiens
caaagctttcctttggtgtctgcttctgtattctaaactggaagtagacatcatatcccagctaaacagggaaagttttagaactttgggaatagtttgtctatgcatgtataatgctgagaagggtctgcagtgaagaagataagatagacttctccagcacaactattactcatttgataattcagtttcatttttgctcacataatctaagtaaagccatatcagaaaccaagtttttctgtatgttacactaaattttaagaacaaagtctatatttaaaataatccaaaccccaaatttgctcatccaaattatgtcttggccagcaagttttacattagaagttttgagacttccatttatttgtgtcttttacagaattgtgtgacaatgacttttggacatttgttctttcggctttggaatatttacacaagaatggagaaggaacatccaactggagcataattgtcaaggcaatagagaatttagagaaataaaatagctgcatatctcaaaagagt

SEQ ID NO: 16044 - DNA, 242 bp, Homo sapiens
tttccagttccaagatggtcgaataggaacagctccagtctgcagctcccagcatgattgacacagaagacggtgatttctgcatttccaactgagaattgtgtgacaatgacttttggacatttgttctttcggctttggaatatttacacaagaatggagaaggaacatccaactggagcataattgtcaaggcaatagagaatttagagaaataaaatagctgcatatctcaaaagagt

SEQ ID NO: 16045 - DNA, 202 bp, Homo sapiens
gtaaccagggcacagagaagttaagaaacccaccaaaaccacggagccctacacgacagtcagcgttttggatgactcagccgtacgtgcccctgtgatcacactccatttccggatagtcacatttcatgtttttcaccgggaggaatggtccggggataatttcttctcattcctttctttaaaaatagtacaaaaggat

SEQ ID NO: 16046 - DNA, 788 bp, Homo sapiens
gcctgttgtgatgggtttattgttgcatcttctgaaaaactttgtgagttcccgaaggcctctccacgtcttgagtcatggctgtgctgctttgcgaagctgtgtgcatgtctgtggtgtagcctgtgtacagcctgtgatgcgtcgcagcggaagggtagggggctgcccagggaagacagatgcgccaggttccgctccacggagctcagctaccagccctggtggagagcgcagatggggccgatttgtcatttgtctgcgcttgagcccagcagctgtgtggcctccctggggcaagtcattcaccctctctgtgcctcagtgtctctgtgaagtggggggaagtttttggaagattaagtgggctaatacgcgtcaaatgctagaacacactggcacttggtaaatgctatataagtgttatcatttttgtttgtttattatttatttatccatgtcatggatttaaggcagtctaatctcagtgcctggtggagacccgggcgccacccccccaggttgtcaagtggtccctgtgcctcccactatcgtccccagcacggtgccgtgtccgggcgtgcgtgaagggccagctcacctcacagctctgcttcccaggttagctcccatccaccctccccctacctgtttcctcaccgaaggaaggggcagaaagatgccctccatgccccttccgactgttgcagagggatggaggactatggtacatacacacatatacacgcacacacccaccacacacacaccatgcacatgcacatcac

SEQ ID NO: 16047 - DNA, 504 bp, Homo sapiens
cttgttgatggacatttagattgccagtattttgtgataatgcacaaaatcagtgctacagtaaatgttggtgttgtctgtcttattgggtttctgtgttgaagttactctaggtgctgtaaatagaagtggtatcattgcttatagggtatccgcatctttgacgttatcagttactattaaattgctcctcgagctgttttttttattcttttatagtttcacctgctttggttttatgcaattagacataatggactttccaaagcagaaaatatgacatgaaaatctcattttaccacagaaaaacggaaagttggttgattagattcttgataaatttgttcatatttaaaaaatcttcttggctgggcgcggtggctcatgcctgtaattctagcactttgggaggccaaggtgggcggatcacctgaggtcagtagttcgagaccagcctgaccaacatggcgaaaccccgtctctactaaaaatacaaaattagct

SEQ ID NO: 16048 - DNA, 270 bp, Homo sapiens
gaagcagtaaaaagagaaatgtgaatcccctcttcttacctcctataacatgctaattaacatcactgcaattaaccaccattcacagctcttcagctgctctgtggaacctcagcccactctgaaatgaacagccgcagtggcaggggttacagaatgggctgggagtggcaatgtagatttatctcttcacacactctatgccctctatcaaaaatgcctcaggctgtgtaaaattccacaaataataaagagattttaaaaatgtga

SEQ ID NO: 16049 - DNA, 447 bp, Homo sapiens
ttaaaagtcctgttacacccatatcagatagcatcaagagagttttattcacttctggaaaacacagtattcaaaggctgtaatgtgaaaggacatagccgcaaaggagagaccaaggctgcagtcccaggtagcctcatttcagtgtgaggaagacctctgacaatggaaaaagaaatggattgcctgtgagatggtgaggtctatatccacctccaccctgccccccctgcaatgagaactttgaggtagatgaggagaaggggtcatgtgtttggtgagtgagctctcttgtgagtgggaaaatggttgaagccctttggtttcacttgataattagattttaaaggttggtatttcagttaggtaaaagactgaagtgccaatacatgaatggtaaagccgcatactgtataatgtagaggagcttaggaaaaaaatgaaact

SEQ ID NO: 16050 - DNA, 418 bp, Homo sapiens
acatcccgaaagtgggggttgggagagcaggatagcagagacctgccactggcaatgcagggctctcagtggagtgtcctggcagactgtgagggcagggaggaatctgttgtttgacagcagtgaagggggcaataccccttttattgtaattatccagtggctgacaaaggaaggttttcttgactcatgtgaacccaggaaatagggccttcgagtcctttgcctggcgtggcagggcagtggcacaggttctgcacaaggcaggaaaatgggacctgatgccactgcctgtcacatccgtgctaaagaaaggcacaatgctcaaggcccatcgcacgtgatgcccatttctgcaccattactacccacccctcctataccctgcaagactcatgggatggaccttttagggagt

SEQ ID NO: 16051 - DNA, 390 bp, Homo sapiens
tgaggcagagtcccactgtgtcacccagactggagtgcagtggtctggtctcggctcacccaacctccgcctcccaggctcaagcgattcttctgcctcagcctcccaagtagcgggattacaggagcgtgccaccatgcccagttaatttttgtatttttagtagagatagggtttcaccatattggccaggctggtgttgaactcctgacctcaaatgatccacttgcctcagcctcccaaagtgttgggattacaggcattagccaccgagcccagccagagaccccatctgtaaaaaaattttttaaacattagctgtagtggcacgtgcctgtaatctccgctgcttaggaggctggtgctggaagatcacttgaactcaggagt

SEQ ID NO: 16052 - DNA, 1191 bp, Homo sapiens
gaagaaagctacctgtacagacaggaacctgccttcccatacagatttgttaggttgttaagtctcctgaaggaaactagacacatgcattgtttttgtagtttttctccagaaaaacagaatagtaaaggcttttttccctcagattgttgctaagagaggaaatccctacaaatttaatatatatactatttttaaaattgattagatttgattttgcagctttgaaagttttctattgttgttcagttgaatagttgtctgactgcctcattgtggactcatgtctggaataggaaagcttataaatactaagtagatgttatttaaaaggatagtacagattatattattgttatctttcagtggtttttttcaaactgatgctagatgtccttttgaactgaacaaatgatgcactgagactttcattaatcagaaccattttgatggttcaatctgattcaatatgaagtatatagtgagaacactgtgaagcaataattacatcattcattcacttttttgctgatgataatatgttttgtagtgttcatgttttaatagtgttcctaaattttttaaatctaatttcctttgtatgtggtaactacatacattttaaggtttttgttttttcttttagagatggggtcttactatgttgcccaggctggtctcaaactcctaggctcaagtgatccgtcctgcctcagcatcccaaagtgctaggattacaggcgcgagctactgcacctggctgaccattttaagtttgaatgctaacagtgaccttataaattcatatcacctagactcaagagagatgcatccctgctattaaatgcctgtaattataagatggtagcaactagctttgttctgcacgtctttttaaaaccaaattttttttactttcaaaaaaattactttttaatttacctagcttctttcccaagtagttttgtgcctggatattatcaagaaggctttttgttcttacctcttttatatgattgctaatactaccaatctcttcattatataattttccacttataactaacctttctcatagcctttactaatgaagttttttttttgctataaatcatacttcagtaaatttaaggatacaaaagaagagagccatcaagcagtcacaataccagcattaacctaagtctatag

SEQ ID NO: 16053 - DNA, 1991 bp, Homo sapiens
ccacgcgtccgggaaggggtgagtctgggtctggaaaaaactgatccaaaggcagaaagggaggggcgaaatggaggagggtaccgtgaacagagtaagggggctgggagaggaaattagaggggaggcgctggccagcaggcaaggcctgagccctctcccccggcggtggttggggggggggccgtgtccatataaagcgggtcggcggcccctgcggtcccggagccgcgcgggcaggggctgccgcagccgatggcggggcgcagcgacatggatccgcccgccgcgttctctggcttccctgccctgccagcggtcgcgccgtcggggccgccgccgtcgccgctcgcaggagccgagccagggcgggagccagaggaggcggcggctggccgcggagaggcggcccccacgcccgcgcccggcccggggcggcggcggcggcggcccctgcagcgcgggaagccgccctactcgtacatcgcgctcatcgccatggctctggcgcacgccccgggccgccgcctcacgctggccgccatctaccgcttcatcaccgaacgctttgccttctaccgcgacagcccgcgcaagtggcagaacagcatccgccacaatctcacgctcaacgactgcttcgtcaaggtgccccgcgagccgggcaacccgggcaagggcaactactggacgctggaccccgcggccgcagacatgttcgacaacggcagcttcctgcggcgccgcaagcgcttcaagcgcgccgagctgcccgcgcacgcggccgcggcgccagggccgccgctccccttcccctacgcgccctacgcgcccgcgcccggccccgcgctgctggtgccgccgccttctgccggaccgggcccctcgccgcccgcgcgtctgttcagcgtcgacagcctggtgaacctgcagccggagctagcggggctgggcgcccccgagccgccctgctgcgccgcgcccgacgccgcagccgcagccttcccgccctgcgctgccgccgcctccccgccactctactcgcaggtccccgaccgcctggtactgcccgcgacgcgccccggccccggcccgctgcccgctgagcccctcctggccttggccgggccggcagccgctctcggcccgctcagccctggggaggcctacctgaggcagccgggcttcgcgtcggggctggagcgctacctgtgagcctgcgccgcgcgggcaggcacctgtgcgacctgtgccccggacctgcggcgccgccctcgagcgccccatctctgccccccaccctggcttggagcacaccctgcgcctctcgtcgtggcctcctggactcaaactcctgctacatccttctccgtcccccatccctggggaggctcccaccatctcgccactggacagaagcgtcccctttgacctgccagcctctcatttcttctccctccacttgtgagcgcccccagctttgcggcgccccccaccccagcgctgtctgtgggtcccttgccccggagctgactcgcctccagtgagtccataccccaggtttcctggtgagttccaagcctttggaagccagatctgtgatcccaagccgcctcctccaccgactgtacttcatcaaccttctctcatgtttttccgacactcctgggtcagactcctgggttcatgacttacttgctagcgtcccttcattttcccacaagtttgccccccacctccacttacctgtctgccctcagcttcttcctgggagagagcccccctttcacgtagacacacctggctgccttcttcacgccctgaggacacttcttggagatttcagacaggcagcaccagggctcctgactgaaaggggagttggtgggcctttaggtctgccccatcccctggaaaacttaggacttattgggttattattatttttaattaaagctggtttaattaaaaagaaagaaacttttttctgg

SEQ ID NO: 16054 - DNA, 1838 bp, Homo sapiens
cacccagctctctacggcaggtccgggagggctggggcttcggggagccctacccgccaaacctgctgttggcccgggagagccccagaggctcccggagactgcagcctcctgtggttgggctgggagccggcagggtttggggtgtgggcgtccccaccacgcatagcaggaatggcaggaagggacaaaagcctgttccagagaccctgggaggaccccaggcagggagagcccgcctgcctccaccctttccaacaagccatcttggtaactgggaacaaacacaccccaccccgtttttccttaaaagaggccttaatccccgagcccccgctgccagggcagagggaggagggggcacagctgtgccaagcccggccccactggtgtgtcctcacaatgtgaccccagaaatgccagcagggaacggaggctgctgcagagacgcagccccaggcagccggggctcctaggctggtgcagatggtggggttaaacgggctgagcgttccaggtaaactgaggctcggggaggggaaggacaggctggcctctccttcactgtccacagggccttgggttccctgagctgtccagaccccaccatctcccggaccccagggaggtggccattgccagaagcctgtgggtttctttctagcttgggggattaaaaaaaaaattctccacttttttttttcttgagtagacttcagtgaccacactgtggaaaatacctttgcagacgtggcacccgagtgcacacaccgaccgccacatgtgcttttctgccgggaatccctggggtgaacgcatgttttatgggcgtttccaggagcgcgcgtgcacctccagacggggagctggcgggcgggggtggcagcagcagctctagccttggggggacaagcctctctcagctacgccaggggaaaagagagttaaggacactcacccccacccacgcacacacacaaggcagcgtcgggtgggagagagaaggccgtttctccttctgtagcctgggtctcccacgggccttccccgctgctgagcgagacaccagtagccaggtgaagggccacagcgggccaggccccgaccctgttgtgacccacctgggcaccttcccggaccagctccgcctcccctgccctcctctctccaggaaggagccagaaccctcacccctctcccaccctccccaggggtaaccccaggccaagcacagatagctcagctgcgacctctggcctctggggacataaacggggcggctgggccagggcggaaggtgctcctgtttccctccttctgcgtggtccctttgacgggccggccaccgtgtccgaggcgcaacgctaggcctccaggccacgcatccatctccaagttaacagcccgtcctgcccaagttctggggcaggtaggagagggccgtcacacacctgtccgcccgtgagtgacccgggggggcttccgggtggaggtggagccaccacgcccttcctcaaggggtcacttattaaaaagtccacggcctgaggccaggccctctgcacagaagccatatgccggccagccgcgcctcctcctctgtccacggaaccgctgcccatctaaccttcgtaaagacctgtctcctgtttccagccgccgcctgtggttctagcaggttctatgccatctgcattgggatgtctggttgtttttatttctgacttttttaaaattccaggtgtgccgcacccactttctcgcagtgttttaatattgtgtggagttgtcgataccacgtgaattcatacacaataaaaagcctcactctccctttt

SEQ ID NO: 16055 - DNA, 2070 bp, Homo sapiens
  misc_feature (1844)..(1844): n is a, c, g, or t
  misc_feature (1847)..(1847): n is a, c, g, or t
cacccagctctctacggcaggtccgggagggctggggcttcggggagccctacccgccaaacctgctgttggcccgggagagccccagaggctcccggagactgcagcctcctgtggttgggctgggagccggcagggtttggggtgtgggcgtccccaccacgcatagcaggaatggcaggaagggacaaaagcctgttccagagaccctgggaggaccccaggcagggagagcccgcctgcctccaccctttccaacaagccatcttggtaactgggaacaaacacaccccaccccgtttttccttaaaagaggccttaatccccgagcccccgctgccagggcagagggaggagggggcacagctgtgccaagcccggccccactggtgtgtcctcacaatgtgaccccagaaatgccagcagggaacggaggctgctgcagagacgcagccccaggcagccggggctcctaggctggtgcagatggtggggttaaacgggctgagcgttccaggtaaactgaggctcggggaggggaaggacaggctggcctctccttcactgtccacagggccttgggttccctgagctgtccagaccccaccatctcccggaccccagggaggtggccattgccagaagcctgtgggtttctttctagcttgggggattaaaaaaaaaattctccacttttttttttcttgagtagacttcagtgaccacactgtggaaaatacctttgcagacgtggcacccgagtgcacacaccgaccgccacatgtgcttttctgccgggaatccctggggtgaacgcatgttttatgggcgtttccaggagcgcgcgtgcacctccagacggggagctggcgggcgggggtggcagcagcagctctagccttggggggacaagcctctctcagctacgccaggggaaaagagagttaaggacactcacccccacccacgcacacacacaaggcagcgtcgggtgggagagagaaggccgtttctccttctgtagcctgggtctcccacgggccttccccgctgctgagcgagacaccagtagccaggtgaagggccacagcgggccaggccccgaccctgttgtgacccacctgggcaccttcccggaccagctccgcctcccctgccctcctctctccaggaaggagccagaaccctcacccctctcccaccctccccaggggtaaccccaggccaagcacagatagctcagctgcgacctctggcctctggggacataaacggggcggctgggccagggcggaaggtgctcctgtttccctccttctgcgtggtccctttgacgggccggccaccgtgtccgaggcgcaacgctaggcctccaggccacgcatccatctccaagttaacagcccgtcctgcccaagttctggggcaggtaggagagggccgtcacacacctgtccgcccgtgagtgacccgggggggcttccgggtggaggtggagccaccacgcccttcctcaaggggtcacttattaaaaagtccacggcctgaggccaggccctctgcacagaagccatatgccggccagccgcgcctcctcctctgtccacggaaccgctgcccatctaaccttcgtaaagacctgtctcctgtttccagccgccgcctgtggttctagcaggttctatgccatctgcattgggatgtctggttgtttttatttctgacttttttaaaattccaggtgtgccgcacccactttctcgcagtgttttaatattgtgtggagttgtcgataccacgtgaattcatacacaataaaaagcctcactctcccttttaaaaanacnaaacaaacaacacaacaaaacacacacaaacaacaaaaacacacaacaaacaatacaacaaaacagacagcgaacgagcaaccaacaccagacacaaacacagacgaataagaacaaacaacacgcagaagaaaaaaggagagacaatgacagaaaagaaaacacaacaaagaaaacaacaacaagacacagaaaaacaaccaaacaaagaagaagacgaacg

SEQ ID NO: 16056 - DNA, 831 bp, Homo sapiens
tcttctatttttagaaaaacctattttaaattcagttggacagagttgtcttagcgctaatcggacttgagtctctgaactgtacacaactagaaaaaaacaaagaaaggaaatgtccataagacagtcattcaatagccacaaatctgcctgtgaaaatagctacctagggacatgatgatttttttttccatcagtgtgatagtgtgaaaccaacaagcccatttttttttttttttttttggttaatttgtgataaattagcacttgaaattaaccaggttcttcacatcagaagttctaagtagtaaatatttttgcaactgtaaaagagatgtttctccactacaaaacttcaaaccttattcttacataaggatcaaaatgacttttagaaacttttaaggacagagcagatgctccctggtttggatggcttggaacaaagctagaaattgctggggtcaaatagtctatcagagttggccaatggagagagggtgacattgttccacggcctcaaagctggccttgggctcactcttattagttttacttcctgccatgttcccatgagtaagtttactgtggctcattcctcctccttggtcatgctttctccttggcccctaatccccaatttctggttttcagtattggtctggtgcctggaaactttgagcttggatggaacctcactgagacccttcttgggacctaaattattcttttagttgttggcattgagctgtttcctttatcgtgctgaattatgtagccatcagcattgtactaatattgtcacccatgccgagccttatgcagtctgtg

SEQ ID NO: 16057 - DNA, 254 bp, Homo sapiens
gtgtttttacattcaaaacatagaagtgcaatgcttgtcagcaggctttgtggtcgtgtagtagttaatacttgtagttgtggttgccacaacctgggttctaatctgagtcacagtagtgttttctaacctgcaactgtggctaatagacctgtcgtttgctttgcctttaatcctagcagcctccagagagcagagtaaacctctggccccgaagggcgccagcttctggagtttagcccacagcgcagaaa

SEQ ID NO: 16058 - DNA, 153 bp, Homo sapiens
tctcatagggattgtgatgagcaaactaaaatcagttctgaattgtcaaacgtgaaataaaaattcatttttattagtataggcatgtgactgagactgggccaaggaatgggaataaaagtgatgtatatttcttcctttggtctggttatg

SEQ ID NO: 16059 - DNA, 419 bp, Homo sapiens
aattttgtgacaaggatgtatagtccattaaggaatatatacaacagaagaagcatttaagtggacttgaggtttgtgaatctgaactagtttctatcgactttcacatcagcagctcctattctggggaaagagaatggaggctgggagtgatcctgacaaaccttgatgtgcaggcttgtggagaaactggattcacacccaggctcgtggagtgtgggagaggctggcctgtcacaatatcaggacagcctctcttaataacactgcagaaggaatcgagggccctgtggtttgcggtcagtgtgcctcttgtgccaactttggcactacaatgtcttcaatcacattatcttccaaaccggctcttcatcctatgtccttatttctgctaatggtattcatttctcttattcatg

SEQ ID NO: 16060 - DNA, 191 bp, Homo sapiens
cgtctttgcaagccatgggccggctcccctcaaccccacaactgacacctaaattaagctgtggttggaaccagcatttacatggctaaataaggcctttaactccttccctccctagtcagctgttgcccttatctactccccatcccttaaggtaggaaaaaaaccaaccaaatcaaacctgtggcatt

SEQ ID NO: 16061 - DNA, 371 bp, Homo sapiens
gtctgagcacatctggacttaagatgtcttatgattcttcaagtttacagtgggtttgttgcagggtgtaaccccttgtaagtcgaggaacatctgtacatggtaatatgaaagagaatgggaggctggtgcggtggttcatgcttgtaatcccagcgctttgggaggcctaggcaggcgaatcacttgaggtccggagtttgagaccagcctggccaacatggtgaaaccctgtctctactaaaaatacaaaaattagccaggcatggtagcacacccctgtaatcccagctactcaggaggctgaggcaggataattgcttgaagccaggaggcggaggttgcagtaagtggagctcgcgccactacac

SEQ ID NO: 16062 - DNA, 290 bp, Homo sapiens
atagcctgaattttaattaaattctatatttcttcatgaagtttgtcatgttccttttcaattgaaccccaaatcatcagggctgattccaagggtgtaattcgttcatcattttcaaactgtacatcaagggtttttcctgctgcaatgcttgtcaaaaactgacatatgcatattgttctcaactggtaagctgttagactggatagtccatgaataatagcctctgcgctgttgcgggtccggcagaagtcctcagggcggccgtcgcggaaagctcagcaaagaga

SEQ ID NO: 16063 - DNA, 558 bp, Homo sapiens
gcggccgccggctgaatgaagcctgggacgcgggagccgcgccgcgcgcagtgtctgcagtgccggaggtctgggaggctccgggcgaagcctccctgctgcaggttatgatgatgtcagacaatgctaaaggcagagcagctcattcatggaagaaaagagggagtatttcttctctaagtaatcatgaattttggcgaaaggaaattcatgggcgcatcaaagaccctggaagtctgtggattacacatacaatgccttttacaggtgggaaactgactataaaggagtagcaatcccagcacatgtcagaagtaaagctaatttgagttttgtaccacctcttcttctccatgaatttttaatatggtgttcagtagaaaagaaattgagtttttatgaataccttctgtattatgcaattctatgagtactgtgtcttatatggaagaacccagtcagcgtgatgatatctctcgccttacagttcagatggaaaacacctatcagttgggtgtgttcttttatctctcactcctattttaaacttctaaattg

SEQ ID NO: 16064 - DNA, 2244 bp, Homo sapiens
gcggccgccggctgaatgaagcctgggacgcgggagccgcgccgcgcgcagtgtctgcagtgccggaggtctgggaggctccgggcgaagcctccctgctgcaggttatgatgatgtcagacaatgctaaaggcagagcagctcattcatggaagaaaagagggagtatttcttctctaagtaatcatgaattttggcgaaaggaaattcatgggcgcatcaaagattctatgagtactgtgtcttatatggaagaacccagtcagcgtgatgatatctctcgccttacagttcagatggaaaacacctatcagttgggtcctcccaaacattttcctgtggtcaccgtcaatcatattttgaaagatgtagtaaccagctatctacaagtagaagaatatgaaccagagctctgtagacagatgactaaaaccatttctgaggttattaaagcccaggtcaaggacttgatgattccacggtataaactaattgtgattgttcacattggacaactgaacaggcagagcatacttattggaagcagatgcctctgggatcctaaaagtgataccttttcatcttatgttttcagaaattcttctctcttcgctcttgcaaatgtctatgcagtttaccttgagtgattgaaaataagaaatctagctcttacttttgaaaattctgaggcaggctgtatgtctgtacacaaaagttttactgccaaaaactttgagaaagaaacaacactgatatttcaagcaactggaagcttttgaattttttcatattctagtaaagatttggggaggggagggtagccacagaaagaatcttgtttatctaaagcaggaacttgatcttggttttgctggattgctttccatagacatagattcttattaaatatttgttttggtactaattattttaattattctttaattagagtgttacaatttcctgcattgttttttaataaaaagaagctttagaaaaactatggctatataccctgaccaataaatgatagtagaatattcaacatggtatacacaaatgataaataatgtgcctcagtgctgcatataaaagaatactggttttcattttgtacttaataaattgagcagcattcattaagtgcaattattgttacatgtacctgacagttgaaactgctgaggtagaattaatggcttcataacaattatcgtggtcccacgggctgcaagctaaaactagaagctcttgtggcttgcctgcactttacacaattgtgggagaaccgaaagttggctcttcagtaatggaaactataaagtgaataaaggctttttgggacactgaagtagacattgtgatattaaatatacatgatgcttaatactaaatgtgtctgtaacacataaaatcatttattggaaagagacattgcttttaaatatcctaggctaacaaactttttcacaaaatatatggctggcaccttaacaaataaagcatgtgtagttaccattttactcctatgaatttaatactaaagtgacccagtgaggtttttgaatagacgggtgctaaaatttacagggctgaaatagcttattattctgctggttaatgtatcttacgccacggatcatttatttttatgaagctttcaagtctttgtgtgcaagtaaaatgatgttgtggcgttgttcttggatggtaagtggactgcctagaggacatttgttaaaggtcaaagacaaattgtacacatatggagaaaattagcaatgctgtagtcttaaggaaaaaatgatttatcattcatatcaaaaagagtttagcaaatggaaaaccagttaatgctttaattttaaaatgttttggtgtcttacttttccctaaaaatgacatgtagtaaaaaatggatacttttaaaatcccttcccttctgctattttctggcttttaaagtgattattcaaaatgaatttgtcaattttcacttttttttttctgttagtgcattagtgggaatatgtctatgtaataatttatcacaaccaatatttgtcaatctccatagaacagttttcaatctggattagattacacgtataacaagtaaatgagcttcatattttcattacacattggtgaacatctcccttcgtggaacaacagcgggggtaatcatatcactaattttgtatgaataaatgaaaatgaagaaacttctttaacatatacaaa

SEQ ID NO: 16065 - DNA, 1928 bp, Homo sapiens
gcggccgccggctgaatgaagcctgggacgcgggagccgcgccgcgcgcagtgtctgcagtgccggaggtctgggaggctccgggcgaagcctccctgctgcaggttatgatgatgtcagacaatgctaaaggcagagcagctcattcatggaagaaaagagggagtatttcttctctaagtaatcatgaattttggcgaaaggaaattcatgggcgcatcaaagattctatgagtactgtgtcttatatggaagaacccagtcagcgtgatgatatctctcgccttacagttcagatggaaaacacctatcagttgggtcctcccaaacattttcctgtggtcaccgtcaatcatattttgaaagatgtagtaaccagctatctacaagtagaagaatatgaaccagagctctgtagacagatgactaaaaccatttctgaggttattaaagcccaggtcaaggacttgatgattccacggtataaactaattgtgattgttcacattggacaactgaacaggcagagcatacttattggaagcagatgcctctgggatcctaaaagtgataccttttcatcttatgttttcagaaattcttctctcttcgctcttgcaaatgtctatgcagtttaccttgagtgattgaaaataagaaatctagctcttacttttgaaaattctgaggcaggctgtatgtctgtacacaaaagttttactgccaaaaactttgagaaagaaacaacactgatatttcaagcaactggaagcttttgaattttttcatattctagtaaagatttggggaggggagggtagccacagaaagaatcttgtttatctaaagcaggaacttgatcttggttttgctggattgctttccatagacatagattcttattaaatatttgttttggtactaattattttaattattctttaattagagtgttacaatttcctgcattgttttttaataaaaagaagctttagaaaaactatggctatataccctgaccaataaatgatagtagaatattcaacatggtatacacaaatgataaataatgtgcctcagtgctgcatataaaagaatactggttttcattttgtacttaataaattgagcagcattcattaagtgcaattattgttacatgtacctgacagttgaaactgctgaggtagaattaatggcttcataacaattatcgtggtcccacgggctgcaagctaaaactagaagctcttgtggcttgcctgcactttacacaattgtgggagaaccgaaagttggctcttcagtaatggaaactataaagtgaataaaggctttttgggacactgaagtagacattgtgatattaaatatacatgatgcttaatactaaatgtgtctgtaacacataaaatcatttattggaaagagacattgcttttaaatatcctaggctaacaaactttttcacaaaatatatggctggcaccttaacaaataaagcatgtgtagttaccattttactcctatgaatttaatactaaagtgacccagtgaggtttttgaatagacgggtgctaaaatttacagggctgaaatagcttattattctgctggttaatgtatcttacgccacggatcatttatttttatgaagctttcaagtctttgtgtgcaagtaaaatgatgttgtggcgttgttcttggatggtaagtggactgcctagaggacatttgttaaaggtcaaagacaaattgtacacatatggagaaaattagcaatgctgtagtcttaaggaaaaaatgatttatcattcatatcaaaaagagtttagcaaatggaaaaccagttaatgctttaattttaaaatgttttggtgtcttacttttccctaaaaatgacatgtagtaaaaaatggatactttta

SEQ ID NO: 16066 - DNA, 2119 bp, Homo sapiens
gcggccgccggctgaatgaagcctgggacgcgggagccgcgccgcgcgcagtgtctgcagtgccggaggtctgggaggctccgggcgaagcctccctgctgcaggttatgatgatgtcagacaatgctaaaggcagagcagctcattcatggaagaaaagagggagtatttcttctctaagtaatcatgaattttggcgaaaggaaattcatgggcgcatcaaagattctatgagtactgtgtcttatatggaagaacccagtcagcgtgatgatatctctcgccttacagttcagatggaaaacacctatcagttgggttattaaagcccaggtcaaggacttgatgattccacggtataaactaattgtgattgttcacattggacaactgaacaggcagagcatacttattggaagcagatgcctctgggatcctaaaagtgataccttttcatcttatgttttcagaaattcttctctcttcgctcttgcaaatgtctatgcagtttaccttgagtgattgaaaataagaaatctagctcttacttttgaaaattctgaggcaggctgtatgtctgtacacaaaagttttactgccaaaaactttgagaaagaaacaacactgatatttcaagcaactggaagcttttgaattttttcatattctagtaaagatttggggaggggagggtagccacagaaagaatcttgtttatctaaagcaggaacttgatcttggttttgctggattgctttccatagacatagattcttattaaatatttgttttggtactaattattttaattattctttaattagagtgttacaatttcctgcattgttttttaataaaaagaagctttagaaaaactatggctatataccctgaccaataaatgatagtagaatattcaacatggtatacacaaatgataaataatgtgcctcagtgctgcatataaaagaatactggttttcattttgtacttaataaattgagcagcattcattaagtgcaattattgttacatgtacctgacagttgaaactgctgaggtagaattaatggcttcataacaattatcgtggtcccacgggctgcaagctaaaactagaagctcttgtggcttgcctgcactttacacaattgtgggagaaccgaaagttggctcttcagtaatggaaactataaagtgaataaaggctttttgggacactgaagtagacattgtgatattaaatatacatgatgcttaatactaaatgtgtctgtaacacataaaatcatttattggaaagagacattgcttttaaatatcctaggctaacaaactttttcacaaaatatatggctggcaccttaacaaataaagcatgtgtagttaccattttactcctatgaatttaatactaaagtgacccagtgaggtttttgaatagacgggtgctaaaatttacagggctgaaatagcttattattctgctggttaatgtatcttacgccacggatcatttatttttatgaagctttcaagtctttgtgtgcaagtaaaatgatgttgtggcgttgttcttggatggtaagtggactgcctagaggacatttgttaaaggtcaaagacaaattgtacacatatggagaaaattagcaatgctgtagtcttaaggaaaaaatgatttatcattcatatcaaaaagagtttagcaaatggaaaaccagttaatgctttaattttaaaatgttttggtgtcttacttttccctaaaaatgacatgtagtaaaaaatggatacttttaaaatcccttcccttctgctattttctggcttttaaagtgattattcaaaatgaatttgtcaattttcacttttttttttctgttagtgcattagtgggaatatgtctatgtaataatttatcacaaccaatatttgtcaatctccatagaacagttttcaatctggattagattacacgtataacaagtaaatgagcttcatattttcattacacattggtgaacatctcccttcgtggaacaacagcgggggtaatcatatcactaattttgtatgaataaatgaaaatgaagaaacttctttaacatatacaaa

SEQ ID NO: 16067 - DNA, 1952 bp, Homo sapiens
gaaataaattttatgtgtattttcaggtcctcccaaacattttcctgtggtcaccgtcaatcatattttgaaagatgtagtaaccagctatctacaagtagaagaatatgaaccagagctctgtagacagatgactaaaaccatttctgaggttattaaagcccaggtcaaggacttgatgattccacggtataaactaattgtgattgttcacattggacaactgaacaggcagagcatacttattggaagcagatgcctctgggatcctaaaagtgataccttttcatcttatgttttcagaaattcttctctcttcgctcttgcaaatgtctatgcagtttaccttgagtgattgaaaataagaaatctagctcttacttttgaaaattctgaggcaggctgtatgtctgtacacaaaagttttactgccaaaaactttgagaaagaaacaacactgatatttcaagcaactggaagcttttgaattttttcatattctagtaaagatttggggaggggagggtagccacagaaagaatcttgtttatctaaagcaggaacttgatcttggttttgctggattgctttccatagacatagattcttattaaatatttgttttggtactaattattttaattattctttaattagagtgttacaatttcctgcattgttttttaataaaaagaagctttagaaaaactatggctatataccctgaccaataaatgatagtagaatattcaacatggtatacacaaatgataaataatgtgcctcagtgctgcatataaaagaatactggttttcattttgtacttaataaattgagcagcattcattaagtgcaattattgttacatgtacctgacagttgaaactgctgaggtagaattaatggcttcataacaattatcgtggtcccacgggctgcaagctaaaactagaagctcttgtggcttgcctgcactttacacaattgtgggagaaccgaaagttggctcttcagtaatggaaactataaagtgaataaaggctttttgggacactgaagtagacattgtgatattaaatatacatgatgcttaatactaaatgtgtctgtaacacataaaatcatttattggaaagagacattgcttttaaatatcctaggctaacaaactttttcacaaaatatatggctggcaccttaacaaataaagcatgtgtagttaccattttactcctatgaatttaatactaaagtgacccagtgaggtttttgaatagacgggtgctaaaatttacagggctgaaatagcttattattctgctggttaatgtatcttacgccacggatcatttatttttatgaagctttcaagtctttgtgtgcaagtaaaatgatgttgtggcgttgttcttggatggtaagtggactgcctagaggacatttgttaaaggtcaaagacaaattgtacacatatggagaaaattagcaatgctgtagtcttaaggaaaaaatgatttatcattcatatcaaaaagagtttagcaaatggaaaaccagttaatgctttaattttaaaatgttttggtgtcttacttttccctaaaaatgacatgtagtaaaaaatggatacttttaaaatcccttcccttctgctattttctggcttttaaagtgattattcaaaatgaatttgtcaattttcacttttttttttctgttagtgcattagtgggaatatgtctatgtaataatttatcacaaccaatatttgtcaatctccatagaacagttttcaatctggattagattacacgtataacaagtaaatgagcttcatattttcattacacattggtgaacatctcccttcgtggaacaacagcgggggtaatcatatcactaattttgtatgaataaatgaaaatgaagaaacttctttaacatatacaaa

SEQ ID NO: 16068 - DNA, 1125 bp, Homo sapiens
agtgcactcccggcgccttgctagggaagtatacgtgcagcggagtagatatatataggcgtcttcatatacacaattattatgcggggtgcccaacagcggctcgtgaagcgtcataaactatgaaagctcttgtggcttgcctgcactttacacaattgtgggagaaccgaaagttggctcttcagtaatggaaactataaagtgaataaaggctttttgggacactgaagtagacattgtgatattaaatatacatgatgcttaatactaaatgtgtctgtaacacataaaatcatttattggaaagagacattgcttttaaatatcctaggctaacaaactttttcacaaaatatatggctggcaccttaacaaataaagcatgtgtagttaccattttactcctatgaatttaatactaaagtgacccagtgaggtttttgaatagacgggtgctaaaatttacagggctgaaatagcttattattctgctggttaatgtatcttacgccacggatcatttatttttatgaagctttcaagtctttgtgtgcaagtaaaatgatgttgtggcgttgttcttggatggtaagtggactgcctagaggacatttgttaaaggtcaaagacaaattgtacacatatggagaaaattagcaatgctgtagtcttaaggaaaaaatgatttatcattcatatcaaaaagagtttagcaaatggaaaaccagttaatgctttaattttaaaatgttttggtgtcttacttttccctaaaaatgacatgtagtaaaaaatggatacttttaaaatcccttcccttctgctattttctggcttttaaagtgattattcaaaatgaatttgtcaattttcacttttttttttctgttagtgcattagtgggaatatgtctatgtaataatttatcacaaccaatatttgtcaatctccatagaacagttttcaatctggattagattacacgtataacaagtaaatgagcttcatattttcattacacattggtgaacatctcccttcgtggaacaacagcgggggtaatcatatcactaattttgtatgaataaatgaaaatgaagaaacttctttaacatatacaaa

SEQ ID NO: 16069 - DNA, 1349 bp, Homo sapiens
gagttctttgcgaaatgttttgaactgaattttaggtcattaaattgtgagttttggaatatagtggaagggacatgtgagtgttttagattagtagaatgacaatcatttcaatttctatggtatttaatatttttaagtgctcaaatatatttatcttcatcctactccacattattttggctacatagtatttcaagtttggctgcaacactgtgccaaaaaataattgagtgatagaaaagtattattttaaaaggtccactttgaaagggcttatcagaatctctgcattgaacaagggcatatggacagtctttattcaacagacacttcctaaactgttctaaaatttgtctgcaaatgggaaaagtcaagatactaatttgggtgagaggaaaagattcctcttaggtgtagatgaatgaatcatgcagtgagattccaggctaactgtagtttcttgaatcttatttgttaatctgactcacagctgaaaagtaacctgatgaataacagactgatctttaattagagagaaatgtttttaggagtcagttttttcattgcctaaaatgttaagttgaaatttaatgaaataaaagtaaacaaactgcagagtgactgcagaataaagctgtattaaaattccagctgttctgttgaaatccttataatgtttgcagtaatgatctctgtccttcagtcctgatttttcactcttactctaagtaaatactatttatgaatgccaactgtgttagagcttgggagcacaggatttaataagtgaactagatgtacctctgcaattaaataactggatattctggagccagctagattccctgacattttaggctgccaaagagcagaacctgatttgaatgtagattgagtccatacgttatataaataagaatgtaagacatttatcaactgttacgtgtctcagagagtttctacagaaagtcaacccttgaaaataaatcttttccttttattttggatgtttaaaattttacaggtgaaaaaaattctttgaaatataatttcaggccgggcacggtaggctcacgccagtaatcccagcactttgggaggccgaggcgggtggatcacttgaggtcacgtgtttgagaccaccctgaccaatgttgcgaaactccatctccactaaaaaaaaaatagaaaattagctgggcgtggtggtgtgcgcctgtaatcctagctactctggaggttgaggcagaagaatcgcttgaacctgggaggcagaggttgcagtgagccgagatcacgccactgcactccagcctgggcaacaagagcgaaactccatctcaaaa

SEQ ID NO: 16070 - DNA, 649 bp, Homo sapiens
attgtatgggtgccttctgctgtgggccacctgtttccagtctctgttctagaggctacctagttatggaagtcacctgtaactgtccctatttgttctggaaggaagagtggacacttgtaggaaaaagcccagactcctagcctgacatggaagacctttgcctacttctctagacttttctttttgtgctgtgctcataccttgtgccccagccctgctgagctaactgtagcttgcctaatgtgcgtggaacagagattcaatcccaatcttcacctaaacacttcacctaaagaaaatggaaaatggagtttcagtgtaaggctgagctgagattgtgtggaagtttaaaaatatgtccacatcttttttactttctttccattaggaggtgggcttgaaggctgggcacggtggctcatgcctgtaatcccagcactttgggaggctgaggcgggcagatcacctgaggtcaggagtttgagaccagcctcaacatggagaaaccccgtctctactaaaaatacaaaattagccgggtgtgtggtgcatgcctgtaatcccagctatttgggaggctgaggcaggagaattgcttgaacctgggaggcggaggttgctgtgagccgagatcgtgccattgcac

SEQ ID NO: 16071 - DNA, 797 bp, Homo sapiens
  misc_feature (570)..(570): n is a, c, g, or t
  misc_feature (603)..(603): n is a, c, g, or t
  misc_feature (777)..(778): n is a, c, g, or t
ctgatactcaaacagtgatgccaatgactggcctagtttgtggtgaaacccatcgtgccttctgctgcaatctgttggagggaacggttgtctgagaatccatgtgggtgtatctatcactttgtaaagaggaactccagctctgggaagccttaaaagtcccaggatgagggagtagtagaaaaggagaagagggacatgagacccagggtagaaaggatggttatggggtgtgaagaatggaggatgtaggaaggagaaaatgattagaggaatccttacttaagaaggcaaaacagtttgtgaaatcaatggatctccacccctttgcagaagccaggcagccttggctggggcccacctcaggcccttgttatgctggtagctttcacttcttctttgtgtgtgtgtgtgtctgcgtgtgtgtgtgtgtgtgtgtgtgtgtgtggtggtggtggtggtggagtatagatgcagagggatcttagtttggttgccttccaggtctatctgtaggtaggcaggttatccatgtgtattgaaagtatgttgtcgggcctaatcccagcnctttgggaggctgaggtgggtgataacctgagntcaggagttcgagaccagcctgatcaacatggtgaaaccccgtctctactaaaaatacaaaatagccatgcgtggtggcacatgcctgtgatcccagctacttgggttgctgaggcatgagaatagcttgaacctgggaggtggaagttgcagttagccgagatcatgagatcnngccattgcactccaggctg

SEQ ID NO: 16072 - DNA, 394 bp, Homo sapiens
gacctctctattctgcaacaaagggggcttctttggcttgtttcatgggaagatgggaggtgagggagcagtagtttccagctgaagtgctttcatcgccctgtggccaggtaaccacagtctctgtcgaaaaagaaggcattactggccagtgcatctgaaggtcaaaagtacttgaacatctttcctgaaggacggaaaagcagtgaaaggagtcagacttggctgctgcctggccttgcttttatgggaaaaacagaagttatgggatgggaggagcgtgaagagtgggtgttgccggccctcctggcatcacagcttgtgaaccatagcagtgatgggcagtcgctgtcttcactggccctgccaggtccggagatccctgcaggggcac

SEQ ID NO: 16073 - DNA, 796 bp, Homo sapiens
ataattccacccacttaaaccattcttcatggctcttgttttccaggggcctaataattttcactgctgtaatgtttctcagcttcacacttagtttagttgcccaaacaatgttggtgccttactcacattggtgccttgtgaagacgaggctcaggatggggattatggggaaattcttgcacacccagctcctcttaccacttaaaaatataatggcacttttacaaaatgatatgtcacctatattcattgagaattatttgactaccacatttttcccctgatgatagtcatctatcataacttgtgtttgttttcctcctgagatcaaacacttggtgcttattcctgatgtatactctgagaccagctcttaccttctgagtggcagctacccctccctcccaattttagatcctatttttacacatctctatagatatcacctttatttcatgactcacaatattaaatggtacagacttcagtttaaccactggtgtggtaacagcagtagttgctaagtaccaccttcccattgctgtttgagggctaatttgcaaagacatttgaatctcccagtgaagatgtctggggaattttggccagttgtcttccctcttgcccttttgttctttaaaattcagcttggaccatagacacctccaggatcttgtttatgttctgctctcaattgaccaagcactgcgttttgcacaatcagaagtctcacaaaagcaaacagttatgactgcatatctgatgtttatatcctataaaatttcaggaagat

SEQ ID NO: 16074 - DNA, 310 bp, Homo sapiens
aacagtgtcccctaataggatgagttttgggctttaaaatttaaaaaaaaaaaaatgggggcattgatgagtctcgttggcaccttttggcttgtggaggctcgtgatctaatattggtctctgctgtatacccagcacactacctgccacttagccattccataaatatcgttaaataagtgaattaggccgagtgccatggctgacacttgtaatcccagcacttacagaggccgaggtgggaggatcgccttgagcccaggagtttgagaccagcctgggcaacatagcgagaccgcgtctctattt

SEQ ID NO: 16075 - DNA, 2754 bp, Homo sapiens
ctcgggggtggagccgggaccgcagcgcctgccgctcgctcggcgctgtagccgccgctgccgccgctgctcttggctcggggacgcgggcgggcgctccgagaggctctggtgcctgcggctgctgctctcctccgacgcccggggctgcggcgctccgggtcccggcccctgtcccggcatctctcgggtccctgagccccggccccgggtcccgcgtccggccggagagaacgcactcagctgctcgagccgccccgggctcgcgcccccgggccatgaagaggggcccgtgaggcgcgcgcggagtcggaggaagaggagggaggagggaggccgaggaggagggcgcgggaggcggaggatgccgccgcggctgctgccgccgccgccacccgcgggtccccggcgaccctgactccagacccgaggatggagccggcgctgggcgctgcagctgctcccggcgcgtccccgaccaggtagctggtgtcacttcggtgtggttggaagaagactttctccccagctgcattcccggaggcgccctttcgacctggaggccgggtctgctggccacagggctgccgcactggctgggactgccagctgggcctggagacgctggtggctgtggactccccagcttggagcagtccctctttgacctcaccccttggagaagcagccccatgaaggtgcccagccatgcaatgttcctggaaggccgtcctcctccttgccctggcctccattgccatccagtacacggccatccgcaccttcaccgccaagtcctttcacacctgccccgggctggcagaggccgggctggccgagcgactgtgcgaggagagccccaccttcgcctacaacctctcccgcaagacccacatcctcatcctggccaccacgcgcagcggctcctccttcgtgggccagctcttcaaccagcacctggacgtcttctacctgtttgagcccctctaccacgtccagaacacgctcatcccccgcttcacccagggcaagagcccggccgaccggcgggtcatgctaggcgccagccgcgacctcctgcggagcctctacgactgcgacctctacttcctggagaactacatcaagccgccgccggtcaaccacaccaccgacaggatcttccgccgcggggccagccgggtcctctgctcccggcctgtgtgcgaccctccggggccagccgacctggtcctggaggagggggactgtgtgcgcaagtgcgggctactcaacctgaccgtggcggccgaggcgtgccgcgagcgcagccacgtggccatcaagacggtgcgcgtgcccgaggtgaacgacctgcgcgccctggtggaagacccgcgattaaacctcaaggtcatccagctggtccgagacccccgcggcattctggcttcgcgcagcgagaccttccgcgacacgtaccggctctggcggctctggtacggcaccgggaggaaaccctacaacctggacgtgacgcagctgaccacggtgtgcgaggacttctccaactccgtgtccaccggcctcatgcggcccccgtggctcaagggcaagtacatgttggtgcgctacgaggacctggctcggaaccctatgaagaagaccgaggagatctacgggttcctgggcatcccgctggacagccacgtggcccgctggatccagaacaacacgcggggcgaccccaccctgggcaagcacaaatacggcaccgtgcgaaactcggcggccacggccgagaagtggcgcttccgcctctcctacgacatcgtggcctttgcccagaacgcctgccagcaggtgctggcccagctgggctacaagatcgccgcctcggaggaggagctgaagaacccctcggtcagcctggtggaggagcgggacttccgccccttctcgtgacccgggcggtgcgggtgggggcgggaggcgcaaggtgtcggttttgataaaatggaccgtttttaactgttgccttattaacccctccctctcccacctcatcttcgtgtccttcctgcccccagctcaccccactcccttctgccccttttttgtctctgaaatttgcactacgtcttggacgggaatcactggggcagagggcgcctgaagtagggtcccgccccccccaccccattcagacacatggatgttgggtctctgtgcggacggtgacaatgtttacaagcaccacatttacacatccacacacgcacacgggcactcgcgaggcgacttctcaagcttttgaatgggtgagtggtcgggtatctagtttttgcactgtcttactattcaaggtaagaggatacaaacaagaggaccacttgtctctaatttatgaatggtgtccatcctttccccatccctgcctcctgcccctgacgcccatttccccccttagagcagcgaaactgccccctcctgcccgcccttgcctgtcggtgaggcaggtttttactgtgaggtgaacgtggacctgtttctgtttccagtctgtggtgatgctgtctgtctgtctgagtctcgtggccgcccctggaccagtgatgactgatgaatcttatgagcttctgattgatctcggggtccatctgtgatatttctttgtgccaaaaagaaaaaaaaagagtggatcagtttgctaaatgaacattgaaattgaaatgctttatctgtgttttctgtaaataaaagagtgcaataatc

SEQ ID NO: 16076 - DNA, 2305 bp, Homo sapiens
gtatccaggaatccgcagcacgacgtgtaactggatgtcacaccggagttggtaagcatgaatgcacttctcccccgtgtggtttcccggaggtcgcgctatcgaagctcaagacctggtctgctggccacagggctgccgcactggctgggactgccagctgggcctggagacgctggtggctgtggactccccagcttggagcagtccctctttgacctcaccccttggagaagcagccccatgaaggtgcccagccatgcaatgttcctggaaggccgtcctcctccttgccctggcctccattgccatccagtacacggccatccgcaccttcaccgccaagtcctttcacacctgccccgggctggcagaggccgggctggccgagcgactgtgcgaggagagccccaccttcgcctacaacctctcccgcaagacccacatcctcatcctggccaccacgcgcagcggctcctccttcgtgggccagctcttcaaccagcacctggacgtcttctacctgtttgagcccctctaccacgtccagaacacgctcatcccccgcttcacccagggcaagagcccggccgaccggcgggtcatgctaggcgccagccgcgacctcctgcggagcctctacgactgcgacctctacttcctggagaactacatcaagccgccgccggtcaaccacaccaccgacaggatcttccgccgcggggccagccgggtcctctgctcccggcctgtgtgcgaccctccggggccagccgacctggtcctggaggagggggactgtgtgcgcaagtgcgggctactcaacctgaccgtggcggccgaggcgtgccgcgagcgcagccacgtggccatcaagacggtgcgcgtgcccgaggtgaacgacctgcgcgccctggtggaagacccgcgattaaacctcaaggtcatccagctggtccgagacccccgcggcattctggcttcgcgcagcgagaccttccgcgacacgtaccggctctggcggctctggtacggcaccgggaggaaaccctacaacctggacgtgacgcagctgaccacggtgtgcgaggacttctccaactccgtgtccaccggcctcatgcggcccccgtggctcaagggcaagtacatgttggtgcgctacgaggacctggctcggaaccctatgaagaagaccgaggagatctacgggttcctgggcatcccgctggacagccacgtggcccgctggatccagaacaacacgcggggcgaccccaccctgggcaagcacaaatacggcaccgtgcgaaactcggcggccacggccgagaagtggcgcttccgcctctcctacgacatcgtggcctttgcccagaacgcctgccagcaggtgctggcccagctgggctacaagatcgccgcctcggaggaggagctgaagaacccctcggtcagcctggtggaggagcgggacttccgccccttctcgtgacccgggcggtgcgggtgggggcgggaggcgcaaggtgtcggttttgataaaatggaccgtttttaactgttgccttattaacccctccctctcccacctcatcttcgtgtccttcctgcccccagctcaccccactcccttctgccccttttttgtctctgaaatttgcactacgtcttggacgggaatcactggggcagagggcgcctgaagtagggtcccgccccccccaccccattcagacacatggatgttgggtctctgtgcggacggtgacaatgtttacaagcaccacatttacacatccacacacgcacacgggcactcgcgaggcgacttctcaagcttttgaatgggtgagtggtcgggtatctagtttttgcactgtcttactattcaaggtaagaggatacaaacaagaggaccacttgtctctaatttatgaatggtgtccatcctttccccatccctgcctcctgcccctgacgcccatttccccccttagagcagcgaaactgccccctcctgcccgcccttgcctgtcggtgaggcaggtttttactgtgaggtgaacgtggacctgtttctgtttccagtctgtggtgatgctgtctgtctgtctgagtctcgtggccgcccctggaccagtgatgactgatgaatcttatgagcttctgattgatctcggggtccatctgtgatatttctttgtgccaaaaagaaaaaaaaagagtggatcagtttgctaaatgaacattgaaattgaaatgctttatctgtgttttctgtaaataaaagagtgcaataatc

SEQ ID NO: 16077 - DNA, 2514 bp, Homo sapiens
ctcgggggtggagccgggaccgcagcgcctgccgctcgctcggcgctgtagccgccgctgccgccgctgctcttggctcggggacgcgggcgggcgctccgagaggctctggtgcctgcggctgctgctctcctccgacgcccggggctgcggcgctccgggtcccggcccctgtcccggcatctctcgggtccctgagccccggccccgggtcccgcgtccggccggagagaacgcactcagctgctcgagccgccccgggctcgcgcccccgggccatgaagaggggcccgtgaggcgcgcgcggagtcggaggaagaggagggaggagggaggccgaggaggagggcgcgggaggcggaggatgccgccgcggctgctgccgccgccgccacccgcgggtccccggcgaccctgactccagacccgaggatggagccggcgctgggcgctgcagctgctcccggcgcgtccccgaccaggtagctggtgtcacttcggtgtggttggaagaagactttctccccagctgcattcccggaggcgccctttcgacctggaggccgggtctgctggccacagggctgccgcactggctgggactgccagctgggcctggagacgctggtggctgtggactccccagcttggagcagtccctctttgacctcaccccttggagaagcagccccatgaaggtgcccagccatgcaatgttcctggaaggccgtcctcctccttgccctggcctccattgccatccagtacacggccatccgcaccttcaccgccaagtcctttcacacctgccccgggctggcagaggccgggctggccgagcgactgtgcgaggagagccccaccttcgcctacaacctctcccgcaagacccacatcctcatcctggccaccacgcgcagcggctcctccttcgtgggccagctcttcaaccagcacctggacgtcttctacctgtttgagcccctctaccacgtccagaacacgctcatcccccgcttcacccagggcaagagcccggccgaccggcgggtcatgctaggcgccagccgcgacctcctgcggagcctctacgactgcgacctctacttcctggagaactacatcaagccgccgccggtcaaccacaccaccgacaggatcttccgccgcggggccagccgggtcctctgctcccggcctgtgtgcgaccctccggggccagccgacctggtcctggaggagggggactgtgtgcgcaagtgcgggctactcaacctgaccgtggcggccgaggcgtgccgcgagcgcagccacgtggccatcaagacggtgcgcgtgcccgaggtgaacgacctgcgcgccctggtggaagacccgcgattaaacctcaaggtcatccagctggtccgagacccccgcggcattctggcttcgcgcagcgagaccttccgcgacacgtaccggctctggcggctctggtacggcaccgggaggaaaccctacaacctggacgtgacgcagctgaccacggtgtgcgaggacttctccaactccgtgtccaccggcctcatgcggcccccgtggctcaagggcaagtacatgttggtgcgctacgaggacctggctcggaaccctatgaagaagaccgaggagatctacgggttcctgggcatcccgctggacagccacgtggcccgctggatccagaacaacacgcggggcgaccccaccctgggcaagcacaaatacggcaccgtgcgaaactcggcggccacggccgagaagtggcgcttccgcctctcctacgacatcgtggcctttgcccagaacgcctgccagcaggtgctggcccagctgggctacaagatcgccgcctcggaggaggagctgaagaacccctcggtcagcctggtggaggagcgggacttccgccccttctcgtgacccgggcggtgcgggtgggggcgggaggcgcaaggtgtcggttttgataaaatggaccgtttttaactgttgccttattaacccctccctctcccacctcatcttcgtgtccttcctgcccccagctcaccccactcccttctgccccttttttgtctctgaaatttgcactacgtcttggacgggaatcactggggcagagggcgcctgaagtagggtcccgccccccccaccccattcagacacatggatgttgggtctctgtgcggacggtgacaatgtttacaagcaccacatttacacatccacacacgcacacgggcactcgcgaggcgacttctcaagcttttgaatggtctgtggtgatgctgtctgtctgtctgagtctcgtggccgcccctggaccagtgatgactgatgaatcttatgagcttctgattgatctcggggtccatctgtgatatttctttgtgccaaaaagaaaaaaaaagagtggatcagtttgctaaatgaacattgaaattgaaatgctttatctgtgttttctgtaaataaaagagtgcaataatc

SEQ ID NO: 16078 - DNA, 605 bp, Homo sapiens
aggctgacttagaggaccccccgactagcccgacaggacacatggatgttgggtctctgtgcggacggtgacaatgtttacaagcaccacatttacacatccacacacgcacacgggcactcgcgaggcgacttctcaagcttttgaatgggtgagtggtcgggtatctagtttttgcactgtcttactattcaaggtaagaggatacaaacaagaggaccacttgtctctaatttatgaatggtgtccatcctttccccatccctgcctcctgcccctgacgcccatttccccccttagagcagcgaaactgccccctcctgcccgcccttgcctgtcggtgaggcaggtttttactgtgaggtgaacgtggacctgtttctgtttccagtctgtggtgatgctgtctgtctgtctgagtctcgtggccgcccctggaccagtgatgactgatgaatcttatgagcttctgattgatctcggggtccatctgtgatatttctttgtgccaaaaagaaaaaaaaagagtggatcagtttgctaaatgaacattgaaattgaaatgctttatctgtgttttctgtaaataaaagagtgcaataatc

SEQ ID NO: 16079 - DNA, 249 bp, Homo sapiens
ggcgatcttggtgttttaattcagactctatgaggtgcatcgaggtcaggaatgctccctggtccactttcgctttgagtttcaggtagctggtgtcacttcggtgtggttggaagaagactttctccccagctgcattcccggaggcgccctttcgacctggaggccggggtaagcccccctgcccttgctgacttctgctaacccacttcctggggaatcgctgcacaagttgaattttaaagggtt

SEQ ID NO: 16080 - DNA, 552 bp, Homo sapiens
ctgcgttcatcagataatggacgccaggctgcagagatagaacagctgatgggagcaagactgggaagataaacacgcacacccacccagctctcaggttacacatcaatagggaaccatctacgaaataataagagagaaaaattctcataatataaaaaaaaattcaggacacaataaaaatcacttataagacaaaagaactaggaaatcataacctgatgggagcaagatgcgacaccaacacagacataaaaaaggggttggggctgggcgcagtggctcacacctgtaatcccagcactgtgggaggccaagatgggtggatcacttgaggtcaggagttcaagaccagcctgtccaacatggtgaaaccccgcctctactaaaaatataaaaagttagctgggtgcattggcacatgcctgtaatcccagctacttgggaggctgaggcaggagaatcacttgaacctgggagatggaggttgcagtgagccaagatcataccgctgcactccagcctgggtaacagagtgagactgtttcagac

SEQ ID NO: 16081 - DNA, 347 bp, Homo sapiens
ctgcgttcatcagataatggacgccaggctgcagagatagaacagctgatgggagcaagactgggaagataaacacgcacacccacccagctctcaggttacacatcaatagggaaccatctacgaaataataagagagaaaaattctcataatataaaaaaaaattcaggacacaataaaaatcacttataagacaaaagaactaggaaatcataacctgatgggagcagatggccatcttgctcccatcagtcattctgtgacacgtcgttggactgctgttttgataaccaacaagaggtcaatgtatagaatccgctgatgggagaagactgcggaccgaggc

SEQ ID NO: 16082 - DNA, 443 bp, Homo sapiens
gacaatcaaaaatgcctctagacattgctatgtgatccctgtgggtggggggaatggttaaagtgctctgacagagaactactgggtataatgggaagtcactgggggcttttaagcaggggaaggacaagaacagatttatgtctataaaaggtggctctgggttgggcatggtggctcacacctgtaatcctagcagtttgggaggctgagacgggtggatcgcttgaggccaggagtttgagaccagcctggctaacatggcaaaaccctgtctctactaaaaatacaaaaattagctgggcgtggtgatgcacgcctgtaatctctgctacttgggaggctgaggcacgagaattgcttgaacgcaggaagcgaaagttgcaatgagcccagatcgggccactgcactccagcctgggcagcagagtgagactctggag

SEQ ID NO: 16083 - DNA, 689 bp, Homo sapiens
actcccggctagtttttgtatttttaatagagatggagtttcgccatgttggtcaagctgatctcgaactcctggcctcaggtgatctgcctgcctcggcctcccgaagtgctgggattacaggcgtgagccactgcgcctggatgtagctgactcctttaatacattttgttgttataaaaggaaaataacaaagaatcaaaataagcatcgagaacagattatttccctgattttattacttttttcccttttgaataaaatgaaggatatgaatagttacatgtttagatataccttaatttattaacaataaagttttgttgggtgtggtggctcacacctgtaatcgcagcacaggttggccaagtcaggcagattgcttgaacctgggagttcgagaccagccagggaaacatggtgaaaccctgtctccacaaaaaaaaaaaaaaaaacttagctgggcctggtggcatgtgcctgtagtcccagctgctcaagagactgaggtaggaggatttcttgagcccagaaggtcgaggctgcagtgagcagtaattgtgccattgcactccaacctgggtgacagtgagaccttgtctctaaaaataaaaaagtttgttttttctttttgcatatgattatataaaccatgcttatttccatatcaaatatttcttcctttttta

SEQ ID NO: 16084 - DNA, 389 bp, Homo sapiens
attctggcatcatcggcacctgaaaggagatgaaggggatccaagatcagaaaactctgactgccagggttaaataagaaaattcataaaactaggccaggtgcagtggctcacgcctgtaatcccagcactttgggagaccgaggcaggtggatcacctgaggttgggagttcgaggccagcctgaccaatatggagaaaccccgtctctactaaaaacacaaagttagccagacctggtggcacatgcctgttatcccagctactcaggaggctgacacaggagaattgctcgaacccaggaggtggagattgcggtgagccaagatcgcaccactgcactccagcctgggcaacaagagcaaaactctgtctcaaaacaaaaacaa

SEQ ID NO: 16085 - DNA, 763 bp, Homo sapiens
aaatgtaactttttaagggagaaaaaaagaataaagaatccatgacaacccagatttgaaattcttaggtatcacagaaatttaaaacaaggcctttttaggtaacaacaactagagctcagtggtacaacctttgcctctcaagctggtcttagaacatgaagggaaaaaaaaaaactgaacaaatactacctgaattcaactactacctgaaaggtaccagctgccttgcattcacttgtcatcaagatgacttaaggaatactgcggtgtgtgcccctaactaatgaaggctttatctccacattacagttacgatactgaagagacgtaacctgaccaaggccacagagctggaaaaagaagcaaagccaagccgtttttctcatgcactgctcacaacaagcccctccttccactgactcatgaaaaacacactcataatgcccagcccgcaccctaatgaacagccctcttaagagtggtcatcagacttcaatttcacagactagaattgagaaatggaacaaaaccttgggataccagccttccattttggtagggatcatttaaaaaatggtagggatcatttaaaaaatgtgttggtgtctgaaacttactttgaagtggttaaaaaacataaaatgtatagattgtaacaagcaaatatgttaaaatgtactgtacaattctttctttacaattttatggatgttcgaaatttaaaaaatactaaaaagagaatggtcttatttaaaagaaa

SEQ ID NO: 16086 - DNA, 3711 bp, Homo sapiens
ccttgtgaagccccttcaatttagccttcctcttatataagctaaatacttctaaggcctggggatgtttccatctgggggcacaaagctttgctttggataaattagtaactgtgtaaacagtgaacattactgtattctggccttgcatgtttgtgaaagaaacgagggagttgatggattgagaaacacattctatttgtacttaggtgcaaatttgatgacatgtagttttggtttaagataagctttttatccagacccggtctaatctcttcctttcttttacatacctcccttactggcaatacaagtgcattttagtattatttggaacacagcataatcatttacctctagaaatccagacatttttactgtttgcaaataaaccattctgataaattatttttgttgcttaaaataagaggaggaaccgctgtgtgttagcaagaatgtccatacctgatatgaaagagtcatgttggcttcagttcctactgccctgtggacttcccattccctccttacttgagtcaaccatccactcagtactttccacaaatctaataatgaggtgctctctgtaggtaaatcctttcactatggcttgtcctcaaacctcccaagaaaaggttcaactgctcaatctcttaacctttttaattccattcccttgcaggtatcccggccctgcataacaagatgatcccaactcaaggaaaggggtttagcagtgttggatcttggcgtatgtgggatttaaccaggcagaaaggcagacaagagtaagattctaggcagagagagcaaatgcgtcgagcatgggtatgaacatgtgagggatagagaataattctgcaggaagtttgctggatggaagggccttatagggttagaaaagctggtgtcagattgtcaaggactttgaatgtcatggggcttctcttccaggaacacatgggatcaggcttagattaacccaaatgtaattgtcagagcccagagatatttcatggtccagtcctagcactgtgcagctgccaaaagtcaaagccattcaaatctgtactgaaaactgtggaaaagcaaaggagcacttaagtctctttccccatgtcttgcattctcactctcttttgcttcaaagatctgtctttacctgcccctgtccccagtcctaacaaaaagcactcccctaaatcaactcttaagttcctctcccttctcactcctttcttagtctcctctttctgtaagaagttcttgctcctgttgttaatggaagttaattaaagtagtatttcaccttgtaaggctgtaattcttggcacttgttatcctcattttctacatccaaagaccatggaccagaatatctcttaggaggtaagggagagtgaggctatcagccaaagaaaaagtctccagggggaaggggagaatcacttataatttaatactttgtggaaaaaacatctctgccacctatggccctccaataacaatggaagacagaatcaacaggtgagaaccttgggacaaaaataagttacaaagctgttgtaatccaggtaagagctattaagtttccaaacgaaggctgactgtgaggataagtgatactgatttcagaaatctttaaaaagtagaaccaacaagccttgaggtctaactctgttcaacattaaagggaagagtgagtctaagaagacttcaggtttctagcttggccaaaccaattgagctttaagtgaaatgtgcgatatggtaacagagaaggaaaaagacataacgatagatttgagctgctggtgggaaattctggtttagtgcccagctggctgtacaggctggttggactttaggagggaggtttgagctggaaaataaagatggagagttgtctttcagttttagatcatcagtgaggtcataagggtagatggagtttacctgggaaaattaagtagctattcgatttggcttattattatgttaaaataatacttctctagtgaagtacttaatatgccagatactgtgccaagcattttatatacatcctctcttttactaagccctcatagggcaggtattttgattccaatcatactgattggaactcctaagaaggtatcttgcttaaggtcccacaacgaataggtggcagatccagggtaattcaggtctgtcagaacagtgattcttaattttttccctcctcagactccaggagtcacatgaagttatgcatcctgtctgaccgaggcacaggcacaccacatttttatattccgcttccaggatatcacaaacctgaagcccatcctccatggcccagagagaaaacccaggacaaaaccttggagaagactattttcatgaagacaaatggagaaggagcagtagagtaaaaagagaggtaagggaaggcattgagatggtttacagggttagatgttttgagtcaatcccattataattaccaatgctatctacctatttagttaacgttttattgccctgctgttttctccaggataattggaacagcatgtattggttgggtggaaaagatagaacttgagcagggagattgccaaagagtgaagatgtggctgagtgattgatgatggtctgaactgggtattcagggaagagaactagaagccaaccatgtagaatctatgcaggtgctcttaagacattggtttgactggaattatcttcttgttaggtcttaggaatctccttccaggtaactttttctatgattagacaattgatttgttcagggtcacagagcaaagtccacatttaattccacatggccaataaaagtgaggggctacaaggtgagatccaggggccagagttatcaaagtgatacagcacttttaggaataggacagggaatggaggaattggaattccagtattactttcaaaagcagaactggccagaggaattggaattccagtattattttcaaaagcagaactggccagaggtgcttgtgattcctgggtggaaaccatggcagtggacagaagcagcatggaggaaaagagcactggaattcaggctgaggaactgtgaagccaagggtgttgtataggttgtccatttcaaattagggttgcttggttctgggatgatttgcatggaagaggggagagtgacttggagatgtgtgattgaggacagtgagcacagtgagttgatggtgttgctgggttataagcagcttcaaagagaaggcattttgaatgaaggtggaaacataatggccaggagaacaagcaaaggactaggaaacagtgaacttcatcttggcctcaagttcctgaggtgcatatgaataaacagtctctaacccagagggtttcaagaaaagcagagtcctcaaaatccaaaggtagagtttccccacattgatattatactaattacacgtataacagtactttggaaaagcacaggtctctggtcacctctaaaaggcaaggttggtaaggaggtcagggtgtcacctgttggtagtcttaactaaatggtctcttcaagggatctaaggatggaaaggggatatataatggttggattaaaggctcatcattgattagcaaattgtcccttttgtttcttaaacccaatttgtacagggaaagttatgccactgtaagatatttttaaatggggaaaaa

SEQ ID NO: 16087 - DNA, 2943 bp, Homo sapiens
ccttgtgaagccccttcaatttagccttcctcttatataagctaaatacttctaaggcctggggatgtttccatctgggggcacaaagctttgctttggataaattagtaactgtgtaaacagtgaacattactgtattctggccttgcatgtttgtgaaagaaacgagggagttgatggattgagaaacacattctatttgtacttaggtgcaaatttgatgacatgtagttttggtttaagataagctttttatccagacccggtctaatctcttcctttcttttacatacctcccttactggcaatacaagtgcattttagtattatttggaacacagcataatcatttacctctagaaatccagacatttttactgtttgcaaataaaccattctgataaattatttttgttgcttaaaataagaggaggaaccgctgtgtgttagcaagaatgtccatacctgatatgaaagagtcatgttggcttcagttcctactgccctgtggacttcccattccctccttacttgagtcaaccatccactcagtactttccacaaatctaataatgaggtgctctctgtaggtaaatcctttcactatggcttgtcctcaaacctcccaagaaaaggttcaactgctcaatctcttaacctttttaattccattcccttgcaggtatcccggccctgcataacaagatgatcccaactcaaggaaaggggtttagcagtgttggatcttggcgtatgtgggatttaaccaggcagaaaggcagacaagagtaagattctaggcagagagagcaaatgcgtcgagcatgggtatgaacatgtgagggatagagaataattctgcaggaagtttgctggatggaagggccttatagggttagaaaagctggtgtcagattgtcaaggactttgaatgtcatggggcttctcttccaggaacacatgggatcaggcttagattaacccaaatgtaattgtcagagcccagagatatttcatggtccagtcctagcactgtgcagctgccaaaagtcaaagccattcaaatctgtactgaaaactgtggaaaagcaaaggagcacttaagtctctttccccatgtcttgcattctcactctcttttgcttcaaagatctgtctttacctgcccctgtccccagtcctaacaaaaagcactcccctaaatcaactcttaagttcctctcccttctcactcctttcttagtctcctctttctgtaagaagttcttgctcctgttgttaatggaagttaattaaagtagtatttcaccttgtaaggctgtaattcttggcacttgttatcctcattttctacatccaaagaccatggaccagaatatctcttaggaggtaagggagagtgaggctatcagccaaagaaaaagtctccagggggaaggggagaatcacttataatttaatactttgtggaaaaaacatctctgccacctatggccctccaataacaatggaagacagaatcaacaggtgagaaccttgggacaaaaataagttacaaagctgttgtaatccaggtaagagctattaagtttccaaacgaaggctgactgtgaggataagtgatactgatttcagaaatctttaaaaagtagaaccaacaagccttgaggtctaactctgttcaacattaaagggaagagtgagtctaagaagacttcaggtttctagcttggccaaaccaattgagctttaagtgaaatgtgcgatatggtaacagagaaggaaaaagacataacgatagatttgagctgctggtgggaaattctggtttagtgcccagctggctgtacaggctggttggactttaggagggaggtttgagctggaaaataaagatggagagttgtctttcagttttagatcatcagtgaggtcataagggtagatggagtttacctgggaaaattaagtagctattcgatttggcttattattatgttaaaataatacttctctagtgaagtacttaatatgccagatactgtgccaagcattttatatacatcctctcttttactaagccctcatagggcaggtattttgattccaatcatactgattggaactcctaagaaggtatcttgcttaaggtcccacaacgaataggtggcagatccagggtaattcaggtctgtcagaacagtgattcttaattttttccctcctcagactccaggagtcacatgaagttatgcatcctgtctgaccgaggcacaggcacaccacatttttatattccgcttccaggatatcacaaacctgaagcccatcctccatggcccagagagaaaacccaggacaaaaccttggagaagactattttcatgaagacaaatggagaaggagcagtagagtaaaaagagaggtaagggaagcaaatccagctgcctgtacaatccatgccaccgaatgccgtaagtgagacgtaaaagttacgatactgaagagacgtaacctgaccaaggccacagagctggaaaaagaagcaaagccaagccgtttttctcatgcactgctcacaacaagcccctccttccactgactcatgaaaaacacactcataatgcccagcccgcaccctaatgaacagccctcttaagagtggtcatcagacttcaatttcacagactagaattgagaaatggaacaaaaccttgggataccagccttccattttggtagggatcatttaaaaaatggtagggatcatttaaaaaatgtgttggtgtctgaaacttactttgaagtggttaaaaaacataaaatgtatagattgtaacaagcaaatatgttaaaatgtactgtacaattctttctttacaattttatggatgttcgaaatttaaaaaatactaaaaagagaatggtcttatttaaaagaaa

SEQ ID NO: 16088 - DNA, 3658 bp, Homo sapiens
ccttgtgaagccccttcaatttagccttcctcttatataagctaaatacttctaaggcctggggatgtttccatctgggggcacaaagctttgctttggataaattagtaactgtgtaaacagtgaacattactgtattctggccttgcatgtttgtgaaagaaacgagggagttgatggattgagaaacacattctatttgtacttaggtgcaaatttgatgacatgtagttttggtttaagataagctttttatccagacccggtctaatctcttcctttcttttacatacctcccttactggcaatacaagtgcattttagtattatttggaacacagcataatcatttacctctagaaatccagacatttttactgtttgcaaataaaccattctgataaattatttttgttgcttaaaataagaggaggaaccgctgtgtgttagcaagaatgtccatacctgatatgaaagagtcatgttggcttcagttcctactgccctgtggacttcccattccctccttacttgagtcaaccatccactcagtactttccacaaatctaataatgaggtgctctctgtaggtaaatcctttcactatggcttgtcctcaaacctcccaagaaaaggttcaactgctcaatctcttaacctttttaattccattcccttgcaggtatcccggccctgcataacaagatgatcccaactcaaggaaaggggtttagcagtgttggatcttggcgtatgtgggatttaaccaggcagaaaggcagacaagagtaagattctaggcagagagagcaaatgcgtcgagcatgggtatgaacatgtgagggatagagaataattctgcaggaagtttgctggatggaagggccttatagggttagaaaagctggtgtcagattgtcaaggactttgaatgtcatggggcttctcttccaggaacacatgggatcaggcttagattaacccaaatgtaattgtcagagcccagagatatttcatggtccagtcctagcactgtgcagctgccaaaagtcaaagccattcaaatctgtactgaaaactgtggaaaagcaaaggagcacttaagtctctttccccatgtcttgcattctcactctcttttgcttcaaagatctgtctttacctgcccctgtccccagtcctaacaaaaagcactcccctaaatcaactcttaagttcctctcccttctcactcctttcttagtctcctctttctgtaagaagttcttgctcctgttgttaatggaagttaattaaagtagtatttcaccttgtaaggctgtaattcttggcacttgttatcctcattttctacatccaaagaccatggaccagaatatctcttaggaggtaagggagagtgaggctatcagccaaagaaaaagtctccagggggaaggggagaatcacttataatttaatactttgtggaaaaaacatctctgccacctatggccctccaataacaatggaagacagaatcaacaggtgagaaccttgggacaaaaataagttacaaagctgttgtaatccaggtaagagctattaagtttccaaacgaaggctgactgtgaggataagtgatactgatttcagaaatctttaaaaagtagaaccaacaagccttgaggtctaactctgttcaacattaaagggaagagtgagtctaagaagacttcaggtttctagcttggccaaaccaattgagctttaagtgaaatgtgcgatatggtaacagagaaggaaaaagacataacgatagatttgagctgctggtgggaaattctggtttagtgcccagctggctgtacaggctggttggactttaggagggaggtttgagctggaaaataaagatggagagttgtctttcagttttagatcatcagtgaggtcataagggtagatggagtttacctgggaaaattaagtagctattcgatttggcttattattatgttaaaataatacttctctagtgaagtacttaatatgccagatactgtgccaagcattttatatacatcctctcttttactaagccctcatagggcaggtattttgattccaatcatactgattggaactcctaagaaggtatcttgcttaaggtcccacaacgaataggtggcagatccagggtaattcaggtctgtcagaacagtgattcttaattttttccctcctcagactccaggagtcacatgaagttatgcatcctgtctgaccgaggcacaggcacaccacatttttatattccgcttccaggatatcacaaacctgaagcccatcctccatggcccagagagaaaacccaggacaaaaccttggagaagactattttcatgaagacaaatggagaaggagcagtagagtaaaaagagaggtaagggaaggcattgagatggtttacagggttagatgttttgagtcaatcccattataattaccaatgctatctacctatttagttaacgttttattgccctgctgttttctccaggataattggaacagcatgtattggttgggtggaaaagatagaacttgagcagggagattgccaaagagtgaagatgtggctgagtgattgatgatggtctgaactgggtattcagggaagagaactagaagccaaccatgtagaatctatgcaggtgctcttaagacattggtttgactggaattatcttcttgttaggtcttaggaatctccttccaggtaactttttctatgattagacaattgatttgttcagggtcacagagcaaagtccacatttaattccacatggccaataaaagtgaggggctacaaggtgagatccaggggccagagttatcaaagtgatacagcacttttaggaataggacagggaatggaggaattggaattccagtattactttcaaaagcagaactggccagaggaattggaattccagtattattttctggacagaagcagcatggaggaaaagagcactggaattcaggctgaggaactgtgaagccaagggtgttgtataggttgtccatttcaaattagggttgcttggttctgggatgatttgcatggaagaggggagagtgacttggagatgtgtgattgaggacagtgagcacagtgagttgatggtgttgctgggttataagcagcttcaaagagaaggcattttgaatgaaggtggaaacataatggccaggagaacaagcaaaggactaggaaacagtgaacttcatcttggcctcaagttcctgaggtgcatatgaataaacagtctctaacccagagggtttcaagaaaagcagagtcctcaaaatccaaaggtagagtttccccacattgatattatactaattacacgtataacagtactttggaaaagcacaggtctctggtcacctctaaaaggcaaggttggtaaggaggtcagggtgtcacctgttggtagtcttaactaaatggtctcttcaagggatctaaggatggaaaggggatatataatggttggattaaaggctcatcattgattagcaaattgtcccttttgtttcttaaacccaatttgtacagggaaagttatgccactgtaagatatttttaaatggggaaaaa

SEQ ID NO: 16089 - DNA, 1331 bp, Homo sapiens
  misc_feature (10)..(10): n is a, c, g, or t
  misc_feature (51)..(51): n is a, c, g, or t
  misc_feature (54)..(54): n is a, c, g, or t
ccgggcgggnggtgcgggcggggggggggggcaacgtcctcgccttcttanggntgcattgagatggtttacagggttagatgttttgagtcaatcccattataattaccaatgctatctacctatttagttaacgttttattgccctgctgttttctccaggataattggaacagcatgtattggttgggtggaaaagatagaacttgagcagggagattgccaaagagtgaagatgtggctgagtgattgatgatggtctgaactgggtattcagggaagagaactagaagccaaccatgtagaatctatgcaggtgctcttaagacattggtttgactggaattatcttcttgttaggtcttaggaatctccttccaggtaactttttctatgattagacaattgatttgttcagggtcacagagcaaagtccacatttaattccacatggccaataaaagtgaggggctacaaggtgagatccaggggccagagttatcaaagtgatacagcacttttaggaataggacagggaatggaggaattggaattccagtattactttcaaaagcagaactggccagaggaattggaattccagtattattttcaaaagcagaactggccagaggtgcttgtgattcctgggtggaaaccatggcagtggacagaagcagcatggaggaaaagagcactggaattcaggctgaggaactgtgaagccaagggtgttgtataggttgtccatttcaaattagggttgcttggttctgggatgatttgcatggaagaggggagagtgacttggagatgtgtgattgaggacagtgagcacagtgagttgatggtgttgctgggttataagcagcttcaaagagaaggcattttgaatgaaggtggaaacataatggccaggagaacaagcaaaggactaggaaacagtgaacttcatcttggcctcaagttcctgaggtgcatatgaataaacagtctctaacccagagggtttcaagaaaagcagagtcctcaaaatccaaaggtagagtttccccacattgatattatactaattacacgtataacagtactttggaaaagcacaggtctctggtcacctctaaaaggcaaggttggtaaggaggtcagggtgtcacctgttggtagtcttaactaaatggtctcttcaagggatctaaggatggaaaggggatatataatggttggattaaaggctcatcattgattagcaaattgtcccttttgtttcttaaacccaatttgtacagggaaagttatgccactgtaagatatttttaaatggggaaaaa

SEQ ID NO: 16090 - DNA, 330 bp, Homo sapiens
caggagactgtccctagaaaaaaaaatttttttgaggaaatattctaatatttgaaaaactattacccagtttagcaaagaagttgctcaaaacatgtttcatgtttgtatattggaacttacacctggagagccactgagtctctaaccccgaagctcatggactactccatgatctatgaagtttgccagatagaaaagtagagaaatggctaggtgcagtggctcatgcccgtaatcctcgcactttggggaggctgcagcaagagaatcacttgaacccaggagtttgagaccagcctaggcaacataatgaaatcctgcctctac

SEQ ID NO: 16091 - DNA, 330 bp, Homo sapiens
caggagactgtccctagaaaaaaaaatttttttgaggaaatattctaatatttgaaaaactattacccagtttagcaaagaagttgctcaaaacatgtttcatgtttgtatattggaacttacacctggagagccactgagtctctaaccccgaagctcatggactactccatgatctatgaagtttgccagatagaaaagtagagaaatggctaggtgcagtggctcatgcccgtaatcctcgcactttggggaggctgcagcaagagaatcacttgaacccaggagtttgagaccagcctaggcaacataattgaatccgtgctctac

SEQ ID NO: 16092 - DNA, 408 bp, Homo sapiens
gtaaaaatggattcatttattaaatcccaacatactatttctttgtaaaaacaaaacaaaatttgacaaaactatagtccatgttatcgtgtctaaagatggcccagtgttcattccggtgtttattatgtttctgtgatgacttaggcagcacctgcctgagtaccagaattccaatttggacacctgggatttagtgctttgcttactgtgtccctcccgacagtgccgacagtacgctctcctgcattcacagtcctgaatgatctgggtaccatatgtcttttctattagatcctttttaatcatcttcaacatcctattcttacatctagtctagtgttttccatagaagacatggagtataccgtcagtaaagaaaaatactcttctttcatgcaagccctt

SEQ ID NO: 16093 - DNA, 767 bp, Homo sapiens
tctcaagtagctgggactacaactgcgccactacacccagcccattgttttaattaatttttttttgaagtttttgtacagatagggtcttgctatgttgcccaggcttgtctcgaactcagcctcaaatgatcttcctgctttggtctcccaaagtgctgggattacaggcgtgagccactgcacccggccccgcttctctctcttttgaaatatagtctgtatcggatgctgtaatcctaaacccagacctcagttgtgacaggtgaaggttggatgaaataggagttagggagaagtaacatttagtttctaaaaaatgcagtttggtcgttttggggtttgctggcccagccttctcccttcaccctctccatttccagcatcactacttttatgtgtacaaggatgtttgcattcagtaacccctgtgtgtttactttgatgtcccagcactaagaaaagggggtggggtaggtgttggtgctgtttgtttgtgcaggcctgaactttagtcactctagtgtgagctactggactaaatcagctgctccattggattataaattatccttgactctggaagacttatgtctgtggagacagtgtgttggagaaaccaggtggtacagattgctggtaaggccctgctgatgcttagtggctacatatgtcctgtgtgttgtaagagctagtttttgttgttggtgttttgttttaagacagagtcactccagcctgggcaacagggcgagactccatctcaa

SEQ ID NO: 16094 - DNA, 413 bp, Homo sapiens
gctgtcgcctactactactaaattaaaaaccgctcgacgaatattttaagttaaaaatgaaaaagcttttaattgctttgtgtgtgttttaatggagccccattttagaattattttttccgtctccctttaccaacaaaaggaacaatgccaccgtgaatggaatagtttggggaaagctttgccaaacacaaccctgatttcagagcaggaacatggtttggatagatcttcagttccgcttgaattattctgttactgcgctgtcattttcagaagatttccattcctttgcagatgctgttgggagttcgggattatgttcatttcttctgttttaatggcattcagtactaattttataagtgcatcttgtgtgaatctcaataaattcagttttgtaatctttttta

SEQ ID NO: 16095 - DNA, 2178 bp, Homo sapiens
agcgggctcccaccgccccagctggtggtggtctcgacaccacgctcgttgcggggtcacacgccagagctggaaaggggaggtccagccccaagtaaagcgacaaaagctttcattgttgaggttcctcagtgctgaactaacaagagggtacttccttgaacataatgaggccaagtatacagaaagaagagaaagagtatacacttgtttgcgaataccaagagaattggaaaagctgatggtttttggaatctttctgtgcctggatgcgtttttgtatgtgttcaccctgcttcctttaagagttttcctggcactattcaggctcctcactttgccttgctatggcttaagggacagacgtttgcttcagcctgcccaggtgtgtgacattttgaagggtgtcattttggtaatctgctattttatgatgcactatgttgactactccatgatgtaccacctgataagggggcagtccgtcatcaagctctacatcatctacaacatgctggaggtagctgatcgtctgttttcatcttttggacaagacatattagatgctctctattggacagcaacagagcctaaagaaagaaacaagagcccacattggggtgattcctcactttttcatggctgttctctatgtctttttgcatgcaattcttataatggttcaagcaacaactctcaatgtagcttttaactcacacaacaagtctttgcttactatcatgatgtctaataattttgttgaaattaaaggaagtgttttcaagaagtttgaaaagaacaatctctttcaaatgtcaaatagcgatattaaggaacgattcacaaattatgtgcttttactgatagtgtgtctaagaaacatggaacagttttcttggaatccagatcatctctgggtgttgtttccagatgtctgtatggtaattgcatcagaaattgccgtggatattgtaaaacatgcctttattactaaattcaatgacattactgcagatgtctacagtgaatatagagccagtcttgcttttgaccttgttagcagccgacagaaaaatgcatacactgattacagtgactctgtagcacggaggatgggctttattcctctcccactagctgttttactcatcagagttgtaacaagctcaattaaagtgcaaggaatcctgtcttatgcctgtgtcatactcttctattttgggttgatatccctgaaagtacttaatagcatcgtgctgttggggaaatcgtgccagtatgtgaaggaagccaaaatggaagagaagctgtcgaatcctcccgcaacctgcactccaggcaagccgtccagtaaatcacagaacaaatgtaaaccctctcaaggcctttccacagaagaaaacctgtctgcctccatcaccaaacaacctattcatcaaaaggaaaatatcataccattacttgtgacaagcaattctgatcagtttttgacaactccagatggtgacgagaaggacataacgcaggacaattctgaattaaaacacagatcctcaaagaaagatttgttagagatagacaggttcacaatttgtggaaaccgaattgactgaatctgtggcttcatgcgctgaagaagctgggtcctggggcaacaagtgctgtgttgccaggacaaatagatgctaaacatggcacttaaatatttatttaaaaacttaaattattattggcaagcaaatcttagtatctttcttccagtaatatggcctggctgagggtcagaccacaggacaggagcgacctccggccttgactgtctgggaagcttgatggattataaaacttcctcctgcctggccaagcagcagcatcatttccaggacccaacaaaggcaacatcaaaatctgttttgctttgtcagtctgggcttccagaatgttgaatttgcctcaaggcctcttcagtataaggaaatacctggaaaactgtgaaacttttaccacgacgtaatctttccagtctcatactattttcacaaacagttttcaaacgttacttcatctgccaaagcattaaaaaaattaaacataagtcaagataaatgttcttaccaccagaataacccttaaagatgtatcttaattaatcagaataaaaggctaccttaaataaga

SEQ ID NO: 16096 - DNA, 4427 bp, Homo sapiens
agcgggctcccaccgccccagctggtggtggtctcgacaccacgctcgttgcggggtcacacgccagagctggaaaggggaggtccagccccaagtaaagcgacaaaagctttcattgttgaggttcctcagtgctgaactaacaagagggtacttccttgaacataatgaggccaagtatacagaaagaagagaaagagtatacacttgtttgcgaataccaagagaattggaaaagctgatggtttttggaatctttctgtgcctggatgcgtttttgtatgtgttcaccctgcttcctttaagagttttcctggcactattcaggctcctcactttgccttgctatggcttaagggacagacgtttgcttcagcctgcccaggtgtgtgacattttgaagggtgtcattttggtaatctgctattttatgatgcactatgttgactactccatgatgtaccacctgataagggggcagtccgtcatcaagctctacatcatctacaacatgctggaggtagctgatcgtctgttttcatcttttggacaagacatattagatgctctctattggacagcaacagagcctaaagaaagaaacaagagcccacattggggtgattcctcactttttcatggctgttctctatgtctttttgcatgcaattcttataatggttcaagcaacaactctcaatgtagcttttaactcacacaacaagtctttgcttactatcatgatgtctaataattttgttgaaattaaaggaagtgttttcaagaagtttgaaaagaacaatctctttcaaatgtcaaatagcgatattaaggaacgattcacaaattatgtgcttttactgatagtgtgtctaagaaacatggaacagttttcttggaatccagatcatctctgggtgttgtttccagatgtctgtatggtaattgcatcagaaattgccgtggatattgtaaaacatgcctttattactaaattcaatgacattactgcagatgtctacagtgaatatagagccagtcttgcttttgaccttgttagcagccgacagaaaaatgcatacactgattacagtgactctgtagcacggaggatgggctttattcctctcccactagctgttttactcatcagagttgtaacaagctcaattaaagtgcaaggaatcctgtcttatgcctgtgtcatactcttctattttgggttgatatccctgaaagtacttaatagcatcgtgctgttggggaaatcgtgccagtatgtgaaggaagccaaaatggaagagaagctgtcgaatcctcccgcaacctgcactccaggcaagccgtccagtaaatcacagaacaaatgtaaaccctctcaaggcctttccacagaagaaaacctgtctgcctccatcaccaaacaacctattcatcaaaaggaaaatatcataccattacttgtgacaagcaattctgatcagtttttgacaactccagatggtgacgagaaggacataacgcaggacaattctgaattaaaacacagatcctcaaagaaagatttgttagagatagacaggttcacaatttgtggaaaccgaattgactgaatctgtggcttcatgcgctgaagaagctgggtcctggggcaacaagtgctgtgttgccaggacaaatagatgctaaacatggcacttaaatatttatttaaaaacttaaattattattggcaagcaaatcttagtatctttcttccagtaatatggcctggctgagggtcagaccacaggacaggagcgacctccggccttgactgtctgggaagcttgatggattataaaacttcctcctgcctggccaagcagcagcatcatttccaggacccaacaaaggcaacatcaaaatctgttttgctttgtcagtctgggcttccagaatgttgaatttgcctcaaggcctcttcagtataaggaaatacctggaaaactgtgaaacttttaccacgacgtaatctttccagtctcatactattttcacaaacagttttcaaacgttacttcatctgccaaagcattaaaaaaattaaacataagtcaagataaatgttcttaccaccagaataacccttaaagatgtatcttaattaatcagaataaaaggctaccttaaataagaaaatgatgaatagtagcattttgtagggttaaaaaaaaaatgctaaactagtttatttattaaaaaaataattaatgaaggctatgcattactgggaaaaatccttcataatttttcagtttactctttaaagcaaaatgtgagctgtatgtcatttaattggtggataaaacaaatttccttacaaaagggcactttttacaccaaggaagcagagcagtgttaactttaaggtatacttaactgattttgctttaaaactaattacttcataaattattacagctaaaaggattcgatgttgaacaggctgaaaaattgtcaatgtacaaaattcaaaactgtcaactttaactgtaaagtaaatgctccaagtgtgttagacagcatcatcttgcttgggcttaccaaatgcattagtctttgtgtttgggtcgacagcgagtgtgcctgtgctggggcagggtgtgtgttctgtgggagggtgtctgtggggatgtgactatcagggtgggcctgtgctggggatggggcaggcctgggtctggagaggattttgtgtgaaagtaaatggggtgtttgaggcgtatgggtggctgttggtgtggggaggcatctgtgtatggctgttgggaacagcaaccaaaaggtgctttttggttttatttgagatcaagattgtgtttccgcttaattactagtttgtggtctatatcatagaagttatttcccaccccattttatcttgacaaccgtgtttgcatttctgtaaaacttctacaacttctggtgtcagaactgtccagaagatggtactgttaactgttatttcctttgatgttttgattttgaagtttagctctcatgcaaatgtttcaggcgtacatacataggcagaaagcaatttttaggtgatttgtctgtttcttggatgaaatataaagcaagctttaatgttctgacttgttcatttgaaatacaaaaaagtaagtgaattttaatgttttgcattaactaaagaaatctgaagattaatgttgaggaaattgtatggacatgcctttgtgaaaccaggaagtattttaagttaaaaatgaaaaagcttttaattgctttgtgtgtgttttaatggagccccattttagaattattttttccgtctccctttaccaacaaaaggaacaatgccaccgtgaatggaatagtttggggaaagctttgccaaacacaaccctgatttcagagcaggaacatggtttggatagatcttcagttccgcttgaattattctgttactgcgctgtcattttcagaagatttccattcctttgcagatgctgttgggagttcgggattatgttcatttcttctgttttaatggcattcagtactaattttataagtgcatcttgtgtgaatctcaataaattcagttttgtaatcttttttaaaaaggtcactgaatttattttaatatttactattgtatttggtagagtgaatttcccactgtataataagtatttatttgtaattcacaagtgatagagctatcttaatttgaattattgctttggtcttaatggtggcaaaatgtttaattttgtctttggaaaaaataggctcggccttgattatagaccatttaatatttctcagcaaatgaaggtatttgcattttacaagtgttttgaatgtcacacaaaatatttttcacatctgggagtcaagttcaagacagtgctttggttttaaaaaaatctaatgaaggcacaggataggccagacccttattaggttttcctttagaataagtgtaaagaccaagtgtcactgatacgcttgtccagattttcttgtggactttggccagtatttagagtttatattcatgttacataaagtgaaagaaacttgctataattaggccatcaaaatatatcctgccactcctggtaactcagcagaggaggagataaatttacaaaataatgtaatatctctacattgttacatgttttcaactattttttatcaacaaagatttgttaatcacttcctatgtgtcagaaactgttctaagtggtgggatcagcaatgagcaagataagtccctgttcgtctgtggaagactgataggaacaagtcgatgaaataatgtctgctggtcacagagtgtccactgaccaaatgatctctcaggcttatttcagctctaaaatatagttctttaaaacgttaaaaaaagt

SEQ ID NO: 16097 - DNA, 3628 bp, Homo sapiens
agcgggctcccaccgccccagctggtggtggtctcgacaccacgctcgttgcggggtcacacgccagagctggaaaggggaggtccagccccaagtaaagcgacaaaagctttcattgttgaggttcctcagtgctgaactaacaagagggtacttccttgaacataatgaggccaagtatacagaaagaagagaaagagtatacacttgtttgcgaataccaagagaattggaaaagctgatggtttttggaatctttctgtgcctggatgcgtttttgtatgtgttcaccctgcttcctttaagagttttcctggcactattcaggctcctcactttgccttgctatggcttaagggacagacgtttgcttcagcctgcccaggtgtgtgacattttgaagggtgtcattttggtaatctgctattttatgatgcactatgttgactactccatgatgtaccacctgataagggggcagtccgtcatcaagctctacatcatctacaacatgctggaggtagctgatcgtctgttttcatcttttggacaagacatattagatgctctctattggacagcaacagagcctaaagaaagaaacaagagcccacattggggtgattcctcactttttcatggctgttctctatgtctttttgcatgcaattcttataatggttcaagcaacaactctcaatgtagcttttaactcacacaacaagtctttgcttactatcatgatgtctaataattttgttgaaattaaaggaagtgttttcaagaagtttgaaaagaacaatctctttcaaatgtcaaatagcgatattaaggaacgattcacaaattatgtgcttttactgatagtgtgtctaagaaacatggaacagttttcttggaatccagatcatctctgggtgttgtttccagatgtctgtatggtaattgcatcagaaattgccgtggatattgtaaaacatgcctttattactaaattcaatgacattactgcagatgtctacagtgaatatagagccagtcttgcttttgaccttgttagcagccgacagaaaaatgcatacactgattacagtgactctgtagcacggaggatgggctttattcctctcccactagctgttttactcatcagagttgtaacaagctcaattaaagtgcaaggaatcctgtcttatgcctgtgtcatactcttctattttgggttgatatccctgaaagtacttaatagcatcgtgctgttggggaaatcgtgccagtatgtgaaggaagccaaaatggaagagaagctgtcgaatcctcccgcaacctgcactccaggcaagccgtccagtaaatcacagaacaaatgtaaaccctctcaaggcctttccacagaagaaaacctgtctgcctccatcaccaaacaacctattcatcaaaaggaaaatatcataccattacttgtgacaagcaattctgatcagtttttgacaactccagatggtgacgagaaggacataacgcaggacaattctgaattaaaacacagatcctcaaagaaagatttgttagagatagacaggttcacaatttgtggaaaccgaattgactgaatctgtggcttcatgcgctgaagaagctgggtcctggggcaacaagtgctgtgttgccaggacaaatagatgctaaacatggcacttaaatatttatttaaaaacttaaattattattggcaagcaaatcttagtatctttcttccagtaatatggcctggctgagggtcagaccacaggacaggagcgacctccggccttgactgtctgggaagcttgatggattataaaacttcctcctgcctggccaagcagcagcatcatttccaggacccaacaaaggcaacatcaaaatctgttttgctttgtcagtctgggcttccagaatgttgaatttgcctcaaggcctcttcagtataaggaaatacctggaaaactgtgaaacttttaccacgacgtaatctttccagtctcatactattttcacaaacagttttcaaacgttacttcatctgccaaagcattaaaaaaattaaacataagtcaagataaatgttcttaccaccagaataacccttaaagatgtatcttaattaatcagaataaaaggctaccttaaataagaaaatgatgaatagtagcattttgtagggttaaaaaaaaaatgctaaactagtttatttattaaaaaaataattaatgaaggctatgcattactgggaaaaatccttcataatttttcagtttactctttaaagcaaaatgtgagctgtatgtcatttaattggtggataaaacaaatttccttacaaaagggcactttttacaccaaggaagcagagcagtgttaactttaaggtatacttaactgattttgctttaaaactaattacttcataaattattacagctaaaaggattcgatgttgaacaggctgaaaaattgtcaatgtacaaaattcaaaactgtcaactttaactgtaaagtaaatgctccaagtgtgttagacagcatcatcttgcttgggcttaccaaatgcattagtctttgtgtttgggtcgacagcgagtgtgcctgtgctggggcagggtgtgtgttctgtgggagggtgtctgtggggatgtgactatcagggtgggcctgtgctggggatggggcaggcctgggtctggagaggattttgtgtgaaagtaaatggggtgtttgaggcgtatgggtggctgttggtgtggggaggcatctgtgtatggctgttgggaacagcaaccaaaaggtgctttttggttttatttgagatcaagattgtgtttccgcttaattactagtttgtggtctatatcatagaagttatttcccaccccattttatcttgacaaccgtgtttgcatttctgtaaaacttctacaacttctggtgtcagaactgtccagaagatggtactgttaactgttatttcctttgatgttttgattttgaagtttagctctcatgcaaatgtttcaggcgtacatacataggcagaaagcaatttttaggtgatttgtctgtttcttggatgaaatataaagcaagctttaatgttctgacttgttcatttgaaatacaaaaaagtaagtgaattttaatgttttgcattaactaaagaaatctgaagattaatgttgaggaaattgtatggacatgcctttgtgaaaccaggaagtattttaagttaaaaatgaaaaagcttttaattgctttgtgtgtgttttaatggagccccattttagaattattttttccgtctccctttaccaacaaaaggaacaatgccaccgtgaatggaatagtttggggaaagctttgccaaacacaaccctgatttcagagcaggaacatggtttggatagatcttcagttccgcttgaattattctgttactgcgctgtcattttcagaagatttccattcctttgcagatgctgttgggagttcgggattatgttcatttcttctgttttaatggcattcagtactaattttataagtgcatcttgtgtgaatctcaataaattcagttttgtaatctttttta

SEQ ID NO: 16098 - DNA, 4373 bp, Homo sapiens
agcgggctcccaccgccccagctggtggtggtctcgacaccacgctcgttgcggggtcacacgccagagctggaaaggggaggtccagccccaagtaaagcgacaaaagctttcattgttgaggttcctcagtgctgaactaacaagagggtacttccttgaacataatgaggccaagtatacagaaagaagagaaagagtatacacttgtttgcgaataccaagagaattggaaaagctgatggtttttggaatctttctgtgcctggatgcgtttttgtatgtgttcaccctgcttcctttaagagttttcctggcactattcaggctcctcactttgccttgctatggcttaagggacagacgtttgcttcagcctgcccaggtgtgtgacattttgaagggtgtcattttggtaatctgctattttatgatgcactatgttgactactccatgatgtaccacctgataagggggcagtccgtcatcaagctctacatcatctacaacatgctggaggtagctgatcgtctgttttcatcttttggacaagacatattagatgctctctattggacagcaacagagcctaaagaaagaaacaagagcccacattggggtgattcctcactttttcatggctgttctctatgtctttttgcatgcaattcttataatggttcaagcaacaactctcaatgtagcttttaactcacacaacaagtctttgcttactatcatgatgtctaataattttgttgaaattaaaggaagtgttttcaagaagtttgaaaagaacaatctctttcaaatgtcaaatagcgatattaaggaacgattcacaaattatgtgcttttactgatagtgtgtctaagaaacatggaacagttttcttggaatccagatcatctctgggtgttgtttccagatgtctgtatggtaattgcatcagaaattgccgtggatattgtaaaacatgcctttattactaaattcaatgacattactgcagatgtctacagtgaatatagagccagtcttgcttttgaccttgttagcagccgacagaaaaatgcatacactgattacagtgactctgtagcacggaggatgggctttattcctctcccactagctgttttactcatcagagttgtaacaagctcaattaaagtgcaaggaatcctgtcttatgcctgtgtcatactcttctattttgggttgatatccctgaaagtacttaatagcatcgtgctgttggggaaatcgtgccagtatgtgaaggaagccaaaatggaagagaagctgtcgaatcctcccgcaacctgcactccaggcaagccgtccagtaaatcacagaacaaatgtaaaccctctcaaggcctttccacagaagaaaacctgtctgcctccatcaccaaacaacctattcatcaaaaggaaaatatcataccattacttgtgacaagcaattctgatcagtttttgacaactccagatggtgacgagaaggacataacgcaggacaattctgaattaaaacacagatcctcaaagaaagatttgttagagatagacaggttcacaatttgtggaaaccgaattgactgaatctgtggcttcatgcgctgaagaagctgggtcctggggcaacaagtgctgtgttgccaggacaaatagatgctaaacatggcacttaaatatttatttaaaaacttaaattattattggcaagcaaatcttagtatctttcttccagtaatatggcctggctgagggtcagaccacaggacaggagcgacctccggccttgactgtctgggaagcttgatggattataaaacttcctcctgcctggccaagcagcagcatcatttccaggacccaacaaaggcaacatcaaaatctgttttgctttgtcagtctgggcttccagaatgttgaatttgcctcaaggcctcttcagtataaggaaatacctggaaaactgtgaaacttttaccacgacgtaatctttccagtctcatactattttcacaaacagttttcaaacgttacttcatctgccaaagcattaaaaaaattaaacataagtcaagataaatgttcttaccaccagaataacccttaaagatgtatcttaattaatcagaataaaaggctaccttaaataagaaaatgatgaatagtagcattttgtagggttaaaaaaaaaatgctaaactagtttatttattaaaaaaataattaatgaaggctatgcattactgggaaaaatccttcataatttttcagtttactctttaaagcaaaatgtgagctgtatgtcatttaattggtggataaaacaaatttccttacaaaagggcactttttacaccaaggaagcagagcagtgttaactttaaggtatacttaactgattttgctttaaaactaattacttcataaattattacagctaaaaggattcgatgttgaacaggctgaaaaattgtcaatgtacaaaattcaaaactgtcaactttaactgtaaagtaaatgctccaagtgtgttagacagcatcatcttgcttgggcttaccaaatgcattagtctttgtgtttgggtcgacagcgagtgtgcctgtgctggggcagggtgtgtgttctgtgggagggtgtctgtggggatgtgactatcagggtgggcctgtgctggggatggggcaggcctgggtctggagaggattttgtgtgaaagtaaatggggtgtttgaggcgtatgggtggctgttggtgtggggaggcatctgtgtatggctgttgggaacagcaaccaaaaggtgctttttggttttatttgagatcaagattgtgtttccgcttaattactagtttgtggtctatatcatagaagttatttcccaccccattttatcttgacaaccgtgtttgcatttctgtaaaacttctacaacttctggtgtcagaactgtccagaagatggtactgttaactgttatttcctttgatgttttgattttgaagtttagctctcatgcaaatgtttcaggcgtacatacataggcagaaagcaatttttaggtgatttgtctgtttcttggatgaaatataaagcaagctttaatgttctgacttgttcatttgaaatacaagttgaggaaattgtatggacatgcctttgtgaaaccaggaagtattttaagttaaaaatgaaaaagcttttaattgctttgtgtgtgttttaatggagccccattttagaattattttttccgtctccctttaccaacaaaaggaacaatgccaccgtgaatggaatagtttggggaaagctttgccaaacacaaccctgatttcagagcaggaacatggtttggatagatcttcagttccgcttgaattattctgttactgcgctgtcattttcagaagatttccattcctttgcagatgctgttgggagttcgggattatgttcatttcttctgttttaatggcattcagtactaattttataagtgcatcttgtgtgaatctcaataaattcagttttgtaatcttttttaaaaaggtcactgaatttattttaatatttactattgtatttggtagagtgaatttcccactgtataataagtatttatttgtaattcacaagtgatagagctatcttaatttgaattattgctttggtcttaatggtggcaaaatgtttaattttgtctttggaaaaaataggctcggccttgattatagaccatttaatatttctcagcaaatgaaggtatttgcattttacaagtgttttgaatgtcacacaaaatatttttcacatctgggagtcaagttcaagacagtgctttggttttaaaaaaatctaatgaaggcacaggataggccagacccttattaggttttcctttagaataagtgtaaagaccaagtgtcactgatacgcttgtccagattttcttgtggactttggccagtatttagagtttatattcatgttacataaagtgaaagaaacttgctataattaggccatcaaaatatatcctgccactcctggtaactcagcagaggaggagataaatttacaaaataatgtaatatctctacattgttacatgttttcaactattttttatcaacaaagatttgttaatcacttcctatgtgtcagaaactgttctaagtggtgggatcagcaatgagcaagataagtccctgttcgtctgtggaagactgataggaacaagtcgatgaaataatgtctgctggtcacagagtgtccactgaccaaatgatctctcaggcttatttcagctctaaaatatagttctttaaaacgttaaaaaaagt

SEQ ID NO: 16099 - DNA, 3560 bp, Homo sapiens
agcgggctcccaccgccccagctggtggtggtctcgacaccacgctcgttgcggggtcacacgccagagctggaaaggggaggtccagccccaagtaaagcgacaaaagctttcattgttgaggttcctcagtgctgaactaacaagagggtacttccttgaacataatgaggccaagtatacagaaagaagagaaagagtatacacttgtttgcgaataccaagagaattggaaaagctgatggtttttggaatctttctgtgcctggatgcgtttttgtatgtgttcaccctgcttcctttaagagttttcctggcactattcaggctcctcactttgccttgctatggcttaagggacagacgtttgcttcagcctgcccaggtgtgtgacattttgaagggtgtcattttggtaatctgctattttatgatgcactatgttgactactccatgatgtaccacctgataagggggcagtccgtcatcaagctctacatcatctacaacatgctggaggtagctgatcgtctgttttcatcttttggacaagacatattagatgctctctattggacagcaacagagcctaaagaaagaaacaagagcccacattggggtgattcctcactttttcatggctgttctctatgtctttttgcatgcaattcttataatggttcaagcaacaactctcaatgtagcttttaactcacacaacaagtctttgcttactatcatgatgtctaataattttgttgaaattaaaggaagtgttttcaagaagtttgaaaagaacaatctctttcaaatgtcaaatagcgatattaaggaacgattcacaaattatgtgcttttactgatagtgtgtctaagaaacatggaacagttttcttggaatccagatcatctctgggtgttgtttccagatgtctgtatggtaattgcatcagaaattgccgtggatattgtaaaacatgcctttattactaaattcaatgacattactgcagatgtctacagtgaatatagagccagtcttgcttttgaccttgttagcagccgacagaaaaatgcatacactgattacagtgactctgtagcacggaggatgggctttattcctctcccactagctgttttactcatcagagttgtaacaagctcaattaaagtgcaaggaatcctgtcttatgcctgtgtcatactcttctattttgggttgatatccctgaaagtacttaatagcatcgtgctgttggggaaatcgtgccagtatgtgaaggaagccaaaatggaagagaagctgtcgaatcctcccgcaacctgcactccaggcaagccgtccagtaaatcacagaacaaatgtaaaccctctcaaggcctttccacagaagaaaacctgtctgcctccatcaccaaacaacctattcatcaaaaggaaaatatcataccattacttgtgacaagcaattctgatcagtttttgacaactccagatggtgacgagaaggacataacgcaggacaattctgaattaaaacacagatcctcaaagaaagatttgttagagatagacaggttcacaatttgtggaaaccgaattgactgaatctgtggcttcatgcgctgaagaagctgggtcctggggcaacaagtgctgtgttgccaggacaaatagatgctaaacatggcacttaaatatttatttaaaaacttaaattattattggcaagcaaatcttagtatctttcttccagtaatatggcctggctgagggtcagaccacaggacaggagcgacctccggccttgactgtctgggaagcttgatggattataaaacttcctcctgcctggccaagcagcagcatcatttccaggacccaacaaaggcaacatcaaaatctgttttgctttgtcagtctgggcttccagaatgttgaatttgcctcaaggcctcttcagtataaggaaatacctggaaaactgtgaaacttttaccacgacgtaatctttccagtctcatactattttcacaaacagttttcaaacgttacttcatctgccaaagcattaaaaaaattaaacataagtcaagataaatgttcttaccaccagaataacccttaaagatgtatcttaattaatcagaataaaaggctaccttaaataagaaaatgatgaatagtagcattttgtagggttaaaaaaaaaatgctaaactagtttatttattaaaaaaataattaatgaaggctatgcattactgggaaaaatccttcataatttttcagtttactctttaaagcaaaatgtgagctgtatgtcatttaattggtggataaaacaaatttccttacaaaagggcactttttacaccaaggaagcagagcagtgttaactttaaggtatacttaactgattttgctttaaaactaattacttcataaattattacagctaaaaggattcgatgttgaacaggctgaaaaattgtcaatgtacaaaattcaaaactgtcaactttaactgtaaagtaaatgctccaagtgtgttagacagcatcatcttgcttgggcttaccaaatgcattagtctttgtgtttgggtcgacagcgagtgtgcctgtgctggggcagggtgtgtgttctgtgggagggtgtctgtggggatgtgactatcagggtgggcctgtgctggggatggggcaggcctgggtctggagaggattttgtgtgaaagtaaatggggtgtttgaggcgtatgggtggctgttggtgtggggaggcatctgtgtatggctgttgggaacagcaaccaaaaggtgctttttggttttatttgagatcaagattgtgtttccgcttaattactagtttgtggtctatatcatagaagttatttcccaccccattttatcttgacaaccgtgtttgcatttctgtaaaacttctacaacttctggtgtcagaactgtccagaagatggtactgttaactgttatttcctttgatgttttgattttgaagtttagctctcatgcaaatgtttcaggcgtacatacataggcagaaagcaatttttaggtgatttgtctgtttcttggatgaaatataaagcaagctttaatgttctgacttgttcatttgaaatacaaaaaagtaagtgaattttaatgttttgcattaactaaagaaatctgaagattaatgttgaggaaattgtatggacatgcctttgtgaaaccaggaagtattttaagttaaaaatgaaaaagcttttaattgctttgtgtgtgttttaatggagccccattttagaattattttttccgtctcccctgatttcagagcaggaacatggtttggatagatcttcagttccgcttgaattattctgttactgcgctgtcattttcagaagatttccattcctttgcagatgctgttgggagttcgggattatgttcatttcttctgttttaatggcattcagtactaattttataagtgcatcttgtgtgaatctcaataaattcagttttgtaatctttttta

SEQ ID NO: 16100 - DNA, 843 bp, Homo sapiens
aacaattaggtttgtcttcaacactgcacggacagaaggggccccttagcctttccacagaagaaaacctgtctgcctccatcaccaaacaacctattcatcaaaaggaaaatatcataccattacttgtgacaagcaattctgatcagtttttgacaactccagatggtgacgagaaggacataacgcaggacaattctgaattaaaacacagatcctcaaagaaagatttgttagagatagacaggttcacaatttgtggaaaccgaattgactgaatctgtggcttcatgcgctgaagaagctgggtcctggggcaacaagtgctgtgttgccaggacaaatagatgctaaacatggcacttaaatatttatttaaaaacttaaattattattggcaagcaaatcttagtatctttcttccagtaatatggcctggctgagggtcagaccacaggacaggagcgacctccggccttgactgtctgggaagcttgatggattataaaacttcctcctgcctggccaagcagcagcatcatttccaggacccaacaaaggcaacatcaaaatctgttttgctttgtcagtctgggcttccagaatgttgaatttgcctcaaggcctcttcagtataaggaaatacctggaaaactgtgaaacttttaccacgacgtaatctttccagtctcatactattttcacaaacagttttcaaacgttacttcatctgccaaagcattaaaaaaattaaacataagtcaagataaatgttcttaccaccagaataacccttaaagatgtatcttaattaatcagaataaaaggctaccttaaataaga

SEQ ID NO: 16101 - DNA, 1002 bp, Homo sapiens
agcgggctcccaccgccccagctggtggtggtctcgacaccacgctcgttgcggggtcacacgccagagctggaaaggggaggtccagccccaagtaaagcgacaaaagctttcattgttgaggttcctcagtgctgaactaacaagagggtacttccttgaacataatgaggccaagtatacagaaagaagagaaagagtatacacttgtttgcgaataccaagagaattggaaaagctgatggtttttggaatctttctgtgcctggatgcgtttttgtatgtgttcaccctgcttcctttaagagttttcctggcactattcaggctcctcactttgccttgctatggcttaagggacagacgtttgcttcagcctgcccaggtgtgtgacattttgaagggtgtcattttggtaatctgctattttatgatgcactatgttgactactccatgatgtaccacctgataagggggcagtccgtcatcaagctctacatcatctacaacatgctggaggtagctgatcgtctgttttcatcttttggacaagacatattagatgctctctattggacagcaacagagcctaaagaaagaaacaagagcccacattggggtgattcctcactttttcatggctgttctctatgtctttttgcatgcaattcttataatggttcaagcaacaactctcaatgtagcttttaactcacacaacaagtctttgcttactatcatgatgtctaataattttgttgaaattaaaggaagtgttttcaagaagtttgaaaagaacaatctctttcaaatgtcaaatagcgatattaaggaacgattcacaaattatgtgcttttactgatagtgtgtctaagaaacatggaacagttttcttggaatccaggtaactcactcttaacaaaacagtgtcttataattttacttctaagccaaaatcattcttttacatggaataaaatgaatattgcagaaaactcca

SEQ ID NO: 16102 - DNA, 419 bp, Homo sapiens
ctggaatttccatactagaattatgttggcaaaagaagtcaatggcttaccatggtagcaccagcctatatatacacacacacacacacacacacacatatatatatatataaagttgtatatttatagacatttatacatcgtctaataatttcatcatgttctggctaaaataattatatatgtactttattatgttgtttatatacactacagtacttatgttgattttttttcttttagatattaaggaacgattcacaaattatgtgcttttactgatagtgtgtctaagaaacatggaacagttttcttggaatccaggtaactcactcttaacaaaacagtgtcttataattttacttctaagccaaaatcattcttttacatggaataaaatgaatattgcagaaaactcc

SEQ ID NO: 16103 - DNA, 873 bp, Homo sapiens
gagccgcgggcggagagtctgaggcgtggcccttcgagccagctccgccccgttgttcctggcttgagtagggcagagagcaccgcccagcagccagtgggttcccgcgcgtgccgagactctgaggccttgcacccccacgatcccgtacgatggccgtcaagaagatcgcgatcttcggcgccactggccagaccgggctcaccaccctggcgcaggcggtgcaagcaggttacgaagtgacagtgctggtgcgggactcctccaggctgccatcagaggggccccggccggcccacgtggtagtgggagatgttctgcaggcagccgatgtggacaagaccgtggctgggcaggacgctgtcatcgtgctgctgggcacccgcaatgacctcagtcccacgacagtgatgtccgagggcgcccggaacattgtggcagccatgaaggctcatggtgtggacaaggtcgtggcctgcacctcggctttcctgctctgggaccctaccaaggtgcccccacgactgcaggctgtgactgatgaccacatccggatgcacaaggtgctgcgggaatcaggcctgaagtacgtggctgtgatgccgccacacataggagaccagccactaactggggcgtacacagtgaccctggatggacgagggccctcaagggtcatctccaaacatgacctgggccatttcatgctgcgctgcctcaccaccgatgagtacgacggacacagcacctacccctcccaccagtaccagtagcactctgtccccatctgggagggtggcattctgggacatgaggagcaaaggaagggggcaataaatgttgagccaagagcttcaaattactctagaaaaa

SEQ ID NO: 16104 - DNA, 830 bp, Homo sapiens
gaattcgaatgccaccctcccagatgggggcagagagcaccgcccagcagccagtgggttcccgcgcgtgccgagactctgaggccttgcacccccacgatcccgtacgatggccgtcaagaagatcgcgatcttcggcgccactggccagaccgggctcaccaccctggcgcaggcggtgcaagcaggttacgaagtgacagtgctggtgcgggactcctccaggctgccatcagaggggccccggccggcccacgtggtagtgggagatgttctgcaggcagccgatgtggacaagaccgtggctgggcaggacgctgtcatcgtgctgctgggcacccgcaatgacctcagtcccacgacagtgatgtccgagggcgcccggaacattgtggcagccatgaaggctcatggtgtggacaaggtcgtggcctgcacctcggctttcctgctctgggaccctaccaaggtgcccccacgactgcaggctgtgactgatgaccacatccggatgcacaaggtgctgcgggaatcaggcctgaagtacgtggctgtgatgccgccacacataggagaccagccactaactggggcgtacacagtgaccctggatggacgagggccctcaagggtcatctccaaacatgacctgggccatttcatgctgcgctgcctcaccaccgatgagtacgacggacacagcacctacccctcccaccagtaccagtagcactctgtccccatctgggagggtggcattctgggacatgaggagcaaaggaagggggcaataaatgttgagccaagagcttcaaattactctagaaaaa

SEQ ID NO: 16105 - DNA, 732 bp, Homo sapiens
tgagagttcatggtggcttctaggacccagctcctggagcccaagagtgccagcccactgaccaggctctctgctcctctttgcccacaggttacgaagtgacagtgctggtgcgggactcctccaggctgccatcagaggggccccggccggcccacgtggtagtgggagatgttctgcaggcagccgatgtggacaagaccgtggctgggcaggacgctgtcatcgtgctgctgggcacccgcaatgacctcagtcccacgacagtgatgtccgagggcgcccggaacattgtggcagccatgaaggctcatggtgtggacaaggtcgtggcctgcacctcggctttcctgctctgggaccctaccaaggtgcccccacgactgcaggctgtgactgatgaccacatccggatgcacaaggtgctgcgggaatcaggcctgaagtacgtggctgtgatgccgccacacataggagaccagccactaactggggcgtacacagtgaccctggatggacgagggccctcaagggtcatctccaaacatgacctgggccatttcatgctgcgctgcctcaccaccgatgagtacgacggacacagcacctacccctcccaccagtaccagtagcactctgtccccatctgggagggtggcattctgggacatgaggagcaaaggaagggggcaataaatgttgagccaagagcttcaaattactctagaaaaa

SEQ ID NO: 16106 - DNA, 825 bp, Homo sapiens
acccacgcgtcgcggacgcgtgggtcgacccacgcgtccggactagttctagatcgccgcgcgtgccgagactctgaggccttgcacccccacgatcccgtacgatggccgtcaagaagatcgcgatcttcggcgccactggccagaccgggctcaccaccctggcgcaggcggtgcaagcaggttacgaagtgacagtgctggtgcgggactcctccaggctgccatcagaggggccccggccggcccacgtggtagtgggagatgttctgcaggcagccgatgtggacaagaccgtggctgggcaggacgctgtcatcgtgctgctgggcacccgcaatgacctcagtcccacgacagtgatgtccgagggcgcccggaacattgtggcagccatgaaggctcatggtgtggacaaggtcgtggcctgcacctcggctttcctgctctgggaccctaccaaggtgcccccacgactgcaggctgtgactgatgaccacatccggatgcacaaggtgctgcgggaatcaggcctgaagtacgtggctgtgatgccgccacacataggagaccagccactaactggggcgtacacagtgaccctggatggacgagggccctcaagggtcatctccaaacatgacctgggccatttcatgctgcgctgcctcaccaccgatgagtacgacggacacagcacctacccctcccaccagtaccagtagcactctgtccccatctgggagggtggcattctgggacatgaggagcaaaggaagggggcaataaatgttgagccaagagcttcaaattactctagaaaaa

SEQ ID NO: 16107 - DNA, 920 bp, Homo sapiens
gagccgcgggcggagagtctgaggcgtggcccttcgagccagctccgccccgttgttcctggcttgagtagggcagagagcaccgcccagcagccagtgggttcccgcgcgtgccgagactctgaggccttgcacccccacgatcccgtacgatggccgtcaagaagatcgcgatcttcggcgccactggccagaccgggctcaccaccctggcgcaggcggtgcaagcaggttacgaagtgacagtgctggtgcgggactcctccaggctgccatcagaggggccccggccggcccacgtggtagtgggagatgttctgcaggcagccgatgtggacaagaccgtggctgggcaggacgctgtcatcgtgctgctgggcacccgcaatgacctcagtcccacgacagtgatgtccgagggcgcccggaacattgtggcagccatgaaggctcatggtgtggacaaggtcgtggcctgcacctcggctttcctgctctgggaccctaccaaggtgcccccacgactgcaggctgtgactgatgaccacatccggatgcacaaggtgctgcgggaatcaggcctgaagtacgtggctgtgatgccgccacacataggagaccagccactaactggggcgtacacagtgaccctggatggacgagggccctcaagggtcatctccaaacatgacctgggccatttcatgctgcgctgcctcaccaccgatgagtacgacggacacagcacctacccctcccaccagtaccagtagcactctgtccccatctgggagggtggcattctgggacatgaggagcaaaggaagggggcaataaatgttgagccaagagcttcaaattactctagaaaaaaaacaaaaaatctcgggcctactaatcggcgggaaaaacggtcgcca

SEQ ID NO: 16108 - DNA, 781 bp, Homo sapiens
tttttagagtaatttgaagctcttggctcaacatttcttgcacccccacgatcccgtacgatggccgtcaagaagatcgcgatcttcggcgccactggccagaccgggctcaccaccctggcgcaggcggtgcaagcaggttacgaagtgacagtgctggtgcgggactcctccaggctgccatcagaggggccccggccggcccacgtggtagtgggagatgttctgcaggcagccgatgtggacaagaccgtggctgggcaggacgctgtcatcgtgctgctgggcacccgcaatgacctcagtcccacgacagtgatgtccgagggcgcccggaacattgtggcagccatgaaggctcatggtgtggacaaggtcgtggcctgcacctcggctttcctgctctgggaccctaccaaggtgcccccacgactgcaggctgtgactgatgaccacatccggatgcacaaggtgctgcgggaatcaggcctgaagtacgtggctgtgatgccgccacacataggagaccagccactaactggggcgtacacagtgaccctggatggacgagggccctcaagggtcatctccaaacatgacctgggccatttcatgctgcgctgcctcaccaccgatgagtacgacggacacagcacctacccctcccaccagtaccagtagcactctgtccccatctgggagggtggcattctgggacatgaggagcaaaggaagggggcaataaatgttgagccaagagcttcaaattactctagaaaaa

SEQ ID NO: 16109 - DNA, 785 bp, Homo sapiens
gagagagagagcagagagagagagatgagagacgagagcagcagacagcaaagaccagtaacagatggccgtcaagaagatcgcgatcttcggcgccactggccagaccgggctcaccaccctggcgcaggcggtgcaagcaggttacgaagtgacagtgctggtgcgggactcctccaggctgccatcagaggggccccggccggcccacgtggtagtgggagatgttctgcaggcagccgatgtggacaagaccgtggctgggcaggacgctgtcatcgtgctgctgggcacccgcaatgacctcagtcccacgacagtgatgtccgagggcgcccggaacattgtggcagccatgaaggctcatggtgtggacaaggtcgtggcctgcacctcggctttcctgctctgggaccctaccaaggtgcccccacgactgcaggctgtgactgatgaccacatccggatgcacaaggtgctgcgggaatcaggcctgaagtacgtggctgtgatgccgccacacataggagaccagccactaactggggcgtacacagtgaccctggatggacgagggccctcaagggtcatctccaaacatgacctgggccatttcatgctgcgctgcctcaccaccgatgagtacgacggacacagcacctacccctcccaccagtaccagtagcactctgtccccatctgggagggtggcattctgggacatgaggagcaaaggaagggggcaataaatgttgagccaagagcttcaaattactctagaaaaa

SEQ ID NO: 16110 - DNA, 905 bp, Homo sapiens
gagccgcgggcggagagtctgaggcgtggcccttcgagccagctccgccccgttgttcctggcttgagtagggcagagagcaccgcccagcagccagtgggttcccgcgcgtgccgagactctgaggccttgcacccccacgatcccgtacgatggccgtcaagaagatcgcgatcttcggcgccactggccagaccgggctcaccaccctggcgcaggcggtgcaagcaggttacgaagtgacagtgctggtgcgggactcctccaggctgccatcagaggggccccggccggcccacgtggtagtgggagatgttctgcaggcagccgatgtggacaagaccgtggctgggcaggacgctgtcatcgtgctgctgggcacccgcaatgacctcagtcccacgacagtgatgtccgagggcgcccggaacattgtggcagccatgaaggctcatggtgtggacaaggtcgtggcctgcacctcggctttcctgctctgggaccctaccaaggtgcccccacgactgcaggctgtgactgatgaccacatccggatgcacaaggtgctgcgggaatcaggcctgaagtacgtggctgtgatgccgccacacataggagaccagccactaactggggcgtacacagtgaccctggatggacgagggccctcaagggtcatctccaaacatgacctgggccatttcatgctgcgctgcctcaccaccgatgagtacgacggacacagcacctacccctcccaccagtaccagtagcactctgtccccatctgggagggtggcattctgggacatgaggagcaaaggaagggggcaataaatgttgagccaagagcttcaaattactctagaaaaagaaaccgactgtatgactctccactctctctg

SEQ ID NO: 16111 - DNA, 468 bp, Homo sapiens
tagtcccacacctgcaccggtagtcccacacctgcaccggtagtcccacacctgcaccggagtcccacacctgcacctcggctttcctgctctgggaccctaccaaggtgcccccacgactgcaggctgtgactgatgaccacatccggatgcacaaggtgctgcgggaatcaggcctgaagtacgtggctgtgatgccgccacacataggagaccagccactaactggggcgtacacagtgaccctggatggacgagggccctcaagggtcatctccaaacatgacctgggccatttcatgctgcgctgcctcaccaccgatgagtacgacggacacagcacctacccctcccaccagtaccagtagcactctgtccccatctgggagggtggcattctgggacatgaggagcaaaggaagggggcaataaatgttgagccaagagcttcaaattactctagaaaaa

SEQ ID NO: 16112 - DNA, 776 bp, Homo sapiens
gagccgcgggcggagagtctgaggcgtggcccttcgagccagctccgccccgttgttcctggcttgagtagggcagagagcaccgcccagcagccagtgggttcccgcgcgtgccgagactctgaggccttgcacccccacgatcccgtacgatggccgtcaagaagatcgcgatcttcggcgccactggccagaccgggctcaccaccctggcgcaggcggtgcaagcaggttacgaagtgacagtgctggtgcgggactcctccaggctgccatcagaggggccccggccggcccacgtggtagtgggagatgttctgcaggcagccgatgtggacaagaccgtggctgggcaggacgctgtcatcgtgctgctgggcacccgcaatgacctcagtcccacgacagtgatgtccgagggcgcccggaacattgtggcagccatgaaggctcatggtgtggacaaggtcgtggcctgcacctcgggagaccagccactaactggggcgtacacagtgaccctggatggacgagggccctcaagggtcatctccaaacatgacctgggccatttcatgctgcgctgcctcaccaccgatgagtacgacggacacagcacctacccctcccaccagtaccagtagcactctgtccccatctgggagggtggcattctgggacatgaggagcaaaggaagggggcaataaatgttgagccaagagcttcaaattactctagaaaaagaaaccgactgtatgactctccactctctctg

SEQ ID NO: 16113 - DNA, 639 bp, Homo sapiens
gaattcgaatgccaccctcccagatgggggcagagagcaccgcccagcagccagtgggttcccgcgtggtagtgggagatgttctgcaggcagccgatgtggacaagaccgtggctgggcaggacgctgtcatcgtgctgctgggcacccgcaatgacctcagtcccacgacagtgatgtccgagggcgcccggaacattgtggcagccatgaaggctcatggtgtggacaaggtcgtggcctgcacctcggctttcctgctctgggaccctaccaaggtgcccccacgactgcaggctgtgactgatgaccacatccggatgcacaaggtgctgcgggaatcaggcctgaagtacgtggctgtgatgccgccacacataggagaccagccactaactggggcgtacacagtgaccctggatggacgagggccctcaagggtcatctccaaacatgacctgggccatttcatgctgcgctgcctcaccaccgatgagtacgacggacacagcacctacccctcccaccagtaccagtagcactctgtccccatctgggagggtggcattctgggacatgaggagcaaaggaagggggcaataaatgttgagccaagagcttcaaattactctagaaaaa

SEQ ID NO: 16114 - DNA, 810 bp, Homo sapiens
gagccgcgggcggagagtctgaggcgtggcccttcgagccagctccgccccgttgttcctggcttgagtagggcagagagcaccgcccagcagccagtgggttcccgcgcgtgccgagactctgaggccttgcacccccacgatcccgtacgatggccgtcaagaagatcgcgatcttcggcgccactggccagaccgggctcaccaccctggcgcaggcggtgcaagcaggttacgaagtgacagtgctggtgcgggactcctccaggctgccatcagaggggccccggccggcccacgtggtagtgggagatgttctgcaggcagccgatgtggacaagaccgtggctgggcaggacgctgtcatcgtgctgctgggcacccgcaatgacctcagtcccacgacagtgatgtccgagggcgcccggaacattgtggcagccatgaaggctcatggtgtggacaaggtcgtggcctgcacctcggctttcctgctctgggaccctaccaaggtgcccccacgactgcaggctgtgactgatgaccacatccggatgcacaaggtgctgcgggaatcaggcctgaacctggatggacgagggccctcaagggtcatctccaaacatgacctgggccatttcatgctgcgctgcctcaccaccgatgagtacgacggacacagcacctacccctcccaccagtaccagtagcactctgtccccatctgggagggtggcattctgggacatgaggagcaaaggaagggggcaataaatgttgagccaagagcttcaaattactctagaaaaa

SEQ ID NO: 16115 - DNA, 434 bp, Homo sapiens
gagccgcgggcggagagtctgaggcgtggcccttcgagccagctccgccccgttgttcctggcttgagtagggcagagagcaccgcccagcagccagtgggttcccgcgcgtgccgagactctgaggccttgcacccccacgatcccgtacgatggccgtcaagaagatcgcgatcttcggcgccactggccagaccgggctcaccaccctggcgcaggcggtgcaagcaggttacgaagtgacagtgctggtgcgggactcctccaggctgccatcagaggggccccggccggcccacgtggtagtgggagatgttctgcaggcagccgatgtggacaagaccgtggctgggcaggacgctgtcatcgtgctgctgggcacccgcaatgacctcagtactgagccccccctctgcccacggccctcccctaca

SEQ ID NO: 16116 - DNA, 166 bp, Homo sapiens
gaccactatgaagaaagcttctgaggacaaaggcagctggggagatcccaagaggagaccaaataaggaaaaatgcagttggctagagaaatcggtgagaatcaagactctatgggttgaaacctggctctacttactggctatataaacttcaagcaacttgttt

SEQ ID NO: 16117 - DNA, 547 bp, Homo sapiens
aagtttatgaggcaatataaagttatttgaaaagggcacatttccatcagctcttatagatctgctgcagtggtgtacaaatgcccctcttatcaatgtggaaattgtgctaactcctggggtctttcttttcctacccattctccctaacaaagcatcactggaacaataactgtcatgataaaagacccactgcatacgtcttggcacaggagttgaagcaccattgtgaaaccatttgtgcctggagtgctttttcttttcttagcactggctcatgacatgcttcagattggtcaaagaaagagattttatcaagtgttcccttctcaagatgtgtgataagtgctagcagagtgtgctggtagcagatctttagagattgaaaaagagaaggggaaatttcagaagtggggggaaaaagctaaaccttattttgaatattgtgggttctagggtctttgtatgtgaatcagtgatgataaatttcacattaggaatgacataaaagtaacaaaatattatattctgttctttgttgtgcatg

SEQ ID NO: 16118 - DNA, 749 bp, Homo sapiens
cataacaattccttttatgttccatgggctagaattgaataatatgggcataatagctgcagaagaaaaggaaaatactgtcttttagttgaatgcattgctactttgaaaaaaactgaagttctgtttctgaggaagcgtgagagaacatgctactagatggcatctagaagtctttgcctaagattaagagctgatgtatactcaccaatgatgtatgaaaatacagttttatagtattattgttttgttattttttagcaaacctacataactgaatttttataaagattttgttttttgccttaactttattttttaaaatatttttaaattttttttcaagatctcatgaggttgcatttccttcactttaatatctaactccagcataagtcagtataagtgactctgtgatgagtcacatctcatttaaaattgagagttaaggctgagagtggtggctcacgcctataatcccagcactttgagaggcagtaggatcacttgagactagaatttcgagaccagcctgggcaacaaaacgagacctcatctcttaaaaaaaaatatatacatatatatatttttatattttagctggttgtggtggcgtgcacctgtagtcccagctgctctggaggctgaggtgggaggatcacttgagctcaggagttcaaggctgcagtgagctaagatcacatcactgcactccagcctgggtgacaccccatgaccttgtcgctctc

SEQ ID NO: 16119 - DNA, 183 bp, Homo sapiens
actactgtgtttagtttatgatccattaaaacaatgtatgtattggaaattgtagactgccaggcaattgttttcattatttattaaatgttgtttccctcacttttcaaatggtagccctttgaaatatgccaggctttccagcagggggtttttttaaaaacctatgaccctcttattcct

SEQ ID NO: 16120 - DNA, 442 bp, Homo sapiens
atttccttagacacttttctaagttagaactctctatgtccctcgtccccttctctcctcgctttccttttcctcgggtgaaatggttcttggcatatttctcacgcatgtctattgcgccttcgcctctgcaaagccaccgctgggttgctgagacccgctctgccaacccggctactggaggggtttccttgaacttgaagaaaggtacatcaaaacccactagtgttaactgccacgtcaagtttgatgctaataatgtgcagattatgacgaaaattgccaatcatgctctctgatggacctcctttgaatgtggaattggagaaaagttccccgcacggagacctgctgtcaagtactaacaacccgctaagggaagtcattaggagagacggataagagactcggtacataaaacattgttcttggtgcatagaat

SEQ ID NO: 16121 - DNA, 451 bp, Homo sapiens
tcatttatctgttcctctatcatctttatttcctgtaaggtgggaattatagcaaaggccttgctcagactcagattaaacatgtttttttgcaaaaatatattgcaaaaaacttttcatacagcatcacataaggagaaacatgtcaggtgatttctcccttgtctaatacagcttttccccttcgcagttaacaaaaagtcaggaggcagtatttgtagttggaatattctattgttactgttggagggtgtccaggttcttggcttcttaagcaaataacttgataaaacacacaaagcaaggaaagaatgaagcaacaaggccgggtgcagtggctcacacctgtaatcctagcattttgggaggccgaggctggtggatcatgaggtcaggagatcaagaccatcctggctaacacgatgaaaccctgtctctactaaaaatagga

SEQ ID NO: 16122 - DNA, 972 bp, Homo sapiens
agattctaaaacaaatccttgcctataaattaccagtgtccccaaagttaccctgttctgaaagtattgagtgtagcttatgtgtataaggacacctcttttttatgcagtgataaggatgtgtgtatgtgtctgtgtgtatacctatgtgtcagtgtgttttaaggctgacatcctgtaatttgacatgctttccttggcaatatggaatcttactaacctgctggagaatcttcttaagtattcttttttctatttttaaaataccagaaaataaggtcaataacaaacatcagcaaaagtcccccaccaaattacattataccacttggtttatgttttagagcacgattttaaaataaggtgggttcctatttttatttttggaagctgaaatggaagctgtcttatgaagacatatgctcaactctatacttactcaaatcttaggaattctaatcttgttttaaagggaagatgttaatgttatggtgccaccagatgctgttgctactaccactggcaaagtttaagggtaaaatagcataaagtttctgtgtggttctggcttatgtaatggtatgtgccaggcagaaaggcttgcttttctaacactcacaaactcatttatatttgtccttggttgctgccaaggcagtttcttaatggggaatactagcagggtacaggggaattttttttccactttctctcttctatctgccactactatcctgccaaaggtctgccatggaaggcaggtatgtgccccaccaggtattgcaaggcagcccagggaacaggaaggaaaagagagatgtagctcgcatgcttcttagtccttctggaagaggaaggctaaggaaggtcatcttcagcactcattttctcatcttcccagggatgttgattagtttcttctacagtaagtctggcaagacctgcctgtgaatacgaggatattctgagtta

SEQ ID NO: 16123 - DNA, 449 bp, Homo sapiens
ttttctcattcccgttgaactaaacctgacagcatttccctcctgcaagtacttctcctgttttcctagtctcccagtgccagacattcccttactctcctgtcgcatggcagtagaggtggctgagaccccacccacaagcttctggggtggacgaggaaacctggttgcagcaccacagctggtgggcagagagctggtgcatgtgcttggtgagagtgtagaacagcaggaaagatttgatattcacacagatattgggaattgactgtatttgcttgattgactcattagtttggataattgtcaaatggcttcaactaggggtgtggatatagaaaagatgaaagataatttcccatactggtggtcttgtgcaggccacatgaccttttctgtgattaagtctcttggtctcctaaaaaggttttttctatgcatatactttc

SEQ ID NO: 16124 - DNA, 379 bp, Homo sapiens
agtgagaatctactttttgaaacaagttgaaaaaaagcatttgtctacaaaagaacatcagatactgcactttttacaaattgaatgtttgtggcaagcctgcatcgagaaagtccattgatgccatttttttcaaacagaaaagtaaagatgtttctggaaggcaccaggagtcctgtctgcactgagcaccatgaagttcacctgcattgagttctttccctttgtacaacacttactcccagaccaaaaaataactccttctctccaatctgtgttccaggcaaaccaatagactccagttgtctcccgaaatgcttaaagtgcttttccaatatccactatgtttgggcaacatattaaaaatatacaacaaaaa

SEQ ID NO: 16125 - DNA, 469 bp, Homo sapiens
attaggcaaattgatagccctacaatggcctctaagtgttcacgtgaaaagaagaatcacagacctctcatttgaaattcatgttgttttcatgcctgctaacacaacatccattctgcagcgcatggatcaagggttaattttgattttcaatgttattatttaaatatatttcataatgctatggctgccatagatagtgattccattaatggatctgaaattgaaggaaaagtaaagatgtttctggaaggcaccaggagtcctgtctgcactgagcaccatgaagttcacctgcattgagttctttccctttgtacaacacttactcccagaccaaaaaataactccttctctccaatctgtgttccaggcaaaccaatagactccagttgtctcccgaaatgcttaaagtgcttttccaatatccactatgtttgggcaacatattaaaaatatacaacaaaaa

SEQ ID NO: 16126 - DNA, 368 bp, Homo sapiens
tcatccctcccagaccccttcttcctcatttcaggtctgggttcaagtctcaacatcttcttcataactcagcagctgctagagggaatttttctaataccatacaattgtctgattgtgttctctgtggctcttgttgatttggatcattttaaggctatccctctcagtcatgcctgggaataaagtatattagattatggaatcatattagtgatattgaacaaattcagccattcagtacacagtggatgaaataatgactccaaactataaaataatttgcatctgctgatggaactagggaatagaaaaatcaggattcaaattcaggccgtttgtctttcatctggtactcttggactagc

SEQ ID NO: 16127 - DNA, 446 bp, Homo sapiens
atttatgaagtattttccatacttctctcatatgactcatgattaccttatgaggtaggttttattactgccatttacatttgaaaatattgaggctcaagaggctgttaattcttcagagccatagctaggatccagtaactgctgtgcacattgctgtcatgttttatgtatccatctatatgtactaactatgttaatggaataataattctatcaaatataatacattatttttatattcacattatttcttggtttgtctaaatattgtcattcattgattctagtacttatggtgtatttacctgtgaaagaaaatgattagagattaacttaaaatgttcaacacagaatgtgcataaatggttgactgtctaattttgccttgtgaaataaaatccagcttcacaaaataaaggccaaaattaccagccctatgacca

SEQ ID NO: 16128 - DNA, 444 bp, Homo sapiens
ccttggcctcccaaagtgctgggattacaggcatgagccgcggagcctggcctagaaaggaaaatttaagtaagataccagcttcagaataggagctagggtctagagaaatggagcacattgtaactggctgacaacagtggcccaggaaaaccacagtaacttaatttgaaacttaatttgcttcccttgttttaatgactttttaatatttaaagatgttttctaaacctctaatcctcaaaacaaaaattggaagtaaactgattttcattcagtgaactgccatttagaagtgataggggtttacatactttgtaccattagttaacgcctaagctaaaagtataatatccagtttccctatgatctcaagtttatggaaagtagcctttcttttggcagtgtaaacaagcagttacattaaatacgtaaagataatgc

SEQ ID NO: 16129 - DNA, 320 bp, Homo sapiens
tttagctaatccctttcccacatttaacacctgaaatgtggactaattaaaatacccgtcatttttgaaatgggaaagtgtattgtgaatcacctcgataggcaggatccatgattgctgtatgtgcacagtagggattcatcattcccaaagaactgggcttcattagtgggacatggtggggcttctctgatggagcacaaatttagaaagcattgtagaatgcatattcttgctgtgaagtgctggtgacattcctcatttaggtgatcccagacaggacagtggagttttacttgttttaactgactgctgtctaa

SEQ ID NO: 16130 - DNA, 319 bp, Homo sapiens
ggctgtggccccacttctgtggtgcgggagctgcacggcccagcccaagcctataggaaacagcaggggcaactccacctccccgctacactccctgcctcctcctgcacccctggccgccagatgcagcctctccctccctccctcacacaccaagagcgcggcctcagactccccaggagccgggcaactttcgaaactttagttcctggaacctgggagccctgggcctgtgcacgttctcaaggggctacggggggaggcgacaggccctggccagagtcacctccgccccagactccccacggctccgtcttgc

SEQ ID NO: 16131 - DNA, 299 bp, Homo sapiens
gtctacaagaacaaacaactcggtttctgcaacaaataaattgcaaggaaaaaaaaaaaggtgagaacaccctagattaaaataaactttgcagtacagcctgggcaacacggcaagaccctatctctacaaaaaatagaaaaaattagccaggcttctggtgcatgtctgtagtcccaactacttgggaggctgaggttggaggattgtttgagcctggagttcaaggttgcagtgagctgtgattgtgccactgcactccagcctgggcaatagagagagactctgtctcaaaagga

SEQ ID NO: 16132 - DNA, 818 bp, Homo sapiens
  misc_feature (19)..(19): n is a, c, g, or t
atccttaattaaattaatntctccccccccccccgtgtaaagggtcttctgagctgcagtggcaattagaccagaagatccccgctcctgtctctaaagaggggaaagggcaaggatggtggaggctttctgtgctacctggaagctgaccaacagtcagaactttgatgagtacatgaaggctctaggcgtgggctttgccactaggcaggtgggaaatgtgaccaaaccaacggtaattatcagtcaagaaggagacaaagtggtcatcaggactctcagcacattcaagaacacggagattagtttccagctgggagaagagtttgatgaaaccactgcagatgatagaaactgtaagtctgttgttagcctggatggagacaaacttgttcacatacagaaatgggatggcaaagaaacaaattttgtaagagaaattaaggatggcaaaatggttatgacccttacttttggtgatgtggttgctgttcgccactatgagaaggcataaaaatgttcctggtcggggcttggaagagctcttcagtttttctgtttcctcaagtctcagtgctatcctattacaacatggctgatcattaattagaaggttatccttggtgtggaggtggaaaatggtgatttaaaaacttgttactccaagcaacttgcccaattttaatctgaaaatttatcatgttttataatttgaattaaagttttgtccccccccccttttttttataaacaagtgaatacattttataatttcttttggaatgtaaatcaaatttgaataaaaatcttacacgtga

SEQ ID NO: 16133 - DNA, 574 bp, Homo sapiens
aattaactgatcatgatttattcaattatacaactctttcaaaaatcacatcgtcttccgtatcagaaatctgaattgtatttattgctatgttctgcattttgttgttggtctcagtctgttgttagcctggatggagacaaacttgttcacatacagaaatgggatggcaaagaaacaaattttgtaagagaaattaaggatggcaaaatggttatgacccttacttttggtgatgtggttgctgttcgccactatgagaaggcataaaaatgttcctggtcggggcttggaagagctcttcagtttttctgtttcctcaagtctcagtgctatcctattacaacatggctgatcattaattagaaggttatccttggtgtggaggtggaaaatggtgatttaaaaacttgttactccaagcaacttgcccaattttaatctgaaaatttatcatgttttataatttgaattaaagttttgtccccccccccttttttttataaacaagtgaatacattttataatttcttttggaatgtaaatcaaatttgaataaaaatcttacacgtga

SEQ ID NO: 16134 - DNA, 386 bp, Homo sapiens
aaaacataactatctcatataagaaaaaaaaacccttacttttggtgatgtggttgctgttcgccactatgagaaggcataaaaatgttcctggtcggggcttggaagagctcttcagtttttctgtttcctcaagtctcagtgctatcctattacaacatggctgatcattaattagaaggttatccttggtgtggaggtggaaaatggtgatttaaaaacttgttactccaagcaacttgcccaattttaatctgaaaatttatcatgttttataatttgaattaaagttttgtccccccccccttttttttataaacaagtgaatacattttataatttcttttggaatgtaaatcaaatttgaataaaaatcttacacgtga

SEQ ID NO: 16135 - DNA, 1001 bp, Homo sapiens
  misc_feature (19)..(19): n is a, c, g, or t
atccttaattaaattaatntctccccccccccccctttctcaggcataagggctgtagtgtgaggattgggaggaactcgacctactccgctaacccagtggcctgagccaatcacaaagaggattggagcctcactcgagcgctccttcccttctcctctctctgtgacagcctcttggaaagagggacactggaggggtgtgtttgcaatttaaatcactggatttttgcccaccctctttccaaataagaaggcaggagctgcttgctgaggtgtaaagggtcttctgagctgcagtggcaattagaccagaagatccccgctcctgtctctaaagaggggaaagggcaaggatggtggaggctttctgtgctacctggaagctgaccaacagtcagaactttgatgagtacatgaaggctctaggcgtgggctttgccactaggcaggtgggaaatgtgaccaaaccaacggtaattatcagtcaagaaggagacaaagtggtcatcaggactctcagcacattcaagaacacggagattagtttccagctgggagaagagtttgatgaaaccactgcagatgatagaaactgtaagtctgttgttagcctggatggagacaaacttgttcacatacagaaatgggatggcaaagaaacaaattttgtaagagaaattaaggatggcaaaatggttatgacccttacttttggtgatgtggttgctgttcgccactatgagaaggcataaaaatgttcctggtcggggcttggaagagctcttcagtttttctgtttcctcaagtctcagtgctatcctattacaacatggctgatcattaattagaaggttatccttggtgtggaggtggaaaatggtgatttaaaaacttgttactccaagcaacttgcccaattttaatctgataaacaagtgaatacattttataatttcttttggaatgtaaatcaaatttgaataaaaatcttacacgtga

SEQ ID NO: 16136 - DNA, 1058 bp, Homo sapiens
  misc_feature (19)..(19): n is a, c, g, or t
atccttaattaaattaatntctccccccccccccctttctcaggcataagggctgtagtgtgaggattgggaggaactcgacctactccgctaacccagtggcctgagccaatcacaaagaggattggagcctcactcgagcgctccttcccttctcctctctctgtgacagcctcttggaaagagggacactggaggggtgtgtttgcaatttaaatcactggatttttgcccaccctctttccaaataagaaggcaggagctgcttgctgaggtgtaaagggtcttctgagctgcagtggcaattagaccagaagatccccgctcctgtctctaaagaggggaaagggcaaggatggtggaggctttctgtgctacctggaagctgaccaacagtcagaactttgatgagtacatgaaggctctaggcgtgggctttgccactaggcaggtgggaaatgtgaccaaaccaacggtaattatcagtcaagaaggagacaaagtggtcatcaggactctcagcacattcaagaacacggagattagtttccagctgggagaagagtttgatgaaaccactgcagatgatagaaactgtaagtctgttgttagcctggatggagacaaacttgttcacatacagaaatgggatggcaaagaaacaaattttgtaagagaaattaaggatggcaaaatggttatgacccttacttttggtgatgtggttgctgttcgccactatgagaaggcataaaaatgttcctggtcggggcttggaagagctcttcagtttttctgtttcctcaagtctcagtgctatcctattacaacatggctgatcattaattagaaggttatccttggtgtggaggtggaaaatggtgatttaaaaacttgttactccaagcaacttgcccaattttaatctgaaaatttatcatgttttataatttgaattaaagttttgtccccccccccttttttttataaacaagtgaatacattttataatttcttttggaatgtaaatcaaatttgaataaaaatcttacacgtga

SEQ ID NO: 16137 - DNA, 2401 bp, Homo sapiens
  misc_feature (19)..(19): n is a, c, g, or t
  misc_feature (1317)..(1317): n is a, c, g, or t
  misc_feature (2393)..(2393): n is a, c, g, or t
atccttaattaaattaatntctccccccccccccctttctcaggcataagggctgtagtgtgaggattgggaggaactcgacctactccgctaacccagtggcctgagccaatcacaaagaggattggagcctcactcgagcgctccttcccttctcctctctctgtgacagcctcttggaaagagggacactggaggggtgtgtttgcaatttaaatcactggatttttgcccaccctctttccaaataagaaggcaggagctgcttgctgaggtgtaaagggtcttctgagctgcagtggcaattagaccagaagatccccgctcctgtctctaaagaggggaaagggcaaggatggtggaggctttctgtgctacctggaagctgaccaacagtcagaactttgatgagtacatgaaggctctaggcgtgggctttgccactaggcaggtgggaaatgtgaccaaaccaacggtaattatcagtcaagaaggagacaaagtggtcatcaggactctcagcacattcaagaacacggagattagtttccagctgggagaagagtttgatgaaaccactgcagatgatagaaactgtaagtctgttgttagcctggatggagacaaacttgttcacatacagaaatgggatggcaaagaaacaaattttgtaagagaaattaaggatggcaaaatggttatggtaagtaatgacaattctccattcttccttgtttttttctcctctccgcacacctctcacctccttccttcttcttccctcctccttccattcttcctccttccttccttctttaataatacatcactggcaaggttctttaactatatgtaaaacaggggaaacaaaaagatcccagttaattttcttcttcagctcaacttctttgattgtagaaaaagagaaaaattcatgtgtagttaaaaaaataaaagttgccattgatttgcctaaaactgtgtcaaaagattttttgtaggataactatggatgtctctcaaataaaatttaatataaagcccataatcactgaaatatataaagataattgctattataagagaatctcagacagatgactttatagctcctgtaataagagatctttaaacagtttatattttaatttataaagttacacaagttctgggcagataatttagaatataacagaaaagtataacaaaaaaattaaaatcccctctgatttctcatcagtgataacccttttttttttttttttttgagataaagtcttgctgtgtcacccagactggagtgcagggggtgcattnttggctcactgcaacctctgcttcatgggctcaagcgattctacaacctcagcctcctaagtagctgggaccacaggtgcaagccaccaacgccgggctaatttttttgtatttttgtagagatgggatttcgccatgttgcccaggctggcctacagctcttgagctcaaagtgatgctcccgcctgctgcctcggcctcccagagtgctgggattacaggcctgagccaaggctcccagcccccaaagagaaccattttgatgttacttctttccagtttttttctcgaatgcataatatgccttttaaacatatatattcaatactaggtagacatgaaaaatatttttttcaatcagcctcttcttacttactaggaattatctgtaaaagaggatttattagtgtcctaaggctgccacaacaaagtaccacaaacttggtggcttaaaacaacagaaatgaattttctcagttctgaaagctggacgcctgagatcaaggcgaccctagtgttgccatccttctgcgggccccctcccttgcttcttcctacttcccggatggctcctggcaatcattgaggttgttgggcttacagttgttattactctgatccatttctgactccatctttacaagactttttcctctgtttttgtcctaaattgatcaaatataaaataattaacaaataatttatctaatgatggagtagtatcacaaactaggagaaatattatgccttcaccaagccttcctcagacactttttgtgtgacctgcaatggtatattgatgatactgacataggtgggtaggctcattcaattttggaggagggtgtgagaatgctttacatagtccttgtacgatgacagcagagaaagttttgttgtttaagaatggggactcatgtttccttctccccttgactactgcaatcagcactgttctgcattgagatattcatgtttctgtggagatggaggtggggagcagagggacagttttcctttcatgttaaaggatatttgctcacatttttttggcaacaatcaataaaagaaaggantcatttct

SEQ ID NO: 16138 - DNA, 824 bp, Homo sapiens
tgccaaattccaaaattgtgtatagttctatagttgtctggtggagtcaatggaactttagttaccagtctaagaatgtgtctttgagattgtccagttaattctctatttccagtagctgtaataaatggtgaaaaggtttctgactcctggagaaagtttctaactccttatgactaatattcataacagacttgtgagttccttgaacatggatacacctatatgcaagagtgtattccaaagctaactcagtgatctttccatttatctattcttggattagtggtgcctttgctctttccttctgtaaatgtgaatagttaagagttgactgcagaagtgtttacactttggcttccatgcctctggaatgtttgtgctttggtggtgagatgtgagactatatttgtatagtctgcatctctcaggctgccccagaatgttgtacagtgcagtgctgaagaaagcagcaggtacacacagaaatgcagcctttcctggttaaccctgcttggatctgagttacactttgtttcctgacttcttgggacttaggtaatcagtttgccttctactctatctcattttgtactcgcttacatactacattcttgtttgggctttcgtttcttcttgtaagcagagattttttaaaatccaatatgtgaaaatacggatgcactacaattaaataaataaaatgctgttgtgtttgttttgctttaaaattgtaaaggataaacaataagatagttttatctatgtggttttcccgatgcagttaaaataaaacctaatctgctaaaattgaatttacactc

SEQ ID NO: 16139 - DNA, 310 bp, Homo sapiens
atgaggatacatctctgtgatttaaggatagtaccatgtataaaatagacactgaatttaaatgaaaaaatacagaagataataagaatgcagtttatgttagcatgtgtgccaaaattcttgtcctgccttggctacagccacattcaagccctagctttcacatgaaagagacaaacagacatataaaaataaataataaaaataaattttgagaaaataataagagaaataatcatgaacagaaataataaaggaagtaatcattaaagcaaaagtgctatcagaattgagtagaaaaaaatagact

SEQ ID NO: 16140 - DNA, 359 bp, Homo sapiens
gtggcactatcatctggctcccagtccatgaaaccaaagtccagaagcagtttttcctaacctgggacctgccaaaaaacacacctatatgtgcccctgtaggcatgctggctgactttattcccactgtgaatcttgaagcagtcctaaaacccagctccagtcccaaaacctacctccagtccctgtcaactaaagtctgggagcagtcctgcccacccaggaatctggagggagaaatgccgtgaacccagaaacaaacctgaagactttggtctcagctgtgtatcctgaagcagccctatgaatcagttccacacccccattcccccactccagataaagcttcagttatatct

SEQ ID NO: 16141 - DNA, 532 bp, Homo sapiens
atttaacaaatgaagctaaaggagctgaagatgcaccagatgctgatacagccattatcaatgctgaaggcagccaagtcaatgctgaagagaaaaaagagtatttcatttaagatgcaggccaagattctgagttttactaccaggctgaatgctggagaaaactggctatcatctttcagaagtcatttctaccatcgtctgctacccttattaactcccatactgtactgctatcagtagccagtgtataccaacaatcagctgttgaaagcatcattctttaattactgtaccatccataatgcaggacatttcttactgcctaaatttcacaccattgctcttttaacatacagtgcttgaatatacagccttaacaatgttaatcatctccttggatcattatattgagtggtttttatacattaaaaaatgtatgcagagtttttttcccccattttttcccctttaagtcatagaccttatcagtttgccattggacagctttcacaagtaacaggattaggga

SEQ ID NO: 16142 - DNA, 235 bp, Homo sapiens
aaaatttatgtcaaatcaggacacttcttacaaatcccttcaatagtgtcttgctcagagccaaaatctgttatcacagttttcaagtcccgcagtcggctgcatcccctccccaactcactgggtttcaaacactctggctttcttgctgttatctgaatgctgccaaagatactcttaccttagggccttcatacttactactacttttaccaagaatgctttcttttataga

SEQ ID NO: 16143 - DNA, 157 bp, Homo sapiens
ggaaattcttagccattacttttttgactagtgtttttttttctattctttaaaaaaatttattttgaaattatttaaacttatggaaaagtttaaagcatatatatatagaatggagtattatatatataatatatatattatatatatatataaa

SEQ ID NO: 16144 - DNA, 123 bp, Homo sapiens
gtgagcttgggtaagtggctcagcctctctgagcttcagcttcttcatctgcacaagggaacaatagtaccggcccccaggtctcttcacagcagcattaaataaaaatggtacactcacccc

SEQ ID NO: 16145 - DNA, 173 bp, Homo sapiens
cattctcaaatgtaggaaatgaggacagcttcctctctccaatttacaacactatcaactatttgtcctttattgtacatttcaaacacagtgttttaattgttaatcatgtttttacacagcagtgaatggcaggtttttaaagatttgttttctgtctgtaaacattttct

SEQ ID NO: 16146 - DNA, 504 bp, Homo sapiens
gcggccgcagtgctcgggcgcgacaagccatgagcagcgaccccgcgggcgacgccgccgtccctggcagccgctgagcccgacccccaggcagctcgccgctccctagcaccttctccagtcgacactctcgcgcccggagaaacatgattcccgtgacagaattccggcagttctctgagcagcagcctgccttccgagtgctgaagccatggtgggatgtgtttaccgattacctctcagtagccatgctcatgatcggcgtgtttggatgtactttacaggcagtttctctgaagctaagtggttttattttgttttaacctcagccctttggtgtctcattcatgcaaatgtggtaccttttcaactagttatcacaggctgctgttacaaagatatggcaaaaacactgtttaaccttttgaagaagaagaagaagatgacgaagaagaagacaaagaagaagaagctgcctgccttattttttttcttatttttctc

SEQ ID NO: 16147 - DNA, 2737 bp, Homo sapiens
gcggccgcagtgctcgggcgcgacaagccatgagcagcgaccccgcgggcgacgccgccgtccctggcagccgctgagcccgacccccaggcagctcgccgctccctagcaccttctccagtcgacactctcgcgcccggagaaacatgattcccgtgacagaattccggcagttctctgagcagcagcctgccttccgagtgctgaagccatggtgggatgtgtttaccgattacctctcagtagccatgctcatgatcggcgtgtttggatgtactttacaggtcatgcaagacaagataatctgccttccgaaaagagtgcagcctgctcagaaccactcttccctttcgaatgtctctcaagcagttgccagtaccactccactgcctccacctaaaccatctcctgctaaccccatcactgtggaaatgaaaggcctgaagacagatttggaccttcagcagtacagctttataaatcagatgtgttatgagcgagccctccactggtatgccaagtatttcccttaccttgtcctcatccataccctggtctttatgctctgcagtaacttttggttcaaattccctggttccagctccaaaatagaacatttcatctccattctggggaagtgttttgactctccttggaccacacgggctttatctgaagtgtctggggaggactcagaagaaaaggacaacaggaagaacaacatgaacaggtccaacaccatccaatctggtccagaaggcagcctggtcaactctcagtctttaaagtccattcctgagaagtttgtagttgataaatccactgcaggggctctggataaaaaggaaggtgagcaggctaaggccttatttgagaaggtgaagaagttcaggctgcatgtggaagaaggtgatattctatatgccatgtatgttcgccagactgtacttaaagttatcaaattcctaatcatcattgcatataatagtgctctggtttccaaggtccagtttacagtggactgtaatgtggacattcaggacatgactggatataaaaacttttcttgcaatcataccatggcacacttgttctcaaaactgtccttttgctatctgtgctttgttagtatctatggattgacgtgcctttataccttatactggctgttctaccgttctctacgggaatattcctttgagtatgtccgtcaggagactggaattgatgatattccagatgtgaaaaatgactttgcttttatgcttcatatgatagatcagtatgaccctctctattccaagagatttgcagtgttcctgtctgaagtcagtgaaaacaaattaaagcagctgaacttaaataacgaatggactcctgataaactgaggcagaagctacagacaaatgcccataatcgactggaattgcctcttatcatgctctctggccttccagacactgtttttgaaatcacagagttgcaatctctaaaacttgaaatcattaagaacgtaatgataccagccaccattgcacagctagacaatcttcaagagctctctctgcaccagtgttctgtcaaaatccacagtgcggcgctctctttcctgaaggaaaacctcaaggtcttgagcgtcaagtttgatgacatgagggaactccccccctggatgtatgggctccgaaatctggaagagctgtacctagttggctctctaagtcatgatatttccagaaatgtcacccttgagtctctgcgggatctcaaaagccttaaaattctctctatcaaaagcaacgtttccaaaatccctcaggcagtggttgatgtttccagccatctccagaagatgtgcatacataatgatggcaccaagctggtgatgctcaacaacttaaagaagatgaccaatctgacagagctggagctggtccactgtgacctggagcgtattcctcatgctgtgttcagcctactcagcctccaggaattggacctgaaggaaaacaatctgaaatctatagaagaaatcgttagctttcagcacttaagaaagttgacagtgctaaaactgtggcataacagcatcacctacatcccagagcatataaagaaactcaccagcctggaacgcctgtcctttagtcacaataaaatagaggtgctgccttcccacctcttcctatgcaacaagatccgatacttggacttatcgtacaatgacattcgatttatcccccctgaaattggagttctacaaagtttacagtatttttccatcacatgtaacaaagtggaaagccttccagatgaactctacttctgcaagaaacttaaaactctgaagattggaaaaaacagcctatctgtactttcaccgaaaattggaaatttgctatttctttcctacttagatgtaaaaggtaatcactttgaaatcctccctcctgaactgggtgactgtcgggctctgaagcgagctggtttagttgtagaagatgctctgtttgaaactctgccttctgacgtccgggagcaaatgaaaacagaataacttatttttcgttaaagtttgactgaaacacgcttctaccaaatacagtataaataattaggtagtcttaatgcctttcctatttttttttccttttcacacaaaatgtacacaaagatcgcgtaaggagtatgtatttttaataaaaatttaattgtattttttcaatattaaaattt

SEQ ID NO: 16148 - DNA, 456 bp, Homo sapiens
gtctctttctcaatagttccaacaagatctgtaggccaaagttcactgaaccattttgaaacaggtaaccatccctagaccagtcacttagccaaaggaatgtagcatgctttagccaggccaaggaacatgcgcacccttggagctcagatatatatgttgaggggaagaggaagtagtatcagctcccgcttgaattccatggattgagagttgggggatgaggagtttgccaaaacaacagtgctaggattaaaagaagtagaagcagatgctggggaagcaaaatcttccagaagacctaagatacatggggcctgggtcagcctggcaacatgaggtctccaggccaatgtagcaggccctggaggtgggaggagagacacgtaatttctaagcagctcttcaggttacagttcttgctttgtctgcctgtcattaagtggattaccacaa

SEQ ID NO: 16149 - DNA, 319 bp, Homo sapiens
acacggctgtgcagaagtgcgatcttaggacacttagcttgagcagtttccagggatgggcacttagccccatcactggacactggcacaagataggcttagattatgtggttcccttcttcactgtacctcagttgctgtaactagattgtccacactacacctttttttttcttttgagaccaagtttcgctcttattgcccaaactggagtgccatgatgcgatcttgactcactgcaacctctgcctcccgggttcaagtgattctcctgcctcagcgtcctaagtaactgggattacaagggcacgccaccatg

SEQ ID NO: 16150 - DNA, 476 bp, Homo sapiens
gtacttttttattctggtaacaatatgcagtttctgaggattctgtggatctccgtcatatttttcatgatctgcaagtgaaggctgaaacgctttatatggaattcttgacctggtaaatttgtgatgaatccaatctatgtaaacgagagacttcacaccttttgtcccagtctgtagttcattttgcctcttgagctactgacagcaaagtccctgccataagtgtggtggctgttctctttagagagagcgcctgctaaatattcagcatgaaccttcccaccagcagaagctgaggactcactgcttccattattacttacagatcacctttttgtatctgaaaaattttaccttaagtaattctctcttcctttcttccttttatttccctgaatggagtagggattagagaatggctagaaggggcagaggcttggagcttaataccttatggtgttttagcccattag

SEQ ID NO: 16151 - DNA, 459 bp, Homo sapiens
aactgcctaagcccagccagcccttctttgaaaagccctgtggaactaggtcatcaggttgttggatggttcttacacagactgtgctgtgctgcaacttttaatgtgcactgtctatggaataccaaacttgtttccaaactaaatagtttccaatgaggatttaatgggagtttttcatttgaaatggattgaaaacaagccatttcctactcccatttcaagcaaattttggtccaattattttcctttttttaacataaagttaaatggactattctgcccatccctgactgagctgaaccgtgatttctcttgattatgcttttacactgcgaatcgcgaggctccagagacataatgggcgtctgtgggagagtggcagcaatttttaaaatcctgccagtgcttgtcagcttccactctggtgtctgctgtgcgggaagaaagcaccctacc

SEQ ID NO: 16152 - DNA, 519 bp, Homo sapiens
gatagatctggtggcttttccccaatagtcaccatgtggaaactatgcaactaaattcaatggaaatgaaagatacaatataaaatagcgggtcatggccataagctgtgtcctgaactaaccaactccaagctgaaggagggtgtgtactttccgaaacttcgaggccatcttagtaattattttagcaataattactaaaatgtacatggggtgggggagctcagctaaaatatccttactttggtgcaataatgatctaggttctttttcctaggcctaggcctccaccttgaaagacaggaacagaagttcactgtgatgtgtgaccctggacagagatcaaacagctcctttctagacccagatgacccagaacgcagaagcctagtagttggtatcaccagtgtctcttcaaaagggccccacaaaaggctgtccattaatttgtttcatacagtaagcgagcttttactgaatactccctctgttaggtagcatgcagagtgctagggctgg

SEQ ID NO: 16153 - DNA, 249 bp, Homo sapiens
tccacttaaggctcctgtattttcaagaaacagtgctcgggtttccactgttagggcggcggtttgaatttcttagtaatttcttgaatatcagtcagtgtcaaggtatttttaaagaaacacggatctatcagaacctttttggagatttatttaaaatatttccatttgtctagaaaaggggaacaactttagactccttgcccatgttcacttgttgaattaaaccttgtggggttttacaggcaa

SEQ ID NO: 16154 - DNA, 977 bp, Homo sapiens
atcttcacacatcctgtttcacctatgtggaatagtttctctctttactcttccctttactaaatcctattctctttttgaaggtgccagcttaaatatctgttcctcagaaaagtctcttttgatttttcaagcaatattaggtcttattttcatatactttatgctttttctttatagcttttatcagaattatggttaaatagttaacttacgtagttgtctctcctagactgtaatttccatgaaagcagggtcttgtttattgctgcattcctgaacctagtacagtatctggcctataagaggtacatagtcaatgtttgttcatttacacatttaaccgataggcaatgttttgagtgttagggatttaacagtgaaccaacaaaaaaatgaatgaacacatagagttaggttttatggctcagtaaagtggtagttaaggccaatatcttcttattgaaagagataatgctgtataatacattattaccatatttactttaaaattcattagtacatttcttaatcagagaaaagaaatataatagcttcatatctaactcatactatcaagcttacaaaaaacttctgaaattttaaagtgtttataacacataatgctaaatttagtagattgctgagatctttatccgattttgccttatcattacatgttagcagcttaatgtatatcattactaaggaacaaaaattatatttatttatttaaaacatttattttttgcagggaatgagttaaatttgatttctgtataaagtaggaacaatacttagattgtgtccagctttgaaattttcttataagatgtaactaacatgtttaagtgaccctacataaacaagtactgtagttgttgtctactggcctaaacaggatttataagacttctgtaggaaagaagacgagcgtagaaaatcggttagatgatagttctactcctggagggaga

SEQ ID NO: 16155 - DNA, 482 bp, Homo sapiens
ttaggaaacctacaatgattctagattcctttgcaggctcctacaatcacaccctatcaaagctagaatgactttaggagattgtggccaacattctacttttccacagagaaggaatgtttgcccaagtggcagggcctgaaaatagaagccagagagtttgacccagagctgaggactatttcaatcatatccctctgtatgcttcactaaagatggggcagaagctacttttgactgctttttttctaatgcatgaccttttatttgagtatgctaaaaattaatctgccagtttttgcttactcacatggcataatgggtgctttcaataatttctcactaccaccttgacatgagcaagttacttaatctctctaacctttgtttctctctctgtaaagtgggaatgataatacgaacctacccttaaaaagtgtgttgtaagaaataaatgagatgacttgtttatcatgatcata

SEQ ID NO: 16156 - DNA, 744 bp, Homo sapiens
cgcccctatgggcaaggaccaatggtctctctctgggcggggctgctgttggacggcctgggccaatccgaggcgccggaggccaatcagttggcggagcggcgcgtgcgcgggcgaggaactgcccgggcgcggtagcgtacgggaagaccggagaggagctgcgtctctgccccgtgggagccggcggggcggcggggcggcggctgcagctgcagctccggcgcgagggctcccttgccgggccctcttccccgacccctggggcgctccgacaaggaagagccgtccagcgcgcgtccgtcctgagcgtgggcctagaaccaattacagagtcaaacccaagagccgaagaaagtgaagactcgcagcttgccgcagccccctcctcggcctgcgcacctcccattgagggcgtcctgatttaaacgcgtgcctcctgcatttctgcttctgccccaggctagagcggcgaccaggaacgctggacccacagagatctgtggcaatgtctgtcgaaccatggtgttctttggggcatctgactagagtattgtttgataaccagaaagaaatcaaaaattggtgatcacaaggctaatgtcacttttgctgcagtggaaaatcatgatcattctgtttaaatctgagtcagttttgagacctagagcccattaattgacaaggaggcttggttcctctcaggaaggatcttacaataccagcatctgagcatataccaag

SEQ ID NO: 16157 - DNA, 1533 bp, Homo sapiens
cgcccctatgggcaaggaccaatggtctctctctgggcggggctgctgttggacggcctgggccaatccgaggcgccggaggccaatcagttggcggagcggcgcgtgcgcgggcgaggaactgcccgggcgcggtagcgtacgggaagaccggagaggagctgcgtctctgccccgtgggagccggcggggcggcggggcggcggctgcagctgcagctccggcgcgagggctcccttgccgggccctcttccccgacccctggggcgctccgacaaggaagagccgtccagcgcgcgtccgtcctgagcgtggggtcccaggccagcatcactatccaggagcttcaggcatgctccgtgtaccaacatgggatcacgaatcacatcgcctcaggccaagaaagccattttatagcgaaagagccttaggatctgctggattagagcctgtttcccaggtaggaacgcttccacgagggcactcctgctggttgcaggaaggatacctctgctgagcctgaatctgcaaagaccaccaggttactctcagctcctcatactggtggaccagcaggccacaaaggaggggatacttgatcctgataaacggttatgcttgtttgctgatggaaatgatccagaagagaaggacaagttgacgattgagagggttaatgtcaggtaagaaacttgagtggacattgaggaaagagcgaggttcagtggactggaggtttgtggtggtttcatgacacgtggactggagatttgcagtggttttatgacacatggactggaggtttgtggtggtttcatgacacatggactgcagatttgcagtggttttatgacacagctcctaagttctttgacactcttcccatggaggggtagggtctgtgacccccctcttgaagctgggtaggcttgcaactgctttggccaatagtcacagcagcagtgatgctgtaggacttacaaggttagaccagaaaagggcatgccctccaaggatccttactctgatgggaaccagccatcatgtagaaactctacccttggctgggtgcggtggctcacgcctgtagtcctagcattttgggaggccgaggttgggcggatcacctgaggtcaggagttcccagaccagcctggcccaacatggcgaagacccgcctccttactaaaaataccaaaaaaaaatgagctgggcgtgcttggcaggcacctataatcccagctactcgggaggctgaggtaggagaatcacttgaacccaggaggtggaggttgcagtgagccaagatcacaccactgcactccaacctgggtgacagagcgagactcttgtctccaaaaaaaaaaagaaaagaaaagaaactaccctgagaccacgatgcaggagagcccagtggatatgctggtgacagccgcagcagagcccccagctcacactcagcatccactgccaaccttctgaatgaaccatctcagacctcgagccaggcttacctccaactgcaaccaaacc

SEQ ID NO: 16158 - DNA, 833 bp, Homo sapiens
cgcccctatgggcaaggaccaatggtctctctctgggcggggctgctgttggacggcctgggccaatccgaggcgccggaggccaatcagttggcggagcggcgcgtgcgcgggcgaggaactgcccgggcgcggtagcgtacgggaagaccggagaggagctgcgtctctgccccgtgggagccggcggggcggcggggcggcggctgcagctgcagctccggcgcgagggctcccttgccgggccctcttccccgacccctggggcgctccgacaaggaagagccgtccagcgcgcgtccgtcctgagcgtgggcctagaaccaattacagagtcaaacccaagagccgaagaaagtgaagactcgcagcttgccgcagccccctcctcggcctgcgcacctcccattgagggcgtcctgatttaaacgcgtgcctcctgcatttctgcttctgccccaggctagagcggcgaccaggaacgctggacccacagagatctgtggcaatgtctgtcgaaccatggtgttctttggggcatctgactagagtattgtttgataaccagaaagccctttaacgacaatgttcatgctaagaacaaccaatcaggcccttaaggccaaaatgctctttcttggggccccacactaggataaacatccatttcagaattccttactttgaattaagaccctgagccggcttgaccatatcgtcttcaaatgttctggcaaataccgccaagatttctaaacctcggcaaggaaaacctggctttcacccttaatgactggttcaaaaaaccctcgcgtaacatgcggaaaatatca

SEQ ID NO: 16159 - DNA, 596 bp, Homo sapiens
aaccatttgcattctaacagtctttggcaccagggaaaactgtcaactgtgtcacgtgtaaatagaaatctgctccccgcttttggtgcgttttttcataatttcccttgccactctaattatcaaagatatttttattttaaacaaaaattgtctcccacgcaggcctcatctttctgcggtgaagtggaaacgatgaattagaatattctaatcacttctccaacaaccactatggaggttataaacacaagattatcctagcaaagaaaagtaaattgtttgggcacagaacaggccaggaaaaaattcagtaggccgggcccggtgctcacacatgtaatcctacactttgggaggctgaggagggttgatcacctgaggtcaggagttcaagaccagcctggccaacatggtgaaaccccgtctctactaaaaatacaaaaattagccgggcatggtgatggatgcctgtaatcccagctactcaggaggctgaggcaggaggatcgcttgaacccagaaggtgaaggttgcagtgagctgagatcgcgccattgcactccagcctgggcaacagagtgagactctgtctc

SEQ ID NO: 16160 - DNA, 310 bp, Homo sapiens
gtaatgatgcaacacaggatcatcgtgtgatcagatggaaattggcatctgattttaccccagatctgaagctgttactgcattgtgtcattttatcaacaaagacttctgccacaatatttacttttaaaagaatttgtccctttcaatagcatcttccctatcaagagttcaaggcactttgcagaagagcttcagatttctaactctagttcccacagtcacccgttgaggctggtgtcatacaatctatgaacaacaaccttgcagcaggactgccaccattcagcagtgcagacagcacagctca

SEQ ID NO: 16161 - DNA, 568 bp, Homo sapiens
ctggtagcaataaaaaggcaaatgatgagcaggctttcaacaaacagccctttattggtgccaatgctaccctggactaactccaccctaaatcgttgtggcatacaactatagaaactcaaaaaggtttgaataataacaggaactccaaagtaacaaaacagctagtgtaccccaatgtcctctggcattactatcctgtgaggacaaattaggtcactttaatgcctgcttacactgaactcatctgatcaggaggacctcaacccccaacaagtgtttctgggatgctataaacagggtggttcttcaatgctactctccaagcaagttcaactcagttcttcctgtgctacttgagtgtcccattatccatgtcctctacttgaggcagcctcaccacagccctttctgatagtatacatcaaactgctaacgtatatgcttaaggtgctacctttcactgatcccaaggctgccagttttccagatgtttaagtggccttggattctctgcaaaggttgaaaaaatgcttagctctcttgggccctttcccttaaaaaaaaa

SEQ ID NO: 16162 - DNA, 153 bp, Homo sapiens
ccattcacattgtttcagtgaactcataatgctctggaaggtgaaaaattaggacagctgacatcaactataagtttctgatcttcttaaacttatctattattttttcctcatcttgtataacgtcccttctctatttaaaaaggctttaat

SEQ ID NO: 16163 - DNA, 473 bp, Homo sapiens
gggctgtgagcacgcgtgtccgagtctgcatgcggaacgtgggctgtgagcacgcgtgtctgagtctgcgtgcggacgtgggctgtgagcacgcgtgtccgagtctgcgtgcggacgtgggctgtgatgtctattgctgcacacctgggggtggaaccactgtgtcccgtggcgactgtgtgttgaacgtcggaggaaccgccagcctgttttccgtggcggctgtggccacttgacctttgcacaagttgtgtgtttggattcgcatctccacctccctacccttgttactgtctctttgatcacagccatcccggtgggtctgattttctttgtacaatgcgagccccccctcaatgaatttttgcttaaaaaaaagcaatttgttgtttttaattgaaatgaaaggaagcattctttcctatgcatgtgttttttttaaagcaaacaaaattaaaatcataagtaagtaa

SEQ ID NO: 16164 - DNA, 329 bp, Homo sapiens
tggtcgaatgaatgaattcagtctgtatcctcaacacccaatgccgcgcctggcaccataggcgttcacatgcagccgtgccgaaagactgagtgaatgctggactgaatgaatgactgcctgtaaaatatctacaggaaagccctgcaggaaatgccctccataaattctagtccccttctccttcctaaccaaatcctcccctccttctgcttccatcacttcctagctgtgtaacttaggcaaagtggtttacctctctgtgtctaatttcggcaaaggtaaaatggggaagtgaacctcatctggttctggtgagcttccacggg

SEQ ID NO: 16165 - DNA, 702 bp, Homo sapiens
cctgggaaacagtgagacactgtctcaaaaaaaaaatttttttaataatcaaaaaaagaaagaaaaatacttgtcaacacagaattttatgtgaggaaaaatatttttcaaaaatgaaggcaatcgaaagatcaatatcattaatataaataatgttctccgtatcaaagtaaacatattgttagatatttttattcaaaactcaataaacatagccaaagtgatatttgtccttgaaatgaggtttaaaaactgagagattcaaacattttccttaacattcaaataaaaatttatcattttctaaacaccattctaaaaaaatcctccctgttaattcagatactgcttgtccatctatagcttggaatgctctggaggagcattttgttgctttaattaaagcaacaaaaagaaaattaaataagcctaggaaaaaatgctgaattaaaaaaagaaaaggttctttctgaatagtgaaattagggtttgtctcttcatagcttttatttgtttttgaaacagagtcttgctctgtcacccaggctagagtgcagtggtgctcaccagagcctggatttcttgggctcaactgatcctcccacctcagcctcccaagtattatagctaggaccacaggcatatgccaccacaccaagcatattttttatttttttgtagagatggggtgtcactatgttg

SEQ ID NO: 16166 - DNA, 252 bp, Homo sapiens
tacccttcttaactgttatattcttatttattaaactgatcatttcacctagaacctaactcactaaaggaagaaagcattgaaaatctagtaaagctttagatttgtaaaagttgttaaaaatgaaaattcagggtcaggcgcgatggctcatgcctgtaatccctgcactttgggaggccgaggtgagtggatcatgaggtcaggagatcgagaccatcctggctaacacggtgaaaccccgtctctact

SEQ ID NO: 16167 - DNA, 2220 bp, Homo sapiens
cgcacctcgctcgcgccagcccttcccgctcttctgttctcgctctatttgccccgctgactgctggcctcgccagctttgccagtcttacgtctctgccgcccccactcccgcccgcgccccatcttcttgcgcgactcgcgcccgctggtccccccctcctcctcccgcgtcctgcctgccccctcctcctgctctcgcaggctccttggcacccaggccgggaggcgacgcgcccagccgtctaaacgggaacagccctggctgagggagctgcagcgcagcagagtatctgacggcgccaggttgcgtaggtgcggcacgaggagttttcccggcagcgaggaggtcctgagcagcatggcccggaggagcgccttccctgccgccgcgctctggctctggagcatcctcctgtgcctgctggcactgcgggcggaggccgggccgccgcaggaggagagcctgtacctatggatcgatgctcaccaggcaagagtactcataggatttgaagaagatatcctgattgtttcagaggggaaaatggcaccttttacacatgatttcagaaaagcgcaacagagaatgccagctattcctgtcaatatccattccatgaattttacctggcaagctgcagggcaggcagaatacttctatgaattcctgtccttgcgctccctggataaaggcatcatggcagatccaaccgtcaatgtccctctgctgggaacagtgcctcacaaggcatcagttgttcaagttggtttcccatgtcttggaaaacaggatggggtggcagcatttgaagtggatgtgattgttatgaattctgaaggcaacaccattctccaaacacctcaaaatgctatcttctttaaaacatgtcaacaagctgagtgcccaggcgggtgccgaaatggaggcttttgtaatgaaagacgcatctgcgagtgtcctgatgggttccacggacctcactgtgagaaagccctttgtaccccacgatgtatgaatggtggactttgtgtgactcctggtttctgcatctgcccacctggattctatggagtgaactgtgacaaagcaaactgctcaaccacctgctttaatggagggacctgtttctaccctggaaaatgtatttgccctccaggactagagggagagcagtgtgaaatcagcaaatgcccacaaccctgtcgaaatggaggtaaatgcattggtaaaagcaaatgtaagtgttccaaaggttaccagggagacctctgttcaaagcctgtctgcgagcctggctgtggtgcacatggaacctgccatgaacccaacaaatgccaatgtcaagaaggttggcatggaagacactgcaataaaaggtacgaagccagcctcatacatgccctgaggccagcaggcgcccagctcaggcagcacacgccttcacttaaaaaggccgaggagcggcgggatccacctgaatccaattacatctggtgaactccgacatctgaaacgttttaagttacaccaagttcatagcctttgttaacctttcatgtgttgaatgttcaaataatgttcattacacttaagaatactggcctgaattttattagcttcattataaatcactgagctgatatttactcttccttttaagttttctaagtacgtctgtagcatgatggtatagattttcttgtttcagtgctttgggacagattttatattatgtcaattgatcaggttaaaattttcagtgtgtagttggcagatattttcaaaattacaatgcatttatggtgtctgggggcaggggaacatcagaaaggttaaattgggcaaaaatgcgtaagtcacaagaatttggatggtgcagttaatgttgaagttacagcatttcagattttattgtcagatatttagatgtttgttacatttttaaaaattgctcttaatttttaaactctcaatacaatatattttgaccttaccattattccagagattcagtattaaaaaaaaaaaaattacactgtggtagtggcatttaaacaatataatatattctaaacacaatgaaatagggaatataatgtatgaactttttgcattggcttgaagcaatataatatattgtaaacaaaacacagctcttacctaataaacattttatactgtttgtatgtataaaataaaggtgctgctttagttttc

SEQ ID NO: 16168 - DNA, 403 bp, Homo sapiens
attttattttattttttatttatttttgagacagagtctcgctctgttgcccaggctggagtgcattaatgttgaagttacagcatttcagattttattgtcagatatttagatgtttgttacatttttaaaaattgctcttaatttttaaactctcaatacaatatattttgaccttaccattattccagagattcagtattaaaaaaaaaaaaattacactgtggtagtggcatttaaacaatataatatattctaaacacaatgaaatagggaatataatgtatgaactttttgcattggcttgaagcaatataatatattgtaaacaaaacacagctcttacctaataaacattttatactgtttgtatgtataaaataaaggtgctgctttagttttc

SEQ ID NO: 16169 - DNA, 2288 bp, Homo sapiens
cgcacctcgctcgcgccagcccttcccgctcttctgttctcgctctatttgccccgctgactgctggcctcgccagctttgccagtcttacgtctctgccgcccccactcccgcccgcgccccatcttcttgcgcgactcgcgcccgctggtccccccctcctcctcccgcgtcctgcctgccccctcctcctgctctcgcaggctccttggcacccaggccgggaggcgacgcgcccagccgtctaaacgggaacagccctggctgagggagctgcagcgcagcagagtatctgacggcgccaggttgcgtaggtgcggcacgaggagttttcccggcagcgaggaggtcctgagcagcatggcccggaggagcgccttccctgccgccgcgctctggctctggagcatcctcctgtgcctgctggcactgcgggcggaggccgggccgccgcaggaggagagcctgtacctatggatcgatgctcaccaggcaagagtactcataggatttgaagaagatatcctgattgtttcagaggggaaaatggcaccttttacacatgatttcagaaaagcgcaacagagaatgccagctattcctgtcaatatccattccatgaattttacctggcaagctgcagggcaggcagaatacttctatgaattcctgtccttgcgctccctggataaaggcatcatggcagatccaaccgtcaatgtccctctgctgggaacagtgcctcacaaggcatcagttgttcaagttggtttcccatgtcttggaaaacaggatggggtggcagcatttgaagtggatgtgattgttatgaattctgaaggcaacaccattctccaaacacctcaaaatgctatcttctttaaaacatgtcaacaagctgagtgcccaggcgggtgccgaaatggaggcttttgtaatgaaagacgcatctgcgagtgtcctgatgggttccacggacctcactgtgagaaagccctttgtaccccacgatgtatgaatggtggactttgtgtgactcctggtttctgcatctgcccacctggattctatggagtgaactgtgacaaagcaaactgctcaaccacctgctttaatggagggacctgtttctaccctggaaaatgtatttgccctccaggactagagggagagcagtgtgaaatcagcaaatgcccacaaccctgtcgaaatggaggtaaatgcattggtaaaagcaaatgtaagtgttccaaaggttaccagggagacctctgttcaaagcctgtctgcgagcctggctgtggtgcacatggaacctgccatgaacccaacaaatgccaatgtcaagaaggttggcatggaagacactgcaataaaaggtacgaagccagcctcatacatgccctgaggccagcaggcgcccagctcaggcagcacacgccttcacttaaaaaggccgaggagcggcgggatccacctgaatccaattacatctggtgaactccgacatctgaaacgttttaagttacaccaagttcatagcctttgttaacctttcatgtgttgaatgttcaaataatgttcattacacttaagaatactggcctgaattttattagcttcattataaatcactgagctgatatttactcttccttttaagttttctaagtacgtctgtagcatgatggtatagattttcttgtttcagtgctttgggacagattttatattatgtcaattgatcaggttaaaattttcagtgtgtagttggcagatattttcaaaattacaatgcatttatggtgtctgggggcaggggaacatcagaaaggttaaattgggcaaaaatgcgtaagtcacaagaatttggatggtgcagttaatgttgaagttacagcatttcagattttattgtcagatatttagatgtttgttacatttttaaaaattgctcttaatttttaaactctcaatacaatatattttgaccttaccattattccagagattcagtattaaaaaaaaaaaaattacactgtggtagtggcatttaaacaatataatatattctaaacacaatgaaatagggaatataatgtatgaactttttgcattggcttgaagcaatataatatattgtaaacaaaacacagctcttacctaataaacattttatactgtttgtatgtataaaataaaggtgctgctttagttttctgagcattgtgtggaggtgatctttgcacatgctatcttatgaaaataaaattggttgcaatttagtg

SEQ ID NO: 16170 - DNA, 2037 bp, Homo sapiens
cgcacctcgctcgcgccagcccttcccgctcttctgttctcgctctatttgccccgctgactgctggcctcgccagctttgccagtcttacgtctctgccgcccccactcccgcccgcgccccatcttcttgcgcgactcgcgcccgctggtccccccctcctcctcccgcgtcctgcctgccccctcctcctgctctcgcaggctccttggcacccaggccgggaggcgacgcgcccagccgtctaaacgggaacagccctggctgagggagctgcagcgcagcagagtatctgacggcgccaggttgcgtaggtgcggcacgaggagttttcccggcagcgaggaggtcctgagcagcatggcccggaggagcgccttccctgccgccgcgctctggctctggagcatcctcctgtgcctgctggcactgcgggcggaggccgggccgccgcaggaggagagcctgtacctatggatcgatgctcaccaggcaagagtactcataggatttgaagaagatatcctgattgtttcagaggggaaaatggcaccttttacacatgatttcagaaaagcgcaacagagaatgccagctattcctgtcaatatccattccatgaattttacctggcaagctgcagggcaggcagaatacttctatgaattcctgtccttgcgctccctggataaaggcatcatggcagatccaaccgtcaatgtccctctgctgggaacagtgcctcacaaggcatcagttgttcaagttggtttcccatgtcttggaaaacaggatggggtggcagcatttgaagtggatgtgattgttatgaattctgaaggcaacaccattctccaaacacctcaaaatgctatcttctttaaaacatgtcaacaagctgagtgcccaggcgggtgccgaaatggaggcttttgtaatgaaagacgcatctgcgagtgtcctgatgggttccacggacctcactgtgagaaagccctttgtaccccacgatgtatgaatggtggactttgtgtgactcctggtttctgcatctgcccacctggattctatggagtgaactgtgacaaagcaaactgctcaaccacctgctttaatggagggacctgtttctaccctggaaaatgtatttgccctccaggactagagggagagcagtgtgaaatcagcaaatgcccacaaccctgtcgaaatggaggtaaatgcattggtaaaagcaaatgtaagtgttccaaaggttaccagggagacctctgttcaaagcctgtctgcgagcctggctgtggtgcacatggaacctgccatgaacccaacaaatgccaatgtcaagaaggttggcatggaagacactgcaataaaaggtacgaagccagcctcatacatgccctgaggccagcaggcgcccagctcaggcagcacacgccttcacttaaaaaggccgaggagcggcgggatccacctgaatccaattacatctggtgaactccgacatctgaaacgttttaagttacaccaagttcatagcctttgttaacctttcatgtgttgaatgttcaaataatgttcattacacttaagaatactggcctgaattttattagcttcattataaatcactgagctgatatttactcttccttttaagttttctaagtacgtctgtagcatgatggtatagattttcttgtttcagtgctttgggacagattttatattatgtcaattgatcaggttaaaattttcagtgtgtagttggcagatattttcaaaattacaatgcatttatggtgtctgggggcaggggaacatcagaaaggttaaattgggcaaaaatgcgtaagtcacaagaatttggatggtgcagttaatgttgaagttacagcatttcagattttattgtcagatatttagatgtttgttacatttttaaaaattgctcttaatttttaaactctcaatacaatatattttgaccttaccattattccagagattcaggtggtgtggggtgaccgagct

SEQ ID NO: 16171 - DNA, 1912 bp, Homo sapiens
cgcacctcgctcgcgccagcccttcccgctcttctgttctcgctctatttgccccgctgactgctggcctcgccagctttgccagtcttacgtctctgccgcccccactcccgcccgcgccccatcttcttgcgcgactcgcgcccgctggtccccccctcctcctcccgcgtcctgcctgccccctcctcctgctctcgcaggctccttggcacccaggccgggaggcgacgcgcccagccgtctaaacgggaacagccctggctgagggagctgcagcgcagcagagtatctgacggcgccaggttgcgtaggtgcggcacgaggagttttcccggcagcgaggaggtcctgagcagcatggcccggaggagcgccttccctgccgccgcgctctggctctggagcatcctcctgtgcctgctggcactgcgggcggaggccgggccgccgcaggaggagagcctgtacctatggatcgatgctcaccaggcaagagtactcataggatttgaagaagatatcctgattgtttcagaggggaaaatggcaccttttacacatgatttcagaaaagcgcaacagagaatgccagctattcctgtcaatatccattccatgaattttacctggcaagctgcagggcaggcagaatacttctatgaattcctgtccttgcgctccctggataaaggcatcatggcagatccaaccgtcaatgtccctctgctgggaacagtgcctcacaaggcatcagttgttcaagttggtttcccatgtcttggaaaacaggatggggtggcagcatttgaagtggatgtgattgttatgaattctgaaggcaacaccattctccaaacacctcaaaatgctatcttctttaaaacatgtcaacaagctgagtgcccaggcgggtgccgaaatggaggcttttgtaatgaaagacgcatctgcgagtgtcctgatgggttccacggacctcactgtgagaaagccctttgtaccccacgatgtatgaatggtggactttgtgtgactcctggtttctgcatctgcccacctggattctatggagtgaactgtgacaaagcaaactgctcaaccacctgctttaatggagggacctgtttctaccctggaaaatgtatttgccctccaggactagagggagagcagtgtgaaatcagcaaatgcccacaaccctgtcgaaatggaggtaaatgcattggtaaaagcaaatgtaagtgttccaaaggttaccagggagacctctgttcaaagcctgtctgcgagcctggctgtggtgcacatggaacctgccatgaacccaacaaatgccaatgtcaagaaggttggcatggaagacactgcaataaaaggtacgaagccagcctcatacatgccctgaggccagcaggcgcccagctcaggcagcacacgccttcacttaaaaaggccgaggagcggcgggatccacctgaatccaattacatctggtgaactccgacatctgaaacgttttaagttacaccaagttcatagcctttgttaacctttcatgtgttgaatgttcaaataatgttcattacacttaagaatactggcctgaattttattagcttcattataaatcactgagctgatatttactcttccttttaagttttctaagtacgtctgtagcatgatggtatagattttcttgtttcagtgctttgggacagattttatattatgtcaattgatcaggttaaaattttcagtgtgtagttggcagatattttcaaaattacaatgcatttatggtgtctgggggcaggggaacatcagaaaggttaaattgggcaaagggtagtccagaatgggggcgtaaggtgagtacgattcaatttagcgttgtttgtcctttcgg

SEQ ID NO: 16172 - DNA, 1129 bp, Homo sapiens
  misc_feature (19)..(19): n is a, c, g, or t
gaaggggggaagacaattntgaatcaagcaaatgcccacaaccctgtcgaaatggaggtaaatgcattggtaaaagcaaatgtaagtgttccaaaggttaccagggagacctctgttcaaagcctgtctgcgagcctggctgtggtgcacatggaacctgccatgaacccaacaaatgccaatgtcaagaaggttggcatggaagacactgcaataaaaggtacgaagccagcctcatacatgccctgaggccagcaggcgcccagctcaggcagcacacgccttcacttaaaaaggccgaggagcggcgggatccacctgaatccaattacatctggtgaactccgacatctgaaacgttttaagttacaccaagttcatagcctttgttaacctttcatgtgttgaatgttcaaataatgttcattacacttaagaatactggcctgaattttattagcttcattataaatcactgagctgatatttactcttccttttaagttttctaagtacgtctgtagcatgatggtatagattttcttgtttcagtgctttgggacagattttatattatgtcaattgatcaggttaaaattttcagtgtgtagttggcagatattttcaaaattacaatgcatttatggtgtctgggggcaggggaacatcagaaaggttaaattgggcaaaaatgcgtaagtcacaagaatttggatggtgcagttaatgttgaagttacagcatttcagattttattgtcagatatttagatgtttgttacatttttaaaaattgctcttaatttttaaactctcaatacaatatattttgaccttaccattattccagagattcagtattaaaaaaaaaaaaattacactgtggtagtggcatttaaacaatataatatattctaaacacaatgaaatagggaatataatgtatgaactttttgcattggcttgaagcaatataatatattgtaaacaaaacacagctcttacctaataaacattttatactgtttgtatgtataaaataaaggtgctgctttagttttctgagcattgtgtggaggtgatctttgcacatgctatcttatgaaaataaaattggttgcaatttagtg

SEQ ID NO: 16173 - DNA, 1187 bp, Homo sapiens
  misc_feature (3)..(3): n is a, c, g, or t
  misc_feature (15)..(15): n is a, c, g, or t
atntcggaacgaggngtgaactgtgacaaagcaaactgctcaaccacctgctttaatggagggacctgtttctaccctggaaaatgtatttgccctccaggactagagggagagcagtgtgaaatcagcaaatgcccacaaccctgtcgaaatggaggtaaatgcattggtaaaagcaaatctgtctgcgagcctggctgtggtgcacatggaacctgccatgaacccaacaaatgccaatgtcaagaaggttggcatggaagacactgcaataaaaggtacgaagccagcctcatacatgccctgaggccagcaggcgcccagctcaggcagcacacgccttcacttaaaaaggccgaggagcggcgggatccacctgaatccaattacatctggtgaactccgacatctgaaacgttttaagttacaccaagttcatagcctttgttaacctttcatgtgttgaatgttcaaataatgttcattacacttaagaatactggcctgaattttattagcttcattataaatcactgagctgatatttactcttccttttaagttttctaagtacgtctgtagcatgatggtatagattttcttgtttcagtgctttgggacagattttatattatgtcaattgatcaggttaaaattttcagtgtgtagttggcagatattttcaaaattacaatgcatttatggtgtctgggggcaggggaacatcagaaaggttaaattgggcaaaaatgcgtaagtcacaagaatttggatggtgcagttaatgttgaagttacagcatttcagattttattgtcagatatttagatgtttgttacatttttaaaaattgctcttaatttttaaactctcaatacaatatattttgaccttaccattattccagagattcagtattaaaaaaaaaaaaattacactgtggtagtggcatttaaacaatataatatattctaaacacaatgaaatagggaatataatgtatgaactttttgcattggcttgaagcaatataatatattgtaaacaaaacacagctcttacctaataaacattttatactgtttgtatgtataaaataaaggtgctgctttagttttctgagcattgtgtggaggtgatctttgcacatgctatcttatgaaaataaaattggttgcaatttagtg

SEQ ID NO: 16174 - DNA, 957 bp, Homo sapiens
cctatctcaacattcctccttattttcttcccactctcatcctcttaggtacgaagccagcctcatacatgccctgaggccagcaggcgcccagctcaggcagcacacgccttcacttaaaaaggccgaggagcggcgggatccacctgaatccaattacatctggtgaactccgacatctgaaacgttttaagttacaccaagttcatagcctttgttaacctttcatgtgttgaatgttcaaataatgttcattacacttaagaatactggcctgaattttattagcttcattataaatcactgagctgatatttactcttccttttaagttttctaagtacgtctgtagcatgatggtatagattttcttgtttcagtgctttgggacagattttatattatgtcaattgatcaggttaaaattttcagtgtgtagttggcagatattttcaaaattacaatgcatttatggtgtctgggggcaggggaacatcagaaaggttaaattgggcaaaaatgcgtaagtcacaagaatttggatggtgcagttaatgttgaagttacagcatttcagattttattgtcagatatttagatgtttgttacatttttaaaaattgctcttaatttttaaactctcaatacaatatattttgaccttaccattattccagagattcagtattaaaaaaaaaaaaattacactgtggtagtggcatttaaacaatataatatattctaaacacaatgaaatagggaatataatgtatgaactttttgcattggcttgaagcaatataatatattgtaaacaaaacacagctcttacctaataaacattttatactgtttgtatgtataaaataaaggtgctgctttagttttctgagcattgtgtggaggtgatctttgcacatgctatcttatgaaaataaaattggttgcaatttagtg

SEQ ID NO: 16175 - DNA, 1378 bp, Homo sapiens
  misc_feature (1304)..(1304): n is a, c, g, or t
  misc_feature (1308)..(1308): n is a, c, g, or t
  misc_feature (1311)..(1311): n is a, c, g, or t
  misc_feature (1361)..(1361): n is a, c, g, or t
  misc_feature (1363)..(1363): n is a, c, g, or t
cgcacctcgctcgcgccagcccttcccgctcttctgttctcgctctatttgccccgctgactgctggcctcgccagctttgccagtcttacgtctctgccgcccccactcccgcccgcgccccatcttcttgcgcgactcgcgcccgctggtccccccctcctcctcccgcgtcctgcctgccccctcctcctgctctcgcaggctccttggcacccaggccgggaggcgacgcgcccagccgtctaaacgggaacagccctggctgagggagctgcagcgcagcagagtatctgacggcgccaggttgcgtaggtgcggcacgaggagttttcccggcagcgaggaggtcctgagcagcatggcccggaggagcgccttccctgccgccgcgctctggctctggagcatcctcctgtgcctgctggcactgcgggcggaggccgggccgccgcaggaggagagcctgtacctatggatcgatgctcaccaggcaagagtactcataggatttgaagaagatatcctgattgtttcagaggggaaaatggcaccttttacacatgatttcagaaaagcgcaacagagaatgccagctattcctgtcaatatccattccatgaattttacctggcaagctgcagggcaggcagaatacttctatgaattcctgtccttgcgctccctggataaaggcatcatggcagatccaaccgtcaatgtccctctgctgggaacagtgcctcacaaggcatcagttgttcaagttggtttcccatgtcttggaaaacaggatggggtggcagcatttgaagtggatgtgattgttatgaattctgaaggcaacaccattctccaaacacctcaaaatgctatcttctttaaaacatgtcaacaagctgagtgcccaggcgggtgccgaaatggaggcttttgtaatgaaagacgcatctgcgagtgtcctgatgggttccacggacctcactgtgagaaagccctttgtaccccacgatgtatgaatggtggactttgtgtgactcctggtttctgcatctgcccacctggattctatggagtgaactgtgacaaagcaaactgctcaaccacctgctttaatggagggacctgtttctaccctggaaaatgtatttgccctccaggactagagggagagcagtgtgaaatcagcaaatgcccacaaccctgtcgaaatggaggtaaatgcattggtaaaagcaaatgtaagtgttccaaaggttaccagggagacctctgttcaaagctgtttggagcctgggttggggngaanatngaacctgcatgaaccccacaattgcaattttaagagggtggaatggaggnanttgaataagggtcga

SEQ ID NO: 16176 - DNA, 913 bp, Homo sapiens
ctaggtgagatactcgctaccttttaagagccttcttgacatgtttttttctcaggcagcacacgccttcacttaaaaaggccgaggagcggcgggatccacctgaatccaattacatctggtgaactccgacatctgaaacgttttaagttacaccaagttcatagcctttgttaacctttcatgtgttgaatgttcaaataatgttcattacacttaagaatactggcctgaattttattagcttcattataaatcactgagctgatatttactcttccttttaagttttctaagtacgtctgtagcatgatggtatagattttcttgtttcagtgctttgggacagattttatattatgtcaattgatcaggttaaaattttcagtgtgtagttggcagatattttcaaaattacaatgcatttatggtgtctgggggcaggggaacatcagaaaggttaaattgggcaaaaatgcgtaagtcacaagaatttggatggtgcagttaatgttgaagttacagcatttcagattttattgtcagatatttagatgtttgttacatttttaaaaattgctcttaatttttaaactctcaatacaatatattttgaccttaccattattccagagattcagtattaaaaaaaaaaaaattacactgtggtagtggcatttaaacaatataatatattctaaacacaatgaaatagggaatataatgtatgaactttttgcattggcttgaagcaatataatatattgtaaacaaaacacagctcttacctaataaacattttatactgtttgtatgtataaaataaaggtgctgctttagttttctgagcattgtgtggaggtgatctttgcacatgctatcttatgaaaataaaattggttgcaatttagtg

SEQ ID NO: 16177 - DNA, 840 bp, Homo sapiens
  misc_feature (2)..(2): n is a, c, g, or t
gncctgatgtcctgctgtcatatcaaccaacaccttttctgggatctggtgaactccgacatctgaaacgttttaagttacaccaagttcatagcctttgttaacctttcatgtgttgaatgttcaaataatgttcattacacttaagaatactggcctgaattttattagcttcattataaatcactgagctgatatttactcttccttttaagttttctaagtacgtctgtagcatgatggtatagattttcttgtttcagtgctttgggacagattttatattatgtcaattgatcaggttaaaattttcagtgtgtagttggcagatattttcaaaattacaatgcatttatggtgtctgggggcaggggaacatcagaaaggttaaattgggcaaaaatgcgtaagtcacaagaatttggatggtgcagttaatgttgaagttacagcatttcagattttattgtcagatatttagatgtttgttacatttttaaaaattgctcttaatttttaaactctcaatacaatatattttgaccttaccattattccagagattcagtattaaaaaaaaaaaaattacactgtggtagtggcatttaaacaatataatatattctaaacacaatgaaatagggaatataatgtatgaactttttgcattggcttgaagcaatataatatattgtaaacaaaacacagctcttacctaataaacattttatactgtttgtatgtataaaataaaggtgctgctttagttttctgagcattgtgtggaggtgatctttgcacatgctatcttatgaaaataaaattggttgcaatttagtg

SEQ ID NO: 16178 - DNA, 804 bp, Homo sapiens
ggccggtaccggcgttgcgtggcacttacgtgaaacgttagttacaccaagttcatagcctttgttaacctttcatgtgttgaatgttcaaataatgttcattacacttaagaatactggcctgaattttattagcttcattataaatcactgagctgatatttactcttccttttaagttttctaagtacgtctgtagcatgatggtatagattttcttgtttcagtgctttgggacagattttatattatgtcaattgatcaggttaaaattttcagtgtgtagttggcagatattttcaaaattacaatgcatttatggtgtctgggggcaggggaacatcagaaaggttaaattgggcaaaaatgcgtaagtcacaagaatttggatggtgcagttaatgttgaagttacagcatttcagattttattgtcagatatttagatgtttgttacatttttaaaaattgctcttaatttttaaactctcaatacaatatattttgaccttaccattattccagagattcagtattaaaaaaaaaaaaattacactgtggtagtggcatttaaacaatataatatattctaaacacaatgaaatagggaatataatgtatgaactttttgcattggcttgaagcaatataatatattgtaaacaaaacacagctcttacctaataaacattttatactgtttgtatgtataaaataaaggtgctgctttagttttctgagcattgtgtggaggtgatctttgcacatgctatcttatgaaaataaaattggttgcaatttagtg

SEQ ID NO: 16179 - DNA, 471 bp, Homo sapiens
attttattttattttttatttatttttgagacagagtctcgctctgttgcccaggctggagtgcattaatgttgaagttacagcatttcagattttattgtcagatatttagatgtttgttacatttttaaaaattgctcttaatttttaaactctcaatacaatatattttgaccttaccattattccagagattcagtattaaaaaaaaaaaaattacactgtggtagtggcatttaaacaatataatatattctaaacacaatgaaatagggaatataatgtatgaactttttgcattggcttgaagcaatataatatattgtaaacaaaacacagctcttacctaataaacattttatactgtttgtatgtataaaataaaggtgctgctttagttttctgagcattgtgtggaggtgatctttgcacatgctatcttatgaaaataaaattggttgcaatttagtg

SEQ ID NO: 16180 - DNA, 454 bp, Homo sapiens
actaacagatgaaggaggagaatccctaaaaacagagcattgggtagctagtccaccagcggtctgatgctttcattgatctcaaaactgtctctgagtaactctaccaggaaagttgtctggagggttaacatttctgaaaccatttttatctttgccttcattcttgaatgataattagtctcgaatgtttggatcacaatccattgaaagactaggctattttttcactgtcctcagacatttactgagtccagtttggactttattttattttattttttttgaaacaagatctcgctctgttgctcaggctgaagtgcaatagcgcaaactcggctcactgcaacctcccaggttcaagcaattctcgtgcctcagccatccctataggcatgcgccaccacactttgctaatcttgtatttttggtagagacggggtttgcaccatgt

SEQ ID NO: 16181 - DNA, 843 bp, Homo sapiens
ttcttttagcttcagcctttaaaatactagtcattatttattatttcttcaaaagcccatctctaattgtctccttagggagtttttgagttcacattgacattaattgtcactaactgtcagcagttggcattaaccagactctattttaggattaaatccacctgatccacctgcactatcagaacattcaggacgcgactcaggctgcagctcagagggctccaccggtggccctagacttgcatcaagctgctgccattgccactgcaccagcttgtatgccaggttaccacatagtcctatgtaaccatgtgggctgctgtagagtaattcccctacttttgtcccccacttcctcaggtagaggctcgtagacattacattggatgagcaggcagctcagcttggtcagagccagccgtctgctccacccactttgtcctatcacagacccagtcgcagacataaattctcaagctcatgtgcttgtctccttcccacccccagcccgtcatcaatgcctagtttggcctaatgcatcagctgcaccaaggcaaaatcatttttgccaaccagcccagctgcagtttggtttctggtcaagtccaatttatggacagcggagaggagtggacagcttctctcagcataagtttgtctccagctttcatcccttcccacgggggaagatttcgaagccaaaaggttaacatgagatcaacttcccatgagtattcacggataaagtgctaggttttagcattatcaagaaagtaatgaaattaaagtaataatacgtattttcagtgtgtaataggttgaagatgcaagttgcaatct

SEQ ID NO: 16182 - DNA, 885 bp, Homo sapiens
agaaaaaagtatcaagttaaattttgattaattctactgttagcgggcattagttgatttacactgtgtgtagaattggttgtgtggtgaaatacaatactgtttgtcttatctattattcaggatttatttttctagaattctgatttcctccccttcttcatgttatcagtagaggatgacatttttaatttgcatgtagcaggttaatttttaaaaaccaccttgtcttttagtgttatcttacctgattttttttctggcatacctttctttttatttgcaacattttcaactttcttttagtgctgttcttttcaagcaatatgtagcttttaatttttgatgcaatatgaaaatttctgtctcttaatgagaaaattcaatccattgatgtttactttgatgactgaaaaacttgtttttatttattccaacttaccatttattgttttagaaaattgctgctgttgcttttttttcttattgtatttctttccatctttgtacatgatcatttgaaagttgtgctttttgaattcatcatggtttctattctttccttagtctttcaataaccctactgtttaaatatggtaccagctattttgcaaattaagatgcactgtatctctacactgatgctcctttctccctacttctcttgccctcctaaatccaattgatacaactttaagagacacgacacgttatttccttttttttgttgttgttgctgttgttgttgagactctgtcacccaggctggagtgcagtggcacaatctcggctcactgcaacttctgcttcccaggtttcaagcaattctcctgcctcagcctcccgagtagctgggagacagagtgagactctgtctcaaaaaaa

SEQ ID NO: 16183 - DNA, 647 bp, Homo sapiens
aggctgtacgcctcggattacgggattggctcactatgcatttgactgggactcccccatggagagaagtcctcccaggtcctctgcaaggggcatctgttccttggctatggacatgccctaaagtgccaggtggacggaagagctcctgggaccagcaggttgggagcatcaattcacgttggctagaaatgtgacttctttagtatttaccattttaacaaaatccatgataagggatttggaaggtcccatggaaaggatgaaatgacacctctctgctacccagtttctttaagacctctacggttgagaagagaggacaaaggaacacccccacctctgccatcctccgagggatttttcacagcaattccagtgctgctcagtggaaagctctgcaagtcaactgcaaacccccagccccagatgttaggcatttacaaactttgttgctgatttatcagcgctcctctgcaattttggggacaggagcaaacacaagcttaagtcaccacgcaggctgcaacccttacccaaagatgggggaaaaactccaaaggagatgcaggagggagcctcagcagtcactgtgagagcacaaagaggccaagacccaggtaggcaaaggaaggtgagaggcacca

SEQ ID NO: 16184 - DNA, 516 bp, Homo sapiens
cttatttacaaacactttaattcttcacaggttgggagcatcaattcacgttggctagaaatgtgacttctttagtatttaccattttaacaaaatccatgataagggatttggaaggtcccatggaaaggatgaaatgacacctctctgctacccagtttctttaagacctctacggttgagaagagaggacaaaggaacacccccacctctgccatcctccgagggatttttcacagcaattccagtgctgctcagtggaaagctctgcaagtcaactgcaaacccccagccccagatgttaggcatttacaaactttgttgctgatttatcagcgctcctctgcaattttggggacaggagcaaacacaagcttaagtcaccacgcaggctgcaacccttacccaaagatgggggaaaaactccaaaggagatgcaggagggagcctcagcagtcactgtgagagcacaaagaggccaagacccaggtaggcaaaggaaggtgagaggcacca

SEQ ID NO: 16185 - DNA, 365 bp, Homo sapiens
ccagaggaggagctggagggagaagtgtgctccgaggagtgctaagtcaccaaagaatggaaagtcatagtgtgtggaaggaggtgggggaggagggaactttctggaatccgaaaaagtgtacacctgcacaaaaaccaaagtgaacaaacatcatgaagaaatgagagggctgtgtgatggctggcacaggaggtcaacttaccacgctgaggaggtcagacagatgcgaggctgtggtgttgagtggctttggatgtcaccttggaaggaataaaactttgagatagatggaaagactaatctctgcaccactcacagtatttaaaacagtgccttgcacttaataaatattgcataagttg

SEQ ID NO: 16186 - DNA, 669 bp, Homo sapiens
gtttcatggaagcaatgtatatgacagaaggaacaccagaggggagtgttgtggagagtgttgtggtgacttggtaagttgcttacacattgggggtcttggctgtctcatctctaagtgaaggggttagatatgaatgattaataagatccctttcaggtctatgcttctagcactcccttttgtcgggtgaggagccctttttgtattgtgtatactcacccagcactttatctgcctctttgttgttagctgatgatctttgtgtgtctgattttttttttttaagagtaaggatgtcatgcactcttattcaaagtgtagagtttattctcccattcataggaatgcaaaatgagaagttttaaatacacggattcacttcctaacccagtttctcagaagattaatgaatagtcatcctgttgacccatctgcttctcttcttcacatcgttttgtgcggatgaggcacacacagacacagagttctcacttgcagcagtccggcacatacagcctcacacgcgccacaccagggggtgtccccaggagaggtagaacaggtgccagatgttgcagcagtacactcctccctgatcctccttctcatcccccaccccttttctgaatctcctgcacagtcactgaagtcccatttttatatgca

SEQ ID NO: 16187 - DNA, 2208 bp, Homo sapiens
caggacctgtctttgtccctcctcttaacatacttgcagctaaaactaaatattgctgcttggggacctccttctagccttaaatttcagctcatcaccttcacctgccttggtcatggctctgctattctccttgatccttgccatttgcaccagacctggattcctagcgtctccatctggagtgcggctggtggggggcctccaccgctgtgaagggcgggtggaggtggaacagaaaggccagtggggcaccgtgtgtgatgacggctgggacattaaggacgtggctgtgttgtgccgggagctgggctgtggagctgccagcggaacccctagtggtattttgtatgagccaccagcagaaaaagagcaaaaggtcctcatccaatcagtcagttgcacaggaacagaagatacattggctcagtgtgagcaagaagaagtttatgattgttcacatgatgaagatgctggggcatcgtgtgagaacccagagagctctttctccccagtcccagagggtgtcaggctggctgacggccctgggcattgcaagggacgcgtggaagtgaagcaccagaaccagtggtataccgtgtgccagacaggctggagcctccgggccgcaaaggtggtgtgccggcagctgggatgtgggagggctgtactgactcaaaaacgctgcaacaagcatgcctatggccgaaaacccatctggctgagccagatgtcatgctcaggacgagaagcaacccttcaggattgcccttctgggccttgggggaagaacacctgcaaccatgatgaagacacgtgggtcgaatgtgaagatccctttgacttgagactagtaggaggagacaacctctgctctgggcgactggaggtgctgcacaagggcgtatggggctctgtctgtgatgacaactggggagaaaaggaggaccaggtggtatgcaagcaactgggctgtgggaagtccctctctccctccttcagagaccggaaatgctatggccctggggttggccgcatctggctggataatgttcgttgctcaggggaggagcagtccctggagcagtgccagcacagattttgggggtttcacgactgcacccaccaggaagatgtggctgtcatctgctcaggatagtatcctggtgttgcttgacctggcccccctggccccgcctgccctctgcttgttctcctgagccctgattatcctcatactcattctggggctcaggcttgagccactactccctcatcccctcaggagtctgaacactgggcttatgccttactctcagggacaagcagcccccattgctgcctgtagatgtgagctgttgagttccctcttgctggggaagatgagcttccatgtatcctgtgctcaaccctgaccctttgacactggttctggcctttcctgccttttctcaagctgcctggaatcctcaaacctgtcactttggtcagatgtgcagaccattactaaggtctatgtctgcaaacattactaatctaggtcctattactaatctatgtctgcaaacattaaaggaatgaaacaatgaaaggaacatttgaaagaaaatgtgggtagacaatttcttgcaacttgggggaaagtttagaattcttttgattggactactttttttttttttcctcaagcttcaggtgaccacaatagcaacacctccctattctgttatttcttagtgtaggtagacaattctttcaggagcagagcagcgtcctataatcctagaccttttcatgacgtgtaaaaaatgatgtttcatcctctgattgccccaataaaaatctttgttgtccatccctatacaacctgccaacatggttgacatttaatgagaggaatgtcaaaaatacattttactttattcaaagaaaaatatattggttactgggaaaaggtcaagaaagaggcagaaagagatcagggagggctaaagttgtgtcttatgccaagcggaagtggaaaatatcacttttcactttatcaactgagactttggggcctgtaagcttgaggcaagacagaaataagagaatcaagacttgattgtaaaaattgacaactttagattctgaggctaggctgagtacttattatacggctacatttacacatttacacttatctaataaatcagatttcacagtctc

SEQ ID NO: 16188 - DNA, 1942 bp, Homo sapiens
caggacctgtctttgtccctcctcttaacatacttgcagctaaaactaaatattgctgcttggggacctccttctagccttaaatttcagctcatcaccttcacctgccttggtcatggctctgctattctccttgatccttgccatttgcaccagacctggattcctagcgtctccatctggagtgcggctggtggggggcctccaccgctgtgaagggcgggtggaggtggaacagaaaggccagtggggcaccgtgtgtgatgacggctgggacattaaggacgtggctgtgttgtgccgggagctgggctgtggagctgccagcggaacccctagtggtattttgtatgagccaccagcagaaaaagagcaaaaggtcctcatccaatcagtcagttgcacaggaacagaagatacattggctcagtgtgagcaagaagaagtttatgattgttcacatgatgaagatgctggggcatcgtgtgagaacccagagagctctttctccccagtcccagagggtgtcaggctggctgacggccctgggcattgcaagggacgcgtggaagtgaagcaccagaaccagtggtataccgtgtgccagacaggctggagcctccgggccgcaaaggtggtgtgccggcagctgggatgtgggagggctgtactgactcaaaaacgctgcaacaagcatgcctatggccgaaaacccatctggctgagccagatgtcatgctcaggacgagaagcaacccttcaggattgcccttctgggccttgggggaagaacacctgcaaccatgatgaagacacgtgggtcgaatgtgaagatccctttgacttgagactagtaggaggagacaacctctgctctgggcgactggaggtgctgcacaagggcgtatggggctctgtctgtgatgacaactggggagaaaaggaggaccaggtggtatgcaagcaactgggctgtgggaagtccctctctccctccttcagagaccggaaatgctatggccctggggttggccgcatctggctggataatgttcgttgctcaggggaggagcagtccctggagcagtgccagcacagattttgggggtttcacgactgcacccaccaggaagatgtggctgtcatctgctcaggatagtatcctggtgttgcttgacctggcccccctggccccgcctgccctctgcttgttctcctgagccctgattatcctcatactcattctggggctcaggcttgagccactactccctcatcccctcaggagtctgaacactgggcttatgccttactctcagggacaagcagcccccattgctgcctgtagatgtgagctgttgagttccctcttgctggggaagatgagcttccatgtatcctgtgctcaaccctgaccctttgacactggttctggcctttcctgccttttctcaagctgcctggaatcctcaaacctgtcactttggtcagatgtgcagaccattactaaggtctatgtctgcaaacattactaatctaggtcctattactaatctatgtctgcaaacattaaaggaatgaaacaatgaaaggaacatttgaaagaaacaaaaaaaaaaaaaaaaaaaaaaaaaaaaaaaaaaaaaaaaaaaaaaaaaaaaaaaaaaaaaaaaacagacaaaaaggaggggcgcgccgcccgctaaagagatccctccccaggggggagcgcatcattcttgcgcagccccagcggttttttgacagcgaggggcggcccacctagtaggggcgcgcgcatattataccgagcagcgcagggcggccggttattaaaccacacgcctcggcacggggacaacagcgtgatcacgaggagcgactttgcgggggggagcgaccccacatccgcgggcgggcaccaaattggcaaccaaccatg

SEQ ID NO: 16189 - DNA, 2105 bp, Homo sapiens
tcctgccatggttctgaggcctccccagccatgtggaactccatttgcaccagacctggattcctagcgtctccatctggagtgcggctggtggggggcctccaccgctgtgaagggcgggtggaggtggaacagaaaggccagtggggcaccgtgtgtgatgacggctgggacattaaggacgtggctgtgttgtgccgggagctgggctgtggagctgccagcggaacccctagtggtattttgtatgagccaccagcagaaaaagagcaaaaggtcctcatccaatcagtcagttgcacaggaacagaagatacattggctcagtgtgagcaagaagaagtttatgattgttcacatgatgaagatgctggggcatcgtgtgagaacccagagagctctttctccccagtcccagagggtgtcaggctggctgacggccctgggcattgcaagggacgcgtggaagtgaagcaccagaaccagtggtataccgtgtgccagacaggctggagcctccgggccgcaaaggtggtgtgccggcagctgggatgtgggagggctgtactgactcaaaaacgctgcaacaagcatgcctatggccgaaaacccatctggctgagccagatgtcatgctcaggacgagaagcaacccttcaggattgcccttctgggccttgggggaagaacacctgcaaccatgatgaagacacgtgggtcgaatgtgaagatccctttgacttgagactagtaggaggagacaacctctgctctgggcgactggaggtgctgcacaagggcgtatggggctctgtctgtgatgacaactggggagaaaaggaggaccaggtggtatgcaagcaactgggctgtgggaagtccctctctccctccttcagagaccggaaatgctatggccctggggttggccgcatctggctggataatgttcgttgctcaggggaggagcagtccctggagcagtgccagcacagattttgggggtttcacgactgcacccaccaggaagatgtggctgtcatctgctcaggatagtatcctggtgttgcttgacctggcccccctggccccgcctgccctctgcttgttctcctgagccctgattatcctcatactcattctggggctcaggcttgagccactactccctcatcccctcaggagtctgaacactgggcttatgccttactctcagggacaagcagcccccattgctgcctgtagatgtgagctgttgagttccctcttgctggggaagatgagcttccatgtatcctgtgctcaaccctgaccctttgacactggttctggcctttcctgccttttctcaagctgcctggaatcctcaaacctgtcactttggtcagatgtgcagaccattactaaggtctatgtctgcaaacattactaatctaggtcctattactaatctatgtctgcaaacattaaaggaatgaaacaatgaaaggaacatttgaaagaaaatgtgggtagacaatttcttgcaacttgggggaaagtttagaattcttttgattggactactttttttttttttcctcaagcttcaggtgaccacaatagcaacacctccctattctgttatttcttagtgtaggtagacaattctttcaggagcagagcagcgtcctataatcctagaccttttcatgacgtgtaaaaaatgatgtttcatcctctgattgccccaataaaaatctttgttgtccatccctatacaacctgccaacatggttgacatttaatgagaggaatgtcaaaaatacattttactttattcaaagaaaaatatattggttactgggaaaaggtcaagaaagaggcagaaagagatcagggagggctaaagttgtgtcttatgccaagcggaagtggaaaatatcacttttcactttatcaactgagactttggggcctgtaagcttgaggcaagacagaaataagagaatcaagacttgattgtaaaaattgacaactttagattctgaggctaggctgagtacttattatacggctacatttacacatttacacttatctaataaatcagatttcacagtctc

SEQ ID NO: 16190 - DNA, 1475 bp, Homo sapiens
agcagttagtgcccagagaagaataaatacagctgcaggaggctagggtttgagccaggctgctgctactttgaagctgtgtaatgttagtcacttaactcctcagaacctaagtgtttccatgggtagaaatagaaagacacttgtccggtttacctcaaagactttgtgattgtgtgaggataagatatgttgatagatgtcagtactgtttgtgactcacatggagctagttgagtaagtccctgggatactgcacaaggttctggcctggctcacatcagtgtgggatctgtacatggcttagctctttttcctatgttgagccccagtcttctcccttagctaatgtgagtttcaactgaataattccttcctggactatacccatccttactgcattttcctcttctctttataggatagtatcctggtgttgcttgacctggcccccctggccccgcctgccctctgcttgttctcctgagccctgattatcctcatactcattctggggctcaggcttgagccactactccctcatcccctcaggagtctgaacactgggcttatgccttactctcagggacaagcagcccccattgctgcctgtagatgtgagctgttgagttccctcttgctggggaagatgagcttccatgtatcctgtgctcaaccctgaccctttgacactggttctggcctttcctgccttttctcaagctgcctggaatcctcaaacctgtcactttggtcagatgtgcagaccattactaaggtctatgtctgcaaacattactaatctaggtcctattactaatctatgtctgcaaacattaaaggaatgaaacaatgaaaggaacatttgaaagaaaatgtgggtagacaatttcttgcaacttgggggaaagtttagaattcttttgattggactactttttttttttttcctcaagcttcaggtgaccacaatagcaacacctccctattctgttatttcttagtgtaggtagacaattctttcaggagcagagcagcgtcctataatcctagaccttttcatgacgtgtaaaaaatgatgtttcatcctctgattgccccaataaaaatctttgttgtccatccctatacaacctgccaacatggttgacatttaatgagaggaatgtcaaaaatacattttactttattcaaagaaaaatatattggttactgggaaaaggtcaagaaagaggcagaaagagatcagggagggctaaagttgtgtcttatgccaagcggaagtggaaaatatcacttttcactttatcaactgagactttggggcctgtaagcttgaggcaagacagaaataagagaatcaagacttgattgtaaaaattgacaactttagattctgaggctaggctgagtacttattatacggctacatttacacatttacacttatctaataaatcagatttcacagtctc

SEQ ID NO: 16191 - DNA, 391 bp, Homo sapiens
ccggcagctgggatgtgggagggctgtactgactcaaaaacgctgcaacaagcatgcctatggccgaaaacccatctggctgagccagatgtcatgctcaggacgagaagcaacccttcaggattgcccttctgggccttgggggaagaacacctgcaaccatgatgaagacacgtgggtcgaatgtgaaggtaatgcctgtgcgtccaaagactaggtttattcatggatttaattatgtggaatctcattcaaacagtatttacaaagagctactaacgcaccaaaggaccattgcaaacttatttaactgggcagataattaattcctttgtttttcaaatggagataataatacccaactttgtatctgaaaatgcttttaatatta

SEQ ID NO: 16192 - DNA, 530 bp, Homo sapiens
agaaggtggcgtcagccttgggaataggaattgccattggagtggttggtggcgtgttggtgaggattgtcctctgtgcgctaagggggggcctgcagcagtgacagcttcaagaacttaacagccttgctcctgaagaactggctgcccaggaagccaagctagctttttaggggagtgttccagctgctggtagtggatcagcttagagggaacactcccacagccaaaagaatgagtgggagaaatggaggggacaatctcctgggagctatgcgcagtaacctaacttccttatgtcccatggatctcttcctgatcttccctgcccattgggtacccaggaaactgcaagcattgcctgtgttcctgggaagagttctaagaagcttgcattcattttctaccctttatgacttggatgcctccccacctccatttcccctcttctgagctgtgtattcatgtagagggatgtattcagcctttttagtgaacattttttttcaataaaagtaattcacagtaaa

SEQ ID NO: 16193 - DNA, 383 bp, Homo sapiens
ggctgagaacagtcggtgcctgcggggtcgggggccgtgagaggagcggctttgggggcgggggcggggaggagcgggtccttagagtgggtggcagaagcggtggggtggaaccaggcagagcctgtagggtacagacgcgagatgggcggagctgggaagtggccttgtgggcggagctaagaggggcggggtcttatggggcggggcttgtggggcttttccagacagaagcacgtgggtccacacggtcagtgctagaccaacctttgaagctccagctgtgagtgggagccagcgttttctcaggagcattcctcagggaggaatcagggcttggaggcaaatcactgttgatctcatccggcctgactggcctctga

SEQ ID NO: 16194 - DNA, 933 bp, Homo sapiens
attgccatctgcaaatgagaaagccttcagccgacaccagactgccagtgcctttgatattggactttcagtccccagatctgtgaaaaattaatttatgttgtttaagacacctagcctgtggtattttgttatcgcaatcaaaactgactgagacaggcagtaaggagagaacagaggttccagcctgcttcaggtccaggcagttctgccattgcccctaactcctcagtgccagtcatgggccaggcccctgggggacttggaatgagtaaaacatgcacctattgttaaggttcacctggtccagaaggggaggcagacccacctgcccaccatgacccggacagaggcaataaatacggagcacctcatggccagggcctggaggattcccaccataccctacccagcgccaataacagagggaccctggagttgtgtacacaagatagcagttcagtgcttgcacacatactagttgagaagggaaatcagggctaatgaaacagctcaactgtctggcagagccaggctccttctgccatgatacagtttggatgtttgtccctttctaatcttatatggaaatttgatccccagtgttgaaggtggggcctggtgggagatgttcctgttatcgggatggatccttcatgaatagcctggtgccatctttgtggtaacaagtgagttctcacttgattagtttctgtgagaactgtttgttaaaaagagcctggtggcacctccctcccttcttcctccttctcttgctatgtgatgctgctgccctttgccttccgtcatgagtggaagctccctgaagcccccaccagaagcaaatgctggcaccatgctgcttgtacagcctgcagaactgtgagccaaataaacctcttttctttataaattactcagcctcaggtgtta

SEQ ID NO: 16195 - DNA, 4239 bp, Homo sapiens
gggaagcgctccgagggcgtccccgtgtcaggccccatgctcatcgagaaggccaaggacttctacgagcagatgcagctcactgagccctgcgtgttctccggagggtggctttggcgctttaaggccagacacggcattaaaaagctagatgcatccagtgaaaagcagtcagccgaccaccaggccgcggagcagttctgtgcgtttttcaggagcttggctgctgagcacgggctgtccgccgagcaggtttacaacgctgatgagaccggccttttctggcggtgcctgccaaatcccactccggaaggcggggctgtgcctggccccaagcagggcaaggaccggctgaccgtgctgatgtgtgccaacgccacgggctcccacaggctcaagcccttggccatcgggaagtgcagcggtcccagggctttcaaaggcatccagcacctgcccgtcgcctataaggcccaggggaatgcctgggtggacaaggagattttttccgattggttccatcatatctttgtgccctcggtgagagagcacttcagaaccataggtttgccggaagacagcaaagccgttctcttgctggacagctcccgggctcacccgcaggaggccgagctggtgtccagtaacgttttcaccatcttcctgcctgccagcgtggcctcattggtgcagcccatggagcagggcattcggagagatttcatgaggaacttcattaaccctccggtccccctgcagggcccccacgcccgctacaacatgaacgatgccatattcagcgtggcctgtgcctggaacgcagtccctagccacgtcttcaggcgggcctggaggaagctgtggccgtcggttgcgtttgccgaaggctcctcctctgaggaggagttggaggcagagtgcttcccagtgaagccccacaacaagtcctttgcacacatcctggagcttgtgaaggaaggctcctcctgcccgggccagcttcgccagcgccaggccgccagctggggggtagcgggaagggaggcagaagggggacggccccctgctgccacgtcgccagcagaggttgtgtggagttcagaaaagactccgaaagctgaccaggacggcggaggagatcctggtgagggcgaggaggtggcctgggagcaggcggccgtggcctttgacgcagtcctgcgctttgcggagcggcagccatgcttcagtgcgcaggaagtggggcagctgcgggcgctgcgtgccgtgttccggagccagcagcaggtgaggaggcggcgtggtgccctcggggctgtggtcaaggttgaagccctccaggagggccctggtggctgtggggccacagctcagtctcgcttgccctgctcatccacagcaggtgacaactgatggcttctctgccctgccctggccactggccctgtttctccccacaccctggagtggcatggtcctgtgccccgaccccacctgaggcaggagggcatgtgcagacactcaagagcccttccaggagtgggtcgcccacgggtgtggctcgggtgcccaggacggtctgtgcccgaggttcctgtcaatacaggttttattttatcacttgccgtgtcatccgaaagtgaggaaatgttttggaagggtccaccctagcctagaacaagccagagccgcaccctggctggaatgggggccaggctgagccgatctggtctcgtgttcgctggctgatcattgcagtatcagagggtggagatgtcagtctgtccacgtggagagaagttgccctccaggccgacaggaggccatgcccaccgcccctggacaggcttcgtctcagaaggctctatctgctgggctggcggccatccccgtgttgggtggaccccgagcacggttgcctgaggtccgatggcccgagagctgggactcagttcttggcctgctagcggctgaacaggccgcacatctcacttcagttgtggcctcattcagcagaatgactctggaaccatcctctgttacccgcagatcctgtcccatgggctctggccccaagatgttggggggccccacggagagttgacttggtagagttcctttctgggaagaaagtaggagtggctgaccaggccctgctcatcacccggatagaggacacggaccctgtgtggtattttggcattttggctcagagtccaatgtaccatgttgcccagaatttcatacttatggcctttacatgaatacgtcttgatcagacattcagagattagtcttaggtttgcacgtaagtcactgaaaacagtaaaacaggctgcttagatttctagcagtatgtgtgctcttatccccagctgttagcacgttagtaatacttttggggaggagttgtctgtcctggtcagttttcacagaggcggttgtaagaggatgtggttattttctccatgtctgtagttgctttgcggcatctccatttcacgggcaacactcactgcctgcagctgagattccagaacgccctgtgtccacagtgattagcctcgtctttcagcgagcataaaataggtgcattgtccttttcttttcttgaggcagggtctcactctgttgaccaggctggagtgaagtggtgtgatcccagctcactgcagcctcgacctccctggcttgagtgatcctcccgccccagcctcctgagtagctgggactagaggcacgcaccaccgcgcctacctttttattttttttgtagagacagggtctcactgtgttgcccaggctggtcttgaactcttggcctcaagcgatcctccttcctcatccttctaaagtgctgggattacaggtgtgagccacagcactcggcctaaataggtttttcttgctatgttattttcagtgctttgcccttgaattcttttcctctcttaaattcatatcatttggccgagtcagcacgtagtttgcattccagcgtctgctgttgattccactgaaacctctgttctcatgaaggagaggatttggctcgctgtggtttctcgtactttcacatctctgtagatacaggggcaaaagtcattgctgacagagccctatctatgtcctggaagtgtgtgtttcttgctttgaatgcatgtgtgaagattataaaagccaaatagtttttaaagatctcggtgctgaacgacagtcccagttcccatttgtgtcccacacaggcgaggatcgttgggcctccttagtagccaaaggaactgaggtccagagcagggaatgtgttgcccagtgtcagcatggtctgctctggggtcaggcgtcttgccctggtcctaagccaccccaagccaaggcatgtccctgggcccatttcctctctcgaggtcttgggttccctatttctgatgtgtgtgaaaggaaggcctgtcctctggggtgaccatgaggctcagtgggaggagctgccaggcttgagctgggacttggcacctggccagccttttttctatttcattgtaccttgatgggctgtcagttctgaagagaaaaaatacactaggaatccattcttcctccaccattctccctggcagagggaagtgactacacccctatggtgtggacatactgacgctcctccatgaagcagcaaagttctgttgtttcaggagactgtgggccttgaggatgtggtagtgacctcaccagaggagttggcaattcctaagtgctgcctggaggcctctacagagacataatgttggagaacttctgccacatggcagtgctgggtaagacccctctgtccccaccagtgcccttgaggttatgggtgttggtaggtctgtggcctccatttccatgacgatggtgttaaggactgcatgtttgtgtccccccccaaagtttatatgttgaaaccctgacccccaggagggtggtattaggaggtggggcctttgggaggtgactaggcttaggtgagatcgtgagggtggggctcgccgatgagatcgagtccttataagaaaaggaaggaactagagcgaggtcactttgtgctgtgtgagcatacaagaaaactgccatcttcaagctgggtgcagtggctcacgcctgtaatcccagcactggaaggccaaggcattaggattgcatgagtccaggagttcgagaccagcctaggcatgataagaccttattgctaaaaaaaaa

SEQ ID NO: 16196 - DNA, 1834 bp, Homo sapiens
gggaagcgctccgagggcgtccccgtgtcaggccccatgctcatcgagaaggccaaggacttctacgagcagatgcagctcactgagccctgcgtgttctccggagggtggctttggcgctttaaggccagacacggcattaaaaagctagatgcatccagtgaaaagcagtcagccgaccaccaggccgcggagcagttctgtgcgtttttcaggagcttggctgctgagcacgggctgtccgccgagcaggtttacaacgctgatgagaccggccttttctggcggtgcctgccaaatcccactccggaaggcggggctgtgcctggccccaagcagggcaaggaccggctgaccgtgctgatgtgtgccaacgccacgggctcccacaggctcaagcccttggccatcgggaagtgcagcggtcccagggctttcaaaggcatccagcacctgcccgtcgcctataaggcccaggggaatgcctgggtggacaaggagattttttccgattggttccatcatatctttgtgccctcggtgagagagcacttcagaaccataggtttgccggaagacagcaaagccgttctcttgctggacagctcccgggctcacccgcaggaggccgagctggtgtccagtaacgttttcaccatcttcctgcctgccagcgtggcctcattggtgcagcccatggagcagggcattcggagagatttcatgaggaacttcattaaccctccggtccccctgcagggcccccacgcccgctacaacatgaacgatgccatattcagcgtggcctgtgcctggaacgcagtccctagccacgtcttcaggcgggcctggaggaagctgtggccgtcggttgcgtttgccgaaggctcctcctctgaggaggagttggaggcagagtgcttcccagtgaagccccacaacaagtcctttgcacacatcctggagcttgtgaaggaaggctcctcctgcccgggccagcttcgccagcgccaggccgccagctggggggtagcgggaagggaggcagaagggggacggccccctgctgccacgtcgccagcagaggttgtgtggagttcagaaaagactccgaaagctgaccaggacggcggaggagatcctggtgagggcgaggaggtggcctgggagcaggcggccgtggcctttgacgcagtcctgcgctttgcggagcggcagccatgcttcagtgcgcaggaagtggggcagctgcgggcgctgcgtgccgtgttccggagccagcagcaggagactgtgggccttgaggatgtggtagtgacctcaccagaggagttggcaattcctaagtgctgcctggaggcctctacagagacataatgttggagaacttctgccacatggcagtgctgggtaagacccctctgtccccaccagtgcccttgaggttatgggtgttggtaggtctgtggcctccatttccatgacgatggtgttaaggactgcatgtttgtgtccccccccaaagtttatatgttgaaaccctgacccccaggagggtggtattaggaggtggggcctttgggaggtgactaggcttaggtgagatcgtgagggtggggctcgccgatgagatcgagtccttataagaaaaggaaggaactagagcgaggtcactttgtgctgtgtgagcatacaagaaaactgccatcttcaagctgggtgcagtggctcacgcctgtaatcccagcactggaaggccaaggcattaggattgcatgagtccaggagttcgagaccagcctaggcatgataagaccttattgctaaaaaaaaa

SEQ ID NO: 16197 - DNA, 7371 bp, Homo sapiens
gggaagcgctccgagggcgtccccgtgtcaggccccatgctcatcgagaaggccaaggacttctacgagcagatgcagctcactgagccctgcgtgttctccggagggtggctttggcgctttaaggccagacacggcattaaaaagctagatgcatccagtgaaaagcagtcagccgaccaccaggccgcggagcagttctgtgcgtttttcaggagcttggctgctgagcacgggctgtccgccgagcaggtttacaacgctgatgagaccggccttttctggcggtgcctgccaaatcccactccggaaggcggggctgtgcctggccccaagcagggcaaggaccggctgaccgtgctgatgtgtgccaacgccacgggctcccacaggctcaagcccttggccatcgggaagtgcagcggtcccagggctttcaaaggcatccagcacctgcccgtcgcctataaggcccaggggaatgcctgggtggacaaggagattttttccgattggttccatcatatctttgtgccctcggtgagagagcacttcagaaccataggtttgccggaagacagcaaagccgttctcttgctggacagctcccgggctcacccgcaggaggccgagctggtgtccagtaacgttttcaccatcttcctgcctgccagcgtggcctcattggtgcagcccatggagcagggcattcggagagatttcatgaggaacttcattaaccctccggtccccctgcagggcccccacgcccgctacaacatgaacgatgccatattcagcgtggcctgtgcctggaacgcagtccctagccacgtcttcaggcgggcctggaggaagctgtggccgtcggttgcgtttgccgaaggctcctcctctgaggaggagttggaggcagagtgcttcccagtgaagccccacaacaagtcctttgcacacatcctggagcttgtgaaggaaggctcctcctgcccgggccagcttcgccagcgccaggccgccagctggggggtagcgggaagggaggcagaagggggacggccccctgctgccacgtcgccagcagaggttgtgtggagttcagaaaagactccgaaagctgaccaggacggcggaggagatcctggtgagggcgaggaggtggcctgggagcaggcggccgtggcctttgacgcagtcctgcgctttgcggagcggcagccatgcttcagtgcgcaggaagtggggcagctgcgggcgctgcgtgccgtgttccggagccagcagcaggtgaggaggcggcgtggtgccctcggggctgtggtcaaggttgaagccctccaggagggccctggtggctgtggggccacagctcagtctcgcttgccctgctcatccacagcaggtgacaactgatggcttctctgccctgccctggccactggccctgtttctccccacaccctggagtggcatggtcctgtgccccgaccccacctgaggcaggagggcatgtgcagacactcaagagcccttccaggagtgggtcgcccacgggtgtggctcgggtgcccaggacggtctgtgcccgaggttcctgtcaatacaggttttattttatcacttgccgtgtcatccgaaagtgaggaaatgttttggaagggtccaccctagcctagaacaagccagagccgcaccctggctggaatgggggccaggctgagccgatctggtctcgtgttcgctggctgatcattgcagtatcagagggtggagatgtcagtctgtccacgtggagagaagttgccctccaggccgacaggaggccatgcccaccgcccctggacaggcttcgtctcagaaggctctatctgctgggctggcggccatccccgtgttgggtggaccccgagcacggttgcctgaggtccgatggcccgagagctgggactcagttcttggcctgctagcggctgaacaggccgcacatctcacttcagttgtggcctcattcagcagaatgactctggaaccatcctctgttacccgcagatcctgtcccatgggctctggccccaagatgttggggggccccacggagagttgacttggtagagttcctttctgggaagaaagtaggagtggctgaccaggccctgctcatcacccggatagaggacacggaccctgtgtggtattttggcattttggctcagagtccaatgtaccatgttgcccagaatttcatacttatggcctttacatgaatacgtcttgatcagacattcagagattagtcttaggtttgcacgtaagtcactgaaaacagtaaaacaggctgcttagatttctagcagtatgtgtgctcttatccccagctgttagcacgttagtaatacttttggggaggagttgtctgtcctggtcagttttcacagaggcggttgtaagaggatgtggttattttctccatgtctgtagttgctttgcggcatctccatttcacgggcaacactcactgcctgcagctgagattccagaacgccctgtgtccacagtgattagcctcgtctttcagcgagcataaaataggtgcattgtccttttcttttcttgaggcagggtctcactctgttgaccaggctggagtgaagtggtgtgatcccagctcactgcagcctcgacctccctggcttgagtgatcctcccgccccagcctcctgagtagctgggactagaggcacgcaccaccgcgcctacctttttattttttttgtagagacagggtctcactgtgttgcccaggctggtcttgaactcttggcctcaagcgatcctccttcctcatccttctaaagtgctgggattacaggtgtgagccacagcactcggcctaaataggtttttcttgctatgttattttcagtgctttgcccttgaattcttttcctctcttaaattcatatcatttggccgagtcagcacgtagtttgcattccagcgtctgctgttgattccactgaaacctctgttctcatgaaggagaggatttggctcgctgtggtttctcgtactttcacatctctgtagatacaggggcaaaagtcattgctgacagagccctatctatgtcctggaagtgtgtgtttcttgctttgaatgcatgtgtgaagattataaaagccaaatagtttttaaagatctcggtgctgaacgacagtcccagttcccatttgtgtcccattgtctttgtggtgtcacccgcactgtttgcttcattgtctggggaacttctgcacatcatgtactttgtgccatttctgggctcacgtgtcactcctaatagagcctcttaaccaagactgctggattgcagctgcttgaggcaacacaggaggttagaacatgtcccgagggctctgaaacagtaggacatcctgggtgggtggagctggggagggcatgggcaggccagctggccgagctcctggctggctctcctgagtcctctggacatggcttgtccctgtcagactgtagctcttcaggacctgagctcttcccgttcttgacctgctcttgtgctgactgtgctgggctgatgggtaggcgcttgtccccagtgagtggctgtgtcctcagggtgcccctcttccagaccaactgcagcaaggcctggagcctgactctaggtgcagcccttgtggctggaatcccttgtgccacccaggggactcgggccctgctcctcctgcagcccctcctcacctgggctcgctgctggagtgaggtttttagggagcccagagcgtactcatctctgagctgctgggcccagctgcctggtgcatacctcttgcctcggtcctgtcccccagaacgctttatggagactgccgtgtcctccgagcactttgttttcacttcctgacccgtctcagaagctcaagtggttgaatgttttagcctcagaatctttttccccaagccctctcaggtggagccccgctgtaccagacaccacagcacagctctgtgaggctgtgtctcttcactctgtttctggggctgctgaggcccctgggaagccctggagcttgccagagcagagcgagaaagtctctggtcctgtttaaatgcctccgcgttttatctgtgagcaccaggctggagccactccctgtcttctcacagtgcccctgcaagttgcagcctcagttttccagtggctcgtggggtagcaggtgctgcgtcatatggtttgggacctctgtggctgcttccagcctgctaatagaacctctttccaccactgccttcatctttggggtggcacccctgagtgctcaggcctgagggcgctcctgtgtcctcactcgggacaggcagcctccactctgggagctcccatccctcgggatgcccaggagaggccatactttcagggtggcatggtgaattcaggggttaggatgggtaggtggtctttcagccccttctacgttggggttggtttacagaacacctgtcctgcctgtgccagcctggccttctgcgagcaccccaggcacgctgtcctggaagttgtctgtctcctgcataggagggtctagagcagaccttgccctgggcctgtctgtgcgtgacttccatatgcttcattcgtgctcagccatggctgagcatgcgatggagagcacctggactgcccctgacgtcgcaggccactgttcttatccagtgggccaagtgattgattgctagtggtggggttgattggaagaaaggaagtcgcagcccctgcccacggcttccccagctcgctggggttggaggactgtcatcagttgtccccagttaaagtccatttggaggaggttcagggtcccagtggctggatgtgcttgtggagggacacggtttgaggcaggggtttgcagaaggtgtagactgcatccattcttgggaggctgtggcacagggcagcgacaacttgggacaaatcaagacccgtccacactgcacctcagggacctcacctcacgccccacataaatgtgcttattggggatccgggtgtggtggcttctgcctgaaatcccagtactctggaaggccacggcaggaggatcactttagttcaggagtttgaaaccagcctgggcaacatagggagaccccatctctacagaaagtaaaagaaaatgagccaggtgtggtggcatgtgcctgtaaccccagctactcaggaggccgaggcgggaggatccccaagcccaggagtttgaggctgcagtgagttatggcctctgcactccagcctgggtgacagagtgagagacctaatctctaaaaacaaaaaataacaaaatgtgctttggggtcaggtgtggagatcagggtcggggaggtcatgaggtaggtaggggtcaggatgtggacagtcatgggctggtgggtgtggcagccgtgaggggtgggtggtggcctgggaggcagggcctgggcagggcttctgcacttctgctgcttacccagccccctctgggttcgaggactctccttgacaagggctgagctctcgggcactgcgttggactcagctgcctactgggaggctggggagaatggacctgtgagaccttgtttgtcctcttccctgcccagctcttgtagaccccaggcctggctgtccgcagggccaggagctgcagccatggcagccaccagcctcccacatgagccccagctcccagccccacacgcccactcctttgcccatgtggtgtcagctctggcctccgcttccacacatggaccctcagaccttgcacatctgttgtttcccttgcagggcagtgatgatgacatgaaatgaggtggggtcactcctgtttagggatgagactggggcccagggaggggcaggtgtgaagttgctgagggcagagggagacccagggctacctgctcctaatgaccagcctcacgttctccactgctcactccctgccgttcaccagctgcatgaccttgagcagtgcactcaactgtaaacagaggtgaaaacactcctttaccaactgttttaggggccactcttgtttgaggccttgaacctcctttcagttccgtggtggtcctgagcctctgaatctgggtatggcccctgctgggtcctggtctcttaggcagcacgatggcctccctgctcaaggccctgcacccaggggcagattgtgggaggcccactggccatggctgggccctatcgcagagagcctgtcagcacggccatttccacacccaggctggctgggaagcaagctacgaggtgctcaaaggccctctatgtctgcaggtagccccgtcccacacaggcgaggatcgttgggcctccttagtagccaaaggaactgaggtccagagcagggaatgtgttgcccagtgtcagcatggtctgctctggggtcaggcgtcttgccctggtcctaagccaccccaagccaaggcatgtccctgggcccatttcctctctcgaggtcttgggttccctatttctgatgtgtgtgaaaggaaggcctgtcctctggggtgaccatgaggctcagtgggaggagctgccaggcttgagctgggacttggcacctggccagccttttttctatttcattgtaccttgatgggctgtcagttctgaagagaaaaaatacactaggaatccattcttcctccaccattctccctggcagagggaagtgactacacccctatggtgtggacatactgacgctcctccatgaagcagcaaagttctgttgtttcaggagactgtgggccttgaggatgtggtagtgacctcaccagaggagttggcaattcctaagtgctgcctggaggcctctacagagacataatgttggagaacttctgccacatggcagtgctgggtaagacccctctgtccccaccagtgcccttgaggttatgggtgttggtaggtctgtggcctccatttccatgacgatggtgttaaggactgcatgtttgtgtccccccccaaagtttatatgttgaaaccctgacccccaggagggtggtattaggaggtggggcctttgggaggtgactaggcttaggtgagatcgtgagggtggggctcgccgatgagatcgagtccttataagaaaaggaaggaactagagcgaggtcactttgtgctgtgtgagcatacaagaaaactgccatcttcaagctgggtgcagtggctcacgcctgtaatcccagcactggaaggccaaggcattaggattgcatgagtccaggagttcgagaccagcctaggcatgataagaccttattgctaaaaaaaaa

SEQ ID NO: 16198 - DNA, 6155 bp, Homo sapiens
taggctaggtacgaggcctggtgttaatcggccgaggggcgctgcgtgccgtgttccggagccagcagcaggtgaggaggcggcgtggtgccctcggggctgtggtcaaggttgaagccctccaggagggccctggtggctgtggggccacagctcagtctcgcttgccctgctcatccacagcaggtgacaactgatggcttctctgccctgccctggccactggccctgtttctccccacaccctggagtggcatggtcctgtgccccgaccccacctgaggcaggagggcatgtgcagacactcaagagcccttccaggagtgggtcgcccacgggtgtggctcgggtgcccaggacggtctgtgcccgaggttcctgtcaatacaggttttattttatcacttgccgtgtcatccgaaagtgaggaaatgttttggaagggtccaccctagcctagaacaagccagagccgcaccctggctggaatgggggccaggctgagccgatctggtctcgtgttcgctggctgatcattgcagtatcagagggtggagatgtcagtctgtccacgtggagagaagttgccctccaggccgacaggaggccatgcccaccgcccctggacaggcttcgtctcagaaggctctatctgctgggctggcggccatccccgtgttgggtggaccccgagcacggttgcctgaggtccgatggcccgagagctgggactcagttcttggcctgctagcggctgaacaggccgcacatctcacttcagttgtggcctcattcagcagaatgactctggaaccatcctctgttacccgcagatcctgtcccatgggctctggccccaagatgttggggggccccacggagagttgacttggtagagttcctttctgggaagaaagtaggagtggctgaccaggccctgctcatcacccggatagaggacacggaccctgtgtggtattttggcattttggctcagagtccaatgtaccatgttgcccagaatttcatacttatggcctttacatgaatacgtcttgatcagacattcagagattagtcttaggtttgcacgtaagtcactgaaaacagtaaaacaggctgcttagatttctagcagtatgtgtgctcttatccccagctgttagcacgttagtaatacttttggggaggagttgtctgtcctggtcagttttcacagaggcggttgtaagaggatgtggttattttctccatgtctgtagttgctttgcggcatctccatttcacgggcaacactcactgcctgcagctgagattccagaacgccctgtgtccacagtgattagcctcgtctttcagcgagcataaaataggtgcattgtccttttcttttcttgaggcagggtctcactctgttgaccaggctggagtgaagtggtgtgatcccagctcactgcagcctcgacctccctggcttgagtgatcctcccgccccagcctcctgagtagctgggactagaggcacgcaccaccgcgcctacctttttattttttttgtagagacagggtctcactgtgttgcccaggctggtcttgaactcttggcctcaagcgatcctccttcctcatccttctaaagtgctgggattacaggtgtgagccacagcactcggcctaaataggtttttcttgctatgttattttcagtgctttgcccttgaattcttttcctctcttaaattcatatcatttggccgagtcagcacgtagtttgcattccagcgtctgctgttgattccactgaaacctctgttctcatgaaggagaggatttggctcgctgtggtttctcgtactttcacatctctgtagatacaggggcaaaagtcattgctgacagagccctatctatgtcctggaagtgtgtgtttcttgctttgaatgcatgtgtgaagattataaaagccaaatagtttttaaagatctcggtgctgaacgacagtcccagttcccatttgtgtcccattgtctttgtggtgtcacccgcactgtttgcttcattgtctggggaacttctgcacatcatgtactttgtgccatttctgggctcacgtgtcactcctaatagagcctcttaaccaagactgctggattgcagctgcttgaggcaacacaggaggttagaacatgtcccgagggctctgaaacagtaggacatcctgggtgggtggagctggggagggcatgggcaggccagctggccgagctcctggctggctctcctgagtcctctggacatggcttgtccctgtcagactgtagctcttcaggacctgagctcttcccgttcttgacctgctcttgtgctgactgtgctgggctgatgggtaggcgcttgtccccagtgagtggctgtgtcctcagggtgcccctcttccagaccaactgcagcaaggcctggagcctgactctaggtgcagcccttgtggctggaatcccttgtgccacccaggggactcgggccctgctcctcctgcagcccctcctcacctgggctcgctgctggagtgaggtttttagggagcccagagcgtactcatctctgagctgctgggcccagctgcctggtgcatacctcttgcctcggtcctgtcccccagaacgctttatggagactgccgtgtcctccgagcactttgttttcacttcctgacccgtctcagaagctcaagtggttgaatgttttagcctcagaatctttttccccaagccctctcaggtggagccccgctgtaccagacaccacagcacagctctgtgaggctgtgtctcttcactctgtttctggggctgctgaggcccctgggaagccctggagcttgccagagcagagcgagaaagtctctggtcctgtttaaatgcctccgcgttttatctgtgagcaccaggctggagccactccctgtcttctcacagtgcccctgcaagttgcagcctcagttttccagtggctcgtggggtagcaggtgctgcgtcatatggtttgggacctctgtggctgcttccagcctgctaatagaacctctttccaccactgccttcatctttggggtggcacccctgagtgctcaggcctgagggcgctcctgtgtcctcactcgggacaggcagcctccactctgggagctcccatccctcgggatgcccaggagaggccatactttcagggtggcatggtgaattcaggggttaggatgggtaggtggtctttcagccccttctacgttggggttggtttacagaacacctgtcctgcctgtgccagcctggccttctgcgagcaccccaggcacgctgtcctggaagttgtctgtctcctgcataggagggtctagagcagaccttgccctgggcctgtctgtgcgtgacttccatatgcttcattcgtgctcagccatggctgagcatgcgatggagagcacctggactgcccctgacgtcgcaggccactgttcttatccagtgggccaagtgattgattgctagtggtggggttgattggaagaaaggaagtcgcagcccctgcccacggcttccccagctcgctggggttggaggactgtcatcagttgtccccagttaaagtccatttggaggaggttcagggtcccagtggctggatgtgcttgtggagggacacggtttgaggcaggggtttgcagaaggtgtagactgcatccattcttgggaggctgtggcacagggcagcgacaacttgggacaaatcaagacccgtccacactgcacctcagggacctcacctcacgccccacataaatgtgcttattggggatccgggtgtggtggcttctgcctgaaatcccagtactctggaaggccacggcaggaggatcactttagttcaggagtttgaaaccagcctgggcaacatagggagaccccatctctacagaaagtaaaagaaaatgagccaggtgtggtggcatgtgcctgtaaccccagctactcaggaggccgaggcgggaggatccccaagcccaggagtttgaggctgcagtgagttatggcctctgcactccagcctgggtgacagagtgagagacctaatctctaaaaacaaaaaataacaaaatgtgctttggggtcaggtgtggagatcagggtcggggaggtcatgaggtaggtaggggtcaggatgtggacagtcatgggctggtgggtgtggcagccgtgaggggtgggtggtggcctgggaggcagggcctgggcagggcttctgcacttctgctgcttacccagccccctctgggttcgaggactctccttgacaagggctgagctctcgggcactgcgttggactcagctgcctactgggaggctggggagaatggacctgtgagaccttgtttgtcctcttccctgcccagctcttgtagaccccaggcctggctgtccgcagggccaggagctgcagccatggcagccaccagcctcccacatgagccccagctcccagccccacacgcccactcctttgcccatgtggtgtcagctctggcctccgcttccacacatggaccctcagaccttgcacatctgttgtttcccttgcagggcagtgatgatgacatgaaatgaggtggggtcactcctgtttagggatgagactggggcccagggaggggcaggtgtgaagttgctgagggcagagggagacccagggctacctgctcctaatgaccagcctcacgttctccactgctcactccctgccgttcaccagctgcatgaccttgagcagtgcactcaactgtaaacagaggtgaaaacactcctttaccaactgttttaggggccactcttgtttgaggccttgaacctcctttcagttccgtggtggtcctgagcctctgaatctgggtatggcccctgctgggtcctggtctcttaggcagcacgatggcctccctgctcaaggccctgcacccaggggcagattgtgggaggcccactggccatggctgggccctatcgcagagagcctgtcagcacggccatttccacacccaggctggctgggaagcaagctacgaggtgctcaaaggccctctatgtctgcaggtagccccgtcccacacaggcgaggatcgttgggcctccttagtagccaaaggaactgaggtccagagcagggaatgtgttgcccagtgtcagcatggtctgctctggggtcaggcgtcttgccctggtcctaagccaccccaagccaaggcatgtccctgggcccatttcctctctcgaggtcttgggttccctatttctgatgtgtgtgaaaggaaggcctgtcctctggggtgaccatgaggctcagtgggaggagctgccaggcttgagctgggacttggcacctggccagccttttttctatttcattgtaccttgatgggctgtcagttctgaagagaaaaaatacactaggaatccattcttcctccaccattctccctggcagagggaagtgactacacccctatggtgtggacatactgacgctcctccatgaagcagcaaagttctgttgtttcaggagactgtgggccttgaggatgtggtagtgacctcaccagaggagttggcaattcctaagtgctgcctggaggcctctacagagacataatgttggagaacttctgccacatggcagtgctgggtaagacccctctgtccccaccagtgcccttgaggttatgggtgttggtaggtctgtggcctccatttccatgacgatggtgttaaggactgcatgtttgtgtccccccccaaagtttatatgttgaaaccctgacccccaggagggtggtattaggaggtggggcctttgggaggtgactaggcttaggtgagatcgtgagggtggggctcgccgatgagatcgagtccttataagaaaaggaaggaactagagcgaggtcactttgtgctgtgtgagcatacaagaaaactgccatcttcaagctgggtgcagtggctcacgcctgtaatcccagcactggaaggccaaggcattaggattgcatgagtccaggagttcgagaccagcctaggcatgataagaccttattgctaaaaaaaaa

SEQ ID NO: 16199 - DNA, 7585 bp, Homo sapiens
gggaagcgctccgagggcgtccccgtgtcaggccccatgctcatcgagaaggccaaggacttctacgagcagatgcagctcactgagccctgcgtgttctccggagggtggctttggcgctttaaggccagacacggcattaaaaagctagatgcatccagtgaaaagcagtcagccgaccaccaggccgcggagcagttctgtgcgtttttcaggagcttggctgctgagcacgggctgtccgccgagcaggtttacaacgctgatgagaccggccttttctggcggtgcctgccaaatcccactccggaaggcggggctgtgcctggccccaagcagggcaaggaccggctgaccgtgctgatgtgtgccaacgccacgggctcccacaggctcaagcccttggccatcgggaagtgcagcggtcccagggctttcaaaggcatccagcacctgcccgtcgcctataaggcccaggggaatgcctgggtggacaaggagattttttccgattggttccatcatatctttgtgccctcggtgagagagcacttcagaaccataggtttgccggaagacagcaaagccgttctcttgctggacagctcccgggctcacccgcaggaggccgagctggtgtccagtaacgttttcaccatcttcctgcctgccagcgtggcctcattggtgcagcccatggagcagggcattcggagagatttcatgaggaacttcattaaccctccggtccccctgcagggcccccacgcccgctacaacatgaacgatgccatattcagcgtggcctgtgcctggaacgcagtccctagccacgtcttcaggcgggcctggaggaagctgtggccgtcggttgcgtttgccgaaggctcctcctctgaggaggagttggaggcagagtgcttcccagtgaagccccacaacaagtcctttgcacacatcctggagcttgtgaaggaaggctcctcctgcccgggccagcttcgccagcgccaggccgccagctggggggtagcgggaagggaggcagaagggggacggccccctgctgccacgtcgccagcagaggttgtgtggagttcagaaaagactccgaaagctgaccaggacggcggaggagatcctggtgagggcgaggaggtggcctgggagcaggcggccgtggcctttgacgcagtcctgcgctttgcggagcggcagccatgcttcagtgcgcaggaagtggggcagctgcgggcgctgcgtgccgtgttccggagccagcagcaggtgaggaggcggcgtggtgccctcggggctgtggtcaaggttgaagccctccaggagggccctggtggctgtggggccacagctcagtctcgcttgccctgctcatccacagcaggtgacaactgatggcttctctgccctgccctggccactggccctgtttctccccacaccctggagtggcatggtcctgtgccccgaccccacctgaggcaggagggcatgtgcagacactcaagagcccttccaggagtgggtcgcccacgggtgtggctcgggtgcccaggacggtctgtgcccgaggttcctgtcaatacaggttttattttatcacttgccgtgtcatccgaaagtgaggaaatgttttggaagggtccaccctagcctagaacaagccagagccgcaccctggctggaatgggggccaggctgagccgatctggtctcgtgttcgctggctgatcattgcagtatcagagggtggagatgtcagtctgtccacgtggagagaagttgccctccaggccgacaggaggccatgcccaccgcccctggacaggcttcgtctcagaaggctctatctgctgggctggcggccatccccgtgttgggtggaccccgagcacggttgcctgaggtccgatggcccgagagctgggactcagttcttggcctgctagcggctgaacaggccgcacatctcacttcagttgtggcctcattcagcagaatgactctggaaccatcctctgttacccgcagatcctgtcccatgggctctggccccaagatgttggggggccccacggagagttgacttggtagagttcctttctgggaagaaagtaggagtggctgaccaggccctgctcatcacccggatagaggacacggaccctgtgtggtattttggcattttggctcagagtccaatgtaccatgttgcccagaatttcatacttatggcctttacatgaatacgtcttgatcagacattcagagattagtcttaggtttgcacgtaagtcactgaaaacagtaaaacaggctgcttagatttctagcagtatgtgtgctcttatccccagctgttagcacgttagtaatacttttggggaggagttgtctgtcctggtcagttttcacagaggcggttgtaagaggatgtggttattttctccatgtctgtagttgctttgcggcatctccatttcacgggcaacactcactgcctgcagctgagattccagaacgccctgtgtccacagtgattagcctcgtctttcagcgagcataaaataggtgcattgtccttttcttttcttgaggcagggtctcactctgttgaccaggctggagtgaagtggtgtgatcccagctcactgcagcctcgacctccctggcttgagtgatcctcccgccccagcctcctgagtagctgggactagaggcacgcaccaccgcgcctacctttttattttttttgtagagacagggtctcactgtgttgcccaggctggtcttgaactcttggcctcaagcgatcctccttcctcatccttctaaagtgctgggattacaggtgtgagccacagcactcggcctaaataggtttttcttgctatgttattttcagtgctttgcccttgaattcttttcctctcttaaattcatatcatttggccgagtcagcacgtagtttgcattccagcgtctgctgttgattccactgaaacctctgttctcatgaaggagaggatttggctcgctgtggtttctcgtactttcacatctctgtagatacaggggcaaaagtcattgctgacagagccctatctatgtcctggaagtgtgtgtttcttgctttgaatgcatgtgtgaagattataaaagccaaatagtttttaaagatctcggtgctgaacgacagtcccagttcccatttgtgtcccattgtctttgtggtgtcacccgcactgtttgcttcattgtctggggaacttctgcacatcatgtactttgtgccatttctgggctcacgtgtcactcctaatagagcctcttaaccaagactgctggattgcagctgcttgaggcaacacaggaggttagaacatgtcccgagggctctgaaacagtaggacatcctgggtgggtggagctggggagggcatgggcaggccagctggccgagctcctggctggctctcctgagtcctctggacatggcttgtccctgtcagactgtagctcttcaggacctgagctcttcccgttcttgacctgctcttgtgctgactgtgctgggctgatgggtaggcgcttgtccccagtgagtggctgtgtcctcagggtgcccctcttccagaccaactgcagcaaggcctggagcctgactctaggtgcagcccttgtggctggaatcccttgtgccacccaggggactcgggccctgctcctcctgcagcccctcctcacctgggctcgctgctggagtgaggtttttagggagcccagagcgtactcatctctgagctgctgggcccagctgcctggtgcatacctcttgcctcggtcctgtcccccagaacgctttatggagactgccgtgtcctccgagcactttgttttcacttcctgacccgtctcagaagctcaagtggttgaatgttttagcctcagaatctttttccccaagccctctcaggtggagccccgctgtaccagacaccacagcacagctctgtgaggctgtgtctcttcactctgtttctggggctgctgaggcccctgggaagccctggagcttgccagagcagagcgagaaagtctctggtcctgtttaaatgcctccgcgttttatctgtgagcaccaggctggagccactccctgtcttctcacagtgcccctgcaagttgcagcctcagttttccagtggctcgtggggtagcaggtgctgcgtcatatggtttgggacctctgtggctgcttccagcctgctaatagaacctctttccaccactgccttcatctttggggtggcacccctgagtgctcaggcctgagggcgctcctgtgtcctcactcgggacaggcagcctccactctgggagctcccatccctcgggatgcccaggagaggccatactttcagggtggcatggtgaattcaggggttaggatgggtaggtggtctttcagccccttctacgttggggttggtttacagaacacctgtcctgcctgtgccagcctggccttctgcgagcaccccaggcacgctgtcctggaagttgtctgtctcctgcataggagggtctagagcagaccttgccctgggcctgtctgtgcgtgacttccatatgcttcattcgtgctcagccatggctgagcatgcgatggagagcacctggactgcccctgacgtcgcaggccactgttcttatccagtgggccaagtgattgattgctagtggtggggttgattggaagaaaggaagtcgcagcccctgcccacggcttccccagctcgctggggttggaggactgtcatcagttgtccccagttaaagtccatttggaggaggttcagggtcccagtggctggatgtgcttgtggagggacacggtttgaggcaggggtttgcagaaggtgtagactgcatccattcttgggaggctgtggcacagggcagcgacaacttgggacaaatcaagacccgtccacactgcacctcagggacctcacctcacgccccacataaatgtgcttattggggatccgggtgtggtggcttctgcctgaaatcccagtactctggaaggccacggcaggaggatcactttagttcaggagtttgaaaccagcctgggcaacatagggagaccccatctctacagaaagtaaaagaaaatgagccaggtgtggtggcatgtgcctgtaaccccagctactcaggaggccgaggcgggaggatccccaagcccaggagtttgaggctgcagtgagttatggcctctgcactccagcctgggtgacagagtgagagacctaatctctaaaaacaaaaaataacaaaatgtgctttggggtcaggtgtggagatcagggtcggggaggtcatgaggtaggtaggggtcaggatgtggacagtcatgggctggtgggtgtggcagccgtgaggggtgggtggtggcctgggaggcagggcctgggcagggcttctgcacttctgctgcttacccagccccctctgggttcgaggactctccttgacaagggctgagctctcgggcactgcgttggactcagctgcctactgggaggctggggagaatggacctgtgagaccttgtttgtcctcttccctgcccagctcttgtagaccccaggcctggctgtccgcagggccaggagctgcagccatggcagccaccagcctcccacatgagccccagctcccagccccacacgcccactcctttgcccatgtggtgtcagctctggcctccgcttccacacatggaccctcagaccttgcacatctgttgtttcccttgcagggcagtgatgatgacatgaaatgaggtggggtcactcctgtttagggatgagactggggcccagggaggggcaggtgtgaagttgctgagggcagagggagacccagggctacctgctcctaatgaccagcctcacgttctccactgctcactccctgccgttcaccagctgcatgaccttgagcagtgcactcaactgtaaacagaggtgaaaacactcctttaccaactgttttaggggccactcttgtttgaggccttgaacctcctttcagttccgtggtggtcctgagcctctgaatctgggtatggcccctgctgggtcctggtctcttaggcagcacgatggcctccctgctcaaggccctgcacccaggggcagattgtgggaggcccactggccatggctgggccctatcgcagagagcctgtcagcacggccatttccacacccaggctggctgggaagcaagctacgaggtgctcaaaggccctctatgtctgcaggtagccccgtcccacacaggcgaggatcgttgggcctccttagtagccaaaggaactgaggtccagagcagggaatgtgttgcccagtgtcagcatggtctgctctggggtcaggcgtcttgccctggtcctaagccaccccaagccaaggcatgtccctgggcccatttcctctctcgaggtcttgggttccctatttctgatgtgtgtgaaaggaaggcctgtcctctggggtgaccatgaggctcagtgggaggagctgccaggcttgagctgggacttggcacctggccagccttttttctatttcattgtaccttgatgggctgtcagttctgaagagaaaaaatacactaggaatccattcttcctccaccattctccctggcagagggaagtgactacacccctatggtgtggacatactgacgctcctccatgaagcagcaaagttctgttgtttcaggagactgtgggccttgaggatgtggtagtgacctcaccagaggagttggcaattcctaagtgctgcctggaggcctctacagagacataatgttggagaacttctgccacatggcagtgctgggttcacctggtccagaaggggaggcagacccacctgcccaccatgacccggacagaggcaataaatacggagcacctcatggccagggcctggaggattcccaccataccctacccagcgccaataacagagggaccctggagttgtgtacacaagatagcagttcagtgcttgcacacatactagttgagaagggaaatcagggctaatgaaacagctcaactgtctggcagagccaggctccttctgccatgatacagtttggatgtttgtccctttctaatcttatatggaaatttgatccccagtgttgaaggtggggcctggtgggagatgttcctgttatcgggatggatccttcatgaatagcctggtgccatctttgtggtaacaagtgagttctcacttgattagtttctgtgagaactgtttgttaaaaagagcctggtggcacctccctcccttcttcctccttctcttgctatgtgatgctgctgccctttgccttccgtcatgagtggaagctccctgaagcccccaccagaagcaaatgctggcaccatgctgcttgtacagcctgcagaactgtgagccaaataaacctcttttctttataaattactcagcctcaggtgtta

SEQ ID NO: 16200 - DNA, 5188 bp, Homo sapiens
gggaagcgctccgagggcgtccccgtgtcaggccccatgctcatcgagaaggccaaggacttctacgagcagatgcagctcactgagccctgcgtgttctccggagggtggctttggcgctttaaggccagacacggcattaaaaagctagatgcatccagtgaaaagcagtcagccgaccaccaggccgcggagcagttctgtgcgtttttcaggagcttggctgctgagcacgggctgtccgccgagcaggtttacaacgctgatgagaccggccttttctggcggtgcctgccaaatcccactccggaaggcggggctgtgcctggccccaagcagggcaaggaccggctgaccgtgctgatgtgtgccaacgccacgggctcccacaggctcaagcccttggccatcgggaagtgcagcggtcccagggctttcaaaggcatccagcacctgcccgtcgcctataaggcccaggggaatgcctgggtggacaaggagattttttccgattggttccatcatatctttgtgccctcggtgagagagcacttcagaaccataggtttgccggaagacagcaaagccgttctcttgctggacagctcccgggctcacccgcaggaggccgagctggtgtccagtaacgttttcaccatcttcctgcctgccagcgtggcctcattggtgcagcccatggagcagggcattcggagagatttcatgaggaacttcattaaccctccggtccccctgcagggcccccacgcccgctacaacatgaacgatgccatattcagcgtggcctgtgcctggaacgcagtccctagccacgtcttcaggcgggcctggaggaagctgtggccgtcggttgcgtttgccgaaggctcctcctctgaggaggagttggaggcagagtgcttcccagtgaagccccacaacaagtcctttgcacacatcctggagcttgtgaaggaaggctcctcctgcccgggccagcttcgccagcgccaggccgccagctggggggtagcgggaagggaggcagaagggggacggccccctgctgccacgtcgccagcagaggttgtgtggagttcagaaaagactccgaaagctgaccaggacggcggaggagatcctggtgagggcgaggaggtggcctgggagcaggcggccgtggcctttgacgcagtcctgcgctttgcggagcggcagccatgcttcagtgcgcaggaagtggggcagctgcgggcgctgcgtgccgtgttccggagccagcagcaggtgaggaggcggcgtggtgccctcggggctgtggtcaaggttgaagccctccaggagggccctggtggctgtggggccacagctcagtctcgcttgccctgctcatccacagcaggtgacaactgatggcttctctgccctgccctggccactggccctgtttctccccacaccctggagtggcatggtcctgtgccccgaccccacctgaggcaggagggcatgtgcagacactcaagagcccttccaggagtgggtcgcccacgggtgtggctcgggtgcccaggacggtctgtgcccgaggttcctgtcaatacaggttttattttatcacttgccgtgtcatccgaaagtgaggaaatgttttggaagggtccaccctagcctagaacaagccagagccgcaccctggctggaatgggggccaggctgagccgatctggtctcgtgttcgctggctgatcattgcagtatcagagggtggagatgtcagtctgtccacgtggagagaagttgccctccaggccgacaggaggccatgcccaccgcccctggacaggcttcgtctcagaaggctctatctgctgggctggcggccatccccgtgttgggtggaccccgagcacggttgcctgaggtccgatggcccgagagctgggactcagttcttggcctgctagcggctgaacaggccgcacatctcacttcagttgtggcctcattcagcagaatgactctggaaccatcctctgttacccgcagatcctgtcccatgggctctggccccaagatgttggggggccccacggagagttgacttggtagagttcctttctgggaagaaagtaggagtggctgaccaggccctgctcatcacccggatagaggacacggaccctgtgtggtattttggcattttggctcagagtccaatgtaccatgttgcccagaatttcatacttatggcctttacatgaatacgtcttgatcagacattcagagattagtcttaggtttgcacgtaagtcactgaaaacagtaaaacaggctgcttagatttctagcagtatgtgtgctcttatccccagctgttagcacgttagtaatacttttggggaggagttgtctgtcctggtcagttttcacagaggcggttgtaagaggatgtggttattttctccatgtctgtagttgctttgcggcatctccatttcacgggcaacactcactgcctgcagctgagattccagaacgccctgtgtccacagtgattagcctcgtctttcagcgagcataaaataggtgcattgtccttttcttttcttgaggcagggtctcactctgttgaccaggctggagtgaagtggtgtgatcccagctcactgcagcctcgacctccctggcttgagtgatcctcccgccccagcctcctgagtagctgggactagaggcacgcaccaccgcgcctacctttttattttttttgtagagacagggtctcactgtgttgcccaggctggtcttgaactcttggcctcaagcgatcctccttcctcatccttctaaagtgctgggattacaggtgtgagccacagcactcggcctaaataggtttttcttgctatgttattttcagtgctttgcccttgaattcttttcctctcttaaattcatatcatttggccgagtcagcacgtagtttgcattccagcgtctgctgttgattccactgaaacctctgttctcatgaaggagaggatttggctcgctgtggtttctcgtactttcacatctctgtagatacaggggcaaaagtcattgctgacagagccctatctatgtcctggaagtgtgtgtttcttgctttgaatgcatgtgtgaagattataaaagccaaatagtttttaaagatctcggtgctgaacgacagtcccagttcccatttgtgtcccattgtctttgtggtgtcacccgcactgtttgcttcattgtctggggaacttctgcacatcatgtactttgtgccatttctgggctcacgtgtcactcctaatagagcctcttaaccaagactgctggattgcagctgcttgaggcaacacaggaggttagaacatgtcccgagggctctgaaacagtaggacatcctgggtgggtggagctggggagggcatgggcaggccagctggccgagctcctggctggctctcctgagtcctctggacatggcttgtccctgtcagactgtagctcttcaggacctgagctcttcccgttcttgacctgctcttgtgctgactgtgctgggctgatgggtaggcgcttgtccccagtgagtggctgtgtcctcagggtgcccctcttccagaccaactgcagcaaggcctggagcctgactctaggtgcagcccttgtggctggaatcccttgtgccacccaggggactcgggccctgctcctcctgcagcccctcctcacctgggctcgctgctggagtgaggtttttagggagcccagagcgtactcatctctgagctgctgggcccagctgcctggtgcatacctcttgcctcggtcctgtcccccagaacgctttatggagactgccgtgtcctccgagcactttgttttcacttcctgacccgtctcagaagctcaagtggttgaatgttttagcctcagaatctttttccccaagccctctcaggtggagccccgctgtaccagacaccacagcacagctctgtgaggctgtgtctcttcactctgtttctggggctgctgaggcccctgggaagccctggagcttgccagagcagagcgagaaagtctctggtcctgtttaaatgcctccgcgttttatctgtgagcaccaggctggagccactccctgtcttctcacagtgcccctgcaagttgcagcctcagttttccagtggctcgtggggtagcaggtgctgcgtcatatggtttgggacctctgtggctgcttccagcctgctaatagaacctctttccaccactgccttcatctttggggtggcacccctgagtgctcaggcctgagggcgctcctgtgtcctcactcgggacaggcagcctccactctgggagctcccatccctcgggatgcccaggagaggccatactttcagggtggcatggtgaattcaggggttaggatgggtaggtggtctttcagccccttctacgttggggttggtttacagaacacctgtcctgcctgtgccagcctggccttctgcgagcaccccaggcacgctgtcctggaagttgtctgtctcctgcataggagggtctagagcagaccttgccctgggcctgtctgtgcgtgacttccatatgcttcattcgtgctcagccatggctgagcatgcgatggagagcacctggactgcccctgacgtcgcaggccactgttcttatccagtgggccaagtgattgattgctagtggtggggttgattggaagaaaggaagtcgcagcccctgcccacggcttccccagctcgctggggttggaggactgtcatcagttgtccccagttaaagtccatttggaggaggttcagggtcccagtggctggatgtgcttgtggagggacacggtttgaggcaggggtttgcagaaggtgtagactgcatccattcttgggaggctgtggcacagggcagcgacaacttgggacaaatcaagacccgtccacactgcacctcagggacctcacctcacgccccacataaatgtgcttattggggatccgggtgtggtggcttctgcctgtaatcccagcactggaaggccaaggcattaggattgcatgagtccaggagttcgagaccagcctaggcatgataagaccttattgctaaaaaaaaa

SEQ ID NO: 16201 - DNA, 3215 bp, Homo sapiens
gggaagcgctccgagggcgtccccgtgtcaggccccatgctcatcgagaaggccaaggacttctacgagcagatgcagctcactgagccctgcgtgttctccggagggtggctttggcgctttaaggccagacacggcattaaaaagctagatgcatccagtgaaaagcagtcagccgaccaccaggccgcggagcagttctgtgcgtttttcaggagcttggctgctgagcacgggctgtccgccgagcaggtttacaacgctgatgagaccggccttttctggcggtgcctgccaaatcccactccggaaggcggggctgtgcctggccccaagcagggcaaggaccggctgaccgtgctgatgtgtgccaacgccacgggctcccacaggctcaagcccttggccatcgggaagtgcagcggtcccagggctttcaaaggcatccagcacctgcccgtcgcctataaggcccaggggaatgcctgggtggacaaggagattttttccgattggttccatcatatctttgtgccctcggtgagagagcacttcagaaccataggtttgccggaagacagcaaagccgttctcttgctggacagctcccgggctcacccgcaggaggccgagctggtgtccagtaacgttttcaccatcttcctgcctgccagcgtggcctcattggtgcagcccatggagcagggcattcggagagatttcatgaggaacttcattaaccctccggtccccctgcagggcccccacgcccgctacaacatgaacgatgccatattcagcgtggcctgtgcctggaacgcagtccctagccacgtcttcaggcgggcctggaggaagctgtggccgtcggttgcgtttgccgaaggctcctcctctgaggaggagttggaggcagagtgcttcccagtgaagccccacaacaagtcctttgcacacatcctggagcttgtgaaggaaggctcctcctgcccgggccagcttcgccagcgccaggccgccagctggggggtagcgggaagggaggcagaagggggacggccccctgctgccacgtcgccagcagaggttgtgtggagttcagaaaagactccgaaagctgaccaggacggcggaggagatcctggtgagggcgaggaggtggcctgggagcaggcggccgtggcctttgacgcagtcctgcgctttgcggagcggcagccatgcttcagtgcgcaggaagtggggcagctgcgggcgctgcgtgccgtgttccggagccagcagcaggtgaggaggcggcgtggtgccctcggggctgtggtcaaggttgaagccctccaggagggccctggtggctgtggggccacagctcagtctcgcttgccctgctcatccacagcaggtgacaactgatggcttctctgccctgccctggccactggccctgtttctccccacaccctggagtggcatggtcctgtgccccgaccccacctgaggcaggagggcatgtgcagacactcaagagcccttccaggagtgggtcgcccacgggtgtggctcgggtgcccaggacggtctgtgcccgaggttcctgtcaatacaggttttattttatcacttgccgtgtcatccgaaagtgaggaaatgttttggaagggtccaccctagcctagaacaagccagagccgcaccctggctggaatgggggccaggctgagccgatctggtctcgtgttcgctggctgatcattgcagtatcagagggtggagatgtcagtctgtccacgtggagagaagttgccctccaggccgacaggaggccatgcccaccgcccctggacaggcttcgtctcagaaggctctatctgctgggctggcggccatccccgtgttgggtggaccccgagcacggttgcctgaggtccgatggcccgagagctgggactcagttcttggcctgctagcggctgaacaggccgcacatctcacttcagttgtggcctcattcagcagaatgactctggaaccatcctctgttacccgcagatcctgtcccatgggctctggccccaagatgttggggggccccacggagagttgacttggtagagttcctttctgggaagaaagtaggagtggctgaccaggccctgctcatcacccggatagaggacacggaccctgtgtggtattttggcattttggctcagagtccaatgtaccatgttgcccagaatttcatacttatggcctttacatgaatacgtcttgatcagacattcagagattagtcttaggtttgcacgtaagtcactgaaaacagtaaaacaggctgcttagatttctagcagtatgtgtgctcttatccccagctgttagcacgttagtaatacttttggggaggagttgtctgtcctggtcagttttcacagaggcggttgtaagaggatgtggttattttctccatgtctgtagttgctttgcggcatctccatttcacgggcaacactcactgcctgcagctgagattccagaacgccctgtgtccacagtgattagcctcgtctttcagcgagcataaaataggtgcattgtccttttcttttcttgaggcagggtctcactctgttgaccaggctggagtgaagtggtgtgatcccagctcactgcagcctcgacctccctggcttgagtgatcctcccgccccagcctcctgagtagctgggactagaggcacgcaccaccgcgcctacctttttattttttttgtagagacagggtctcactgtgttgcccaggctggtcttgaactcttggcctcaagcgatcctccttcctcatccttctaaagtgctgggattacaggtgtgagccacagcactcggcctaaataggtttttcttgctatgttattttcagtgctttgcccttgaattcttttcctctcttaaattcatatcatttggccgagtcagcacgtagtttgcattccagcgtctgctgttgattccactgaaacctctgttctcatgaaggagaggatttggctcgctgtggtttctcgtactttcacatctctgtagatacaggggcaaaagtcattgctgacagagccctatctatgtcctggaagtgtgtgtttcttgctttgaatgcatgtgtgaagattataaaagccgtattgtgtgaaaagacccccggggtgttccac

SEQ ID NO: 16202 - DNA, 1620 bp, Homo sapiens
tacccgccccccgtccgggacgcgacaataataaccaagtgggaaaaacagaagtaaaggttgataaggaaaaagctatatgagggtggaggagggcagagttgacacctgaggagaggaacctgcagccgggctcctctcaggctgtaggggaaacaagtttaacaggacttagccctgaaggaacaacagttgctgaaatgggcggcggagggagaccatatgggttcgtctgcagaatagggaggtacggcgcagggcaggactacaaatggagtgacactacgggaccggattattggcgagttgccccgctttagatcctcagcggttggacgagtttaattagaatactaagtaggtccgcccagaagctttcaccctgccctctgaccctagggcccagcccgaggaggcactcagggttaggaggtctgggcgagaagcaactagggccctcatcacttcgccgccgaatccccggcgccgcccagcggggcagagccaggccagggccgcccgcccaacctggtccgctgcctcttcggccatggaagctgccggcagccctgcggctacggagacaggcaagtatatcgcgtcaacacagcgacctgacgggacctggcgcaagcagcggagggtgaaagaaggatatgtgccccaggaggaggtcccagtatatgaaaacaagtatgtgaagtttttcaagagtaaaccagagttgcccccagggctaagccctgaggccactgctcctgtcaccccatccaggcctgaaggtggtgaaccaggcctctccaagacagccaaacgtaacctgaagcgaaaggagaagaggcggcagcagcaagagaaaggagaggcagaggccttgagcaggactcttgataaggtgtccctggaagagacagcccaactccccagtgctccacagggctctcgggcagcccccacagctgcatctgaccagcctgactcagctgccaccactgagaaagccaagaagataaagaacctaaagaagaaactccggcaggtggaagagctgcagcagcggatccaggctggggaagtcagccagcccagcaaagagcagctagaaaagctagcaaggaggagggcgctagaagaggagttagaggacttggagttaggcctctgaggcctttggggaatagggaatggactgcagaacaaaccgtggggctctctggggtctgggggaatacgggcaacagcagtcaggaggggtaccccccatactggcttccacctcctgcggcccagctctgtcctccagagcctagcgtctccctcaatccttcccttttcttcccaacttctactttttggactttccccctcccattcccagtgttcaaaatctcagtgactaccccaggtacctttgctgctgatttgggtgtcttgtttaaaagaaaatcaggtgggtgggaatctcttggagaactgaggctgagggtagagggagtatgcccaagtcttggagtcttggttcctgttcgcggtgtttatgggttatttccctctccatccctcattttttttttttttttaaaaaaagcaaaaatgagaataaacacaagtagacatgtc

SEQ ID NO: 16203 - DNA, 2392 bp, Homo sapiens
  misc_feature (12)..(12): n is a, c, g, or t
  misc_feature (185)..(185): n is a, c, g, or t
  misc_feature (233)..(233): n is a, c, g, or t
  misc_feature (280)..(280): n is a, c, g, or t
gagacggggtcncactctgtcgtccaagctggagtgcagtggagcgatcttggctcactgcaacctccgcctcccagattcaagaaattctctgcctcagcctcccgagtagctgagattacaggcacccgccaccacgcccggctaatttttttgtatttttagtagagacggggtttcgccancttggccaggttggtcttgaactccggacctcgtgatccacccgcctnggcctcccaaagtgctgggattacaggcgtgagcaaccgcgcctggnttttgttttgttttttaaatgggacatgctgcctagtgttggaggtagtcaccaatacttacctcctgcctcctccctggttccaggggtactgctggacattaaactaagccaaagtggggatataagcaggaaggtaaaagggttgataaggaaaaagctatatgagggtggaggagggcagagttgacacctgaggagaggaacctgcagccgggctcctctcaggctgtaggggaaacaagtttaacaggacttagccctgaaggaacaacagttgctgaaatgggcggcggagggagaccatatgggttcgtctgcagaatagggaggtacggcgcagggcaggactacaaatggagtgacactacgggaccggattattggcgagttgccccgctttagatcctcagcggttggacgagtttaattagaatactaagtaggtccgcccagaagctttcaccctgccctctgaccctagggcccagcccgaggaggcactcagggttaggaggtctgggcgagaagcaactagggccctcatcacttcgccgccgaatccccggcgccgcccagcggggcagagccaggccagggccgcccgcccaacctggtccgctgcctcttcggccatggaagctgccggcagccctgcggctacggagacaggtgaccgacccgcggcgccctccgccttgcacgcccctcccgcgggtctctggtggttgagtgggttggccgacagcaatcggcacacgaattcgacctccccaccttcttagggttagatagggtctccaaccgtccctagaaacacttgtgcgccccagtgcgttcctggagtttgtctgctccacgtcaccaagccgctctgagatctgggtgcaggccagagcctggatattcttcctttcttcatttataaggccccctttttgggtgcaggtgggccttgcgcccttttccctcgcaggtcctggacgtacgaggagttcctggggatgagagggactgtgcctcggaacttctcttggctccctgaggactgttttacaggcagcaagcgctcagtaatggcaagtatatcgcgtcaacacagcgacctgacgggacctggcgcaagcagcggagggtgaaagaaggatatgtgccccaggaggaggtcccagtatatgaaaacaagtatgtgaagtttttcaagagtaaaccagagttgcccccagggctaagccctgaggccactgctcctgtcaccccatccaggcctgaaggtggtgaaccaggcctctccaagacagccaaacgtaacctgaagcgaaaggagaagaggcggcagcagcaagagaaaggagaggcagaggccttgagcaggactcttgataaggtgtccctggaagagacagcccaactccccagtgctccacagggctctcgggcagcccccacagctgcatctgaccagcctgactcagctgccaccactgagaaagccaagaagataaagaacctaaagaagaaactccggcaggtggaagagctgcagcagcggatccaggctggggaagtcagccagcccagcaaagagcagctagaaaagctagcaaggaggagggcgctagaagaggagttagaggacttggagttaggcctctgaggcctttggggaatagggaatggactgcagaacaaaccgtggggctctctggggtctgggggaatacgggcaacagcagtcaggaggggtaccccccatactggcttccacctcctgcggcccagctctgtcctccagagcctagcgtctccctcaatccttcccttttcttcccaacttctactttttggactttccccctcccattcccagtgttcaaaatctcagtgactaccccaggtacctttgctgctgatttgggtgtcttgtttaaaagaaaatcaggtgggtgggaatctcttggagaactgaggctgagggtagagggagtatgcccaagtcttggagtcttggttcctgttcgcggtgtttatgggttatttccctctccatccctcattttttttttttttttaaaaaaagcaaaaatgagaataaacacaagtagacatgtc

SEQ ID NO: 16204 - DNA, 2027 bp, Homo sapiens
tacccgccccccgtccgggacgcgacaataataaccaagtgggaaaaacagaagtaaaggttgataaggaaaaagctatatgagggtggaggagggcagagttgacacctgaggagaggaacctgcagccgggctcctctcaggctgtaggggaaacaagtttaacaggacttagccctgaaggaacaacagttgctgaaatgggcggcggagggagaccatatgggttcgtctgcagaatagggaggtacggcgcagggcaggactacaaatggagtgacactacgggaccggattattggcgagttgccccgctttagatcctcagcggttggacgagtttaattagaatactaagtaggtccgcccagaagctttcaccctgccctctgaccctagggcccagcccgaggaggcactcagggttaggaggtctgggcgagaagcaactagggccctcatcacttcgccgccgaatccccggcgccgcccagcggggcagagccaggccagggccgcccgcccaacctggtccgctgcctcttcggccatggaagctgccggcagccctgcggctacggagacaggtgaccgacccgcggcgccctccgccttgcacgcccctcccgcgggtctctggtggttgagtgggttggccgacagcaatcggcacacgaattcgacctccccaccttcttagggttagatagggtctccaaccgtccctagaaacacttgtgcgccccagtgcgttcctggagtttgtctgctccacgtcaccaagccgctctgagatctgggtgcaggccagagcctggatattcttcctttcttcatttataaggccccctttttgggtgcaggtgggccttgcgcccttttccctcgcaggtcctggacgtacgaggagttcctggggatgagagggactgtgcctcggaacttctcttggctccctgaggactgttttacaggcagcaagcgctcagtaatggcaagtatatcgcgtcaacacagcgacctgacgggacctggcgcaagcagcggagggtgaaagaaggatatgtgccccaggaggaggtcccagtatatgaaaacaagtatgtgaagtttttcaagagtaaaccagagttgcccccagggctaagccctgaggccactgctcctgtcaccccatccaggcctgaaggtggtgaaccaggcctctccaagacagccaaacgtaacctgaagcgaaaggagaagaggcggcagcagcaagagaaaggagaggcagaggccttgagcaggactcttgataaggtgtccctggaagagacagcccaactccccagtgctccacagggctctcgggcagcccccacagctgcatctgaccagcctgactcagctgccaccactgagaaagccaagaagataaagaacctaaagaagaaactccggcaggtggaagagctgcagcagcggatccaggctggggaagtcagccagcccagcaaagagcagctagaaaagctagcaaggaggagggcgctagaagaggagttagaggacttggagttaggcctctgaggcctttggggaatagggaatggactgcagaacaaaccgtggggctctctggggtctgggggaatacgggcaacagcagtcaggaggggtaccccccatactggcttccacctcctgcggcccagctctgtcctccagagcctagcgtctccctcaatccttcccttttcttcccaacttctactttttggactttccccctcccattcccagtgttcaaaatctcagtgactaccccaggtacctttgctgctgatttgggtgtcttgtttaaaagaaaatcaggtgggtgggaatctcttggagaactgaggctgagggtagagggagtatgcccaagtcttggagtcttggttcctgttcgcggtgtttatgggttatttccctctccatccctcattttttttttttttttaaaaaaagcaaaaatgagaataaacacaagtagacatgtc

SEQ ID NO: 16205 - DNA, 1812 bp, Homo sapiens
tacccgccccccgtccgggacgcgacaataataaccaagtgggaaaaacagaagtaaaggttgataaggaaaaagctatatgagggtggaggagggcagagttgacacctgaggagaggaacctgcagccgggctcctctcaggctgtaggggaaacaagtttaacaggacttagccctgaaggaacaacagttgctgaaatgggcggcggagggagaccatatgggttcgtctgcagaatagggaggtacggcgcagggcaggactacaaatggagtgacactacgggaccggattattggcgagttgccccgctttagatcctcagcggttggacgagtttaattagaatactaagtaggtccgcccagaagctttcaccctgccctctgaccctagggcccagcccgaggaggcactcagggttaggaggtctgggcgagaagcaactagggccctcatcacttcgccgccgaatccccggcgccgcccagcggggcagagccaggccagggccgcccgcccaacctggtccgctgcctcttcggccatggaagctgccggcagccctgcggctacggagacagcttctccactcttcctcctcctccacctccgcccatgaaatggtgcactctccctttaagactaagatggtggcttgctacgatcgggactccacttccggtggggaggggggcgggaccccagcccgctcacgccggaagtggtttgcgttttcaagatggcgactccctatgttactgacgagaccggcggcaagtatatcgcgtcaacacagcgacctgacgggacctggcgcaagcagcggagggtgaaagaaggatatgtgccccaggaggaggtcccagtatatgaaaacaagtatgtgaagtttttcaagagtaaaccagagttgcccccagggctaagccctgaggccactgctcctgtcaccccatccaggcctgaaggtggtgaaccaggcctctccaagacagccaaacgtaacctgaagcgaaaggagaagaggcggcagcagcaagagaaaggagaggcagaggccttgagcaggactcttgataaggtgtccctggaagagacagcccaactccccagtgctccacagggctctcgggcagcccccacagctgcatctgaccagcctgactcagctgccaccactgagaaagccaagaagataaagaacctaaagaagaaactccggcaggtggaagagctgcagcagcggatccaggctggggaagtcagccagcccagcaaagagcagctagaaaagctagcaaggaggagggcgctagaagaggagttagaggacttggagttaggcctctgaggcctttggggaatagggaatggactgcagaacaaaccgtggggctctctggggtctgggggaatacgggcaacagcagtcaggaggggtaccccccatactggcttccacctcctgcggcccagctctgtcctccagagcctagcgtctccctcaatccttcccttttcttcccaacttctactttttggactttccccctcccattcccagtgttcaaaatctcagtgactaccccaggtacctttgctgctgatttgggtgtcttgtttaaaagaaaatcaggtgggtgggaatctcttggagaactgaggctgagggtagagggagtatgcccaagtcttggagtcttggttcctgttcgcggtgtttatgggttatttccctctccatccctcattttttttttttttttaaaaaaagcaaaaatgagaataaacacaagtagacatgtc

SEQ ID NO: 16206 - DNA, 1711 bp, Homo sapiens
tacccgccccccgtccgggacgcgacaataataaccaagtgggaaaaacagaagtaaaggttgataaggaaaaagctatatgagggtggaggagggcagagttgacacctgaggagaggaacctgcagccgggctcctctcaggctgtaggggaaacaagtttaacaggacttagccctgaaggaacaacagttgctgaaatgggcggcggagggagaccatatgggttcgtctgcagaatagggaggtacggcgcagggcaggactacaaatggagtgacactacgggaccggattattggcgagttgccccgctttagatcctcagcggttggacgagtttaattagaatactaagtaggtccgcccagaagctttcaccctgccctctgaccctagggcccagcccgaggaggcactcagggttaggaggtctgggcgagaagcaactagggccctcatcacttcgccgccgaatccccggcgccgcccagcggggcagagccaggccagggccgcccgcccaacctggtccgctgcctcttcggccatggaagctgccggcagccctgcggctacggagacaggggtgggaaccgccaaacctctcccttctttttgacttcacccttggataccatcaaggccagaggatggaaccaagataacataaaataggcaagtatatcgcgtcaacacagcgacctgacgggacctggcgcaagcagcggagggtgaaagaaggatatgtgccccaggaggaggtcccagtatatgaaaacaagtatgtgaagtttttcaagagtaaaccagagttgcccccagggctaagccctgaggccactgctcctgtcaccccatccaggcctgaaggtggtgaaccaggcctctccaagacagccaaacgtaacctgaagcgaaaggagaagaggcggcagcagcaagagaaaggagaggcagaggccttgagcaggactcttgataaggtgtccctggaagagacagcccaactccccagtgctccacagggctctcgggcagcccccacagctgcatctgaccagcctgactcagctgccaccactgagaaagccaagaagataaagaacctaaagaagaaactccggcaggtggaagagctgcagcagcggatccaggctggggaagtcagccagcccagcaaagagcagctagaaaagctagcaaggaggagggcgctagaagaggagttagaggacttggagttaggcctctgaggcctttggggaatagggaatggactgcagaacaaaccgtggggctctctggggtctgggggaatacgggcaacagcagtcaggaggggtaccccccatactggcttccacctcctgcggcccagctctgtcctccagagcctagcgtctccctcaatccttcccttttcttcccaacttctactttttggactttccccctcccattcccagtgttcaaaatctcagtgactaccccaggtacctttgctgctgatttgggtgtcttgtttaaaagaaaatcaggtgggtgggaatctcttggagaactgaggctgagggtagagggagtatgcccaagtcttggagtcttggttcctgttcgcggtgtttatgggttatttccctctccatccctcattttttttttttttttaaaaaaagcaaaaatgagaataaacacaagtagacatgtc

SEQ ID NO: 16207 - DNA, 1903 bp, Homo sapiens
tacccgccccccgtccgggacgcgacaataataaccaagtgggaaaaacagaagtaaaggttgataaggaaaaagctatatgagggtggaggagggcagagttgacacctgaggagaggaacctgcagccgggctcctctcaggctgtaggggaaacaagtttaacaggacttagccctgaaggaacaacagttgctgaaatgggcggcggagggagaccatatgggttcgtctgcagaatagggaggtacggcgcagggcaggactacaaatggagtgacactacgggaccggattattggcgagttgccccgctttagatcctcagcggttggacgagtttaattagaatactaagtaggtccgcccagaagctttcaccctgccctctgaccctagggcccagcccgaggaggcactcagggttaggaggtctgggcgagaagcaactagggccctcatcacttcgccgccgaatccccggcgccgcccagcggggcagagccaggccagggccgcccgcccaacctggtccgctgcctcttcggccatggaagctgccggcagccctgcggctacggagacagcttctccactcttcctcctcctccacctccgcccatgaaatggtgcactctccctttaagactaagatggtggcttgctacgatcgggactccacttccggtggggaggggggcgggaccccagcccgctcacgccggaagtggtttgcgttttcaagatggcgactccctatgttactgacgagaccggcggggtgggaaccgccaaacctctcccttctttttgacttcacccttggataccatcaaggccagaggatggaaccaagataacataaaataggcaagtatatcgcgtcaacacagcgacctgacgggacctggcgcaagcagcggagggtgaaagaaggatatgtgccccaggaggaggtcccagtatatgaaaacaagtatgtgaagtttttcaagagtaaaccagagttgcccccagggctaagccctgaggccactgctcctgtcaccccatccaggcctgaaggtggtgaaccaggcctctccaagacagccaaacgtaacctgaagcgaaaggagaagaggcggcagcagcaagagaaaggagaggcagaggccttgagcaggactcttgataaggtgtccctggaagagacagcccaactccccagtgctccacagggctctcgggcagcccccacagctgcatctgaccagcctgactcagctgccaccactgagaaagccaagaagataaagaacctaaagaagaaactccggcaggtggaagagctgcagcagcggatccaggctggggaagtcagccagcccagcaaagagcagctagaaaagctagcaaggaggagggcgctagaagaggagttagaggacttggagttaggcctctgaggcctttggggaatagggaatggactgcagaacaaaccgtggggctctctggggtctgggggaatacgggcaacagcagtcaggaggggtaccccccatactggcttccacctcctgcggcccagctctgtcctccagagcctagcgtctccctcaatccttcccttttcttcccaacttctactttttggactttccccctcccattcccagtgttcaaaatctcagtgactaccccaggtacctttgctgctgatttgggtgtcttgtttaaaagaaaatcaggtgggtgggaatctcttggagaactgaggctgagggtagagggagtatgcccaagtcttggagtcttggttcctgttcgcggtgtttatgggttatttccctctccatccctcattttttttttttttttaaaaaaagcaaaaatgagaataaacacaagtagacatgtc

SEQ ID NO: 16208 - DNA, 1691 bp, Homo sapiens
tacccgccccccgtccgggacgcgacaataataaccaagtgggaaaaacagaagtaaaggttgataaggaaaaagctatatgagggtggaggagggcagagttgacacctgaggagaggaacctgcagccgggctcctctcaggctgtaggggaaacaagtttaacaggacttagccctgaaggaacaacagttgctgaaatgggcggcggagggagaccatatgggttcgtctgcagaatagggaggtacggcgcagggcaggactacaaatggagtgacactacgggaccggattattggcgagttgccccgctttagatcctcagcggttggacgagtttaattagaatactaagtaggtccgcccagaagctttcaccctgccctctgaccctagggcccagcccgaggaggcactcagggttaggaggtctgggcgagaagcaactagggccctcatcacttcgccgccgaatccccggcgccgcccagcggggcagagccaggccagggccgcccgcccaacctggtccgctgcctcttcggccatggaagctgccggcagccctgcggctacggagacaggcaagtatatcgcgtcaacacagcgacctgacgggacctggcgcaagcagcggagggtgaaagaaggatatgtgccccaggaggaggtcccagtatatgaaaacaagtatgtgaagtttttcaagagtaaaccagagttgcccccagggctaagccctgaggccactgctcctgtcaccccatccaggcctgaaggtggtgaaccaggcctctccaagacagccaaacgtaacctgaagcgaaaggagaagaggcggcagcagcaagagaaaggagaggcagaggccttgagcaggactcttgataaggtgtccctggaagagacagcccaactccccagtgctccacagggctctcgggcagcccccacagctgcatctgaccagcctgactcagctgccaccactgagaaagccaagaagataaagaacctaaagaagaaactccggcaggtggaagagctgcagcagcggatccaggctggggaagtcagccagcccagcaaagagcagctagaaaagctagcaaggaggagggcgctagaagaggagttagaggacttggagttaggcctctgaggcctttggggaatagggaatggactgcagaacaaaccgtggggctctctggggtctgggggaatacgggcaacagcagtcaggaggggtaccccccatactggcttccacctcctgcggcccagctctgtcctccagagcctagcgtctccctcaatccttcccttttcttcccaacttctactttttggactttccccctcccattcccagtgttcaaaatctcagtgactaccccaggtacctttgctgctgatttgggtgtcttgtttaaaagaaaatcaggtgggtgggaatctcttggagaactgaggctgagggtagagggagtatgcccaagtcttggagtcttggttcctgttcgcggtgtttatgggttatttccctctccatccctcattttttttttttttttttttttttttttttttttttttttttttttttatttttttttatcccacaggggggggcacgtgtgtcacaaatttttttacacccacaaaaatttttctgcaaaaaaaaa

SEQ ID NO: 16209 - DNA, 1402 bp, Homo sapiens
tacccgccccccgtccgggacgcgacaataataaccaagtgggaaaaacagaagtaaaggttgataaggaaaaagctatatgagggtggaggagggcagagttgacacctgaggagaggaacctgcagccgggctcctctcaggctgtaggggaaacaagtttaacaggacttagccctgaaggaacaacagttgctgaaatgggcggcggagggagaccatatgggttcgtctgcagaatagggaggtacggcgcagggcaggactacaaatggagtgacactacgggaccggattattggcgagttgccccgctttagatcctcagcggttggacgagtttaattagaatactaagtaggtccgcccagaagctttcaccctgccctctgaccctagggcccagcccgaggaggcactcagggttaggaggtctgggcgagaagcaactagggccctcatcacttcgccgccgaatccccggcgccgcccagcggggcagagccaggccagggccgcccgcccaacctggtccgctgcctcttcggccatggaagctgccggcagccctgcggctacggagacagcttctccactcttcctcctcctccacctccgcccatgaaatggtgcactctccctttaagactaagatggtggcttgctacgatcgggactccacttccggtggggaggggggcgggaccccagcccgctcacgccggaagtggtttgcgttttcaagatggcgactccctatgttactgacgagaccggcggggtgggaaccgccaaacctctcccttctttttgacttcacccttggataccatcaaggccagaggatggaaccaagataacataaaataggtgctcctttgtgataatgggctatttgtatctctgagggcttccacacaggatggccattcaagaagcttctgctctgcctttcattacagtctatctttagtcctcctaaaccttcagctataatctctatgcaatcaacttaaatatatgtttgtagtattgtccctttctcccaaattccatgtaaaacacttgcctgaattgaattgtttccacaaagttgttttcccctgtggactttgtttatatcagtagtttttattttcccaattttccaaattcaagagtgataattataaatagttgtgttcttgtttgttatctttctcactagaatgtatactctaagaaggcaagaaccttgcttgctttattcattgttgtattcctagcttctgttacagtgtctggcacaagagtaagtgctcaataaaaatttaaaatccacgtgtgaataaatgtgattaccatgtgccctaccgtatattgagaaaaataagaatacatgtgaaaagcacgagattaaaaa

SEQ ID NO: 16210 - DNA, 1210 bp, Homo sapiens
tacccgccccccgtccgggacgcgacaataataaccaagtgggaaaaacagaagtaaaggttgataaggaaaaagctatatgagggtggaggagggcagagttgacacctgaggagaggaacctgcagccgggctcctctcaggctgtaggggaaacaagtttaacaggacttagccctgaaggaacaacagttgctgaaatgggcggcggagggagaccatatgggttcgtctgcagaatagggaggtacggcgcagggcaggactacaaatggagtgacactacgggaccggattattggcgagttgccccgctttagatcctcagcggttggacgagtttaattagaatactaagtaggtccgcccagaagctttcaccctgccctctgaccctagggcccagcccgaggaggcactcagggttaggaggtctgggcgagaagcaactagggccctcatcacttcgccgccgaatccccggcgccgcccagcggggcagagccaggccagggccgcccgcccaacctggtccgctgcctcttcggccatggaagctgccggcagccctgcggctacggagacaggggtgggaaccgccaaacctctcccttctttttgacttcacccttggataccatcaaggccagaggatggaaccaagataacataaaataggtgctcctttgtgataatgggctatttgtatctctgagggcttccacacaggatggccattcaagaagcttctgctctgcctttcattacagtctatctttagtcctcctaaaccttcagctataatctctatgcaatcaacttaaatatatgtttgtagtattgtccctttctcccaaattccatgtaaaacacttgcctgaattgaattgtttccacaaagttgttttcccctgtggactttgtttatatcagtagtttttattttcccaattttccaaattcaagagtgataattataaatagttgtgttcttgtttgttatctttctcactagaatgtatactctaagaaggcaagaaccttgcttgctttattcattgttgtattcctagcttctgttacagtgtctggcacaagagtaagtgctcaataaaaatttaaaatccacgtgtgaataaatgtgattaccatgtgccctaccgtatattgagaaaaataagaatacatgtgaaaagcacgagattaaaaa

SEQ ID NO: 16211 - DNA, 750 bp, Homo sapiens
acagtgcctcgggctttcctggaggcgggcggcgggatgctgctccgttctccgggtcctctcctccggttcttgtcgtttggtcacgccctcagttcagtcggttattggaaaacgatcaaggcccaaagatggtttacgtggcgttgtggatgttatcaccgttgtttggtgaccgagcctggagcttgagccctgggacgtcttgccagccgcatgtggtcccgtgcccacttctcgcggtggcgcgttaatccacctagactgtgcattggtccagtctgggttgaccccgacccgaagtggccctttccttcgcgtcctgaacttcgcttctccgtcggtgtctggtctcttcccgccggcgggctctgcggtggcgggaggagctgtactactcgtgccttagcgcacccttactttcccaggccagaaacgcgaaatgctgtcggccttccagaggctgttccgagtcttatttgtgattgaaacagtctcagaatacggagtcctgatcttcatttatggatggccctttctccagacccttgcgatgctcctgatcgggacagtgtctttccacctttggatccgcagaaatcgagagagaaactcaaggagcggaaagactagatgccgatccaaaaggtgaccagccaccaagtaaagcactgatggtttcagaatgtgcctaaacctgcaccagtgaggcaagtatgcaaaaggagtccctttccgggatggacacac

SEQ ID NO: 16212 - DNA, 533 bp, Homo sapiens
cagaggccagctttccccagagtgaacttacagcatttctgtctgttgctggaaccaacactctgaaaaaataaagatattctgctgctcctgagtaattccccacattcatactgggaattttgcatatgtgtagaatgtatctaaatactcctgcctaaaaccatgcttgtccgccaggtagtcaaagagcatcctaccatccctggttgaccgcatttgccttgtcgtttctggatcttcaaacattttcacaattagttctgtttctgcctgaagctgtttcagttgtgcaacaactgtggttctattctctttcaaagcatgaggaatatcatcagaataaaggtttttgtatgcatccatagcaaagtctaccatgttggcatcactaagaaggtccaatttaccttgtaataattccttttctttatatatctcctttacagagagaaactcaaggagcggaaagactagatgccgatccaaaaggtgcgtgatgcgagtagttaagtcgtaccccgccatcttac

SEQ ID NO: 16213 - DNA, 955 bp, Homo sapiens
aggatcaacctgtcgtctgctgcgtgcccatcaacgtaagttgagagctagtggcgcatactgtgaactcctagcgcactggtccatggtcttgactacctgcttgtgttctcgatccacctaattacttcgcccgggggcgtcgaccagtctagaatgtgtctagatccagtcctggatgtgcaccagtagcactcctatgagacctgacttctacaccggtaacctgcagaactatcgacctatctaccgctccgtgcttctgggtctcttcccgccggcgggctctgcggtggcgggaggagctgtactactcgtgccttagcgcacccttactttcccaggccagaaacgcgaaatgctgtcggccttccagaggctgttccgagtcttatttgtgattgaaacagtctcagaatacggagtcctgatcttcatttatggatggccctttctccagacccttgcgatgctcctgatcgggacagtgtctttccacctttggatccgcagaaatcgagagagaaactcaaggagcggaaagactagatgccgatccaaaaggtcgggagcagagcatggacattgggaacgagtgctctcagcaagaaccgtggtggaccctgcctcaaaactttcattgcaccaatggctgtttcccctgggaagaggacaggaaggaactcatcttccggcatgtacacatacctttgctgatttaggtggccagaccaaccttattcgctggagtggttcccgctacggccaatcgtgtctggttcgcccccagccagcgcggcctgccctttgtgttgtgggccgcgccacatcaagccggcggagaggagggtgtgacgctttcacgcgtcgcccctttgcccacggcgcgtttcccagaagagtgtgttccccccccagggggcgttctctaccccggaggtaagcgaggccccga

SEQ ID NO: 16214 - DNA, 1742 bp, Homo sapiens
aaaaaaaatttttttagagatgggggacttgctgtgttgaccaggctggcctggaactcctggtctcaagcagccctcctgactcagcttcccaaagtgttgagattgcacatgtgaggcactgtgcctgcctgggtatctatatcttctaaatggggagtagcaggaaagggacagaacaaaaggtgggagaattgggagaataaccagtaaaaagcatgttacagaagccaaggaaagggtgtttttattttttattttttttatttttattttttgagacagtctcactctgttacccaggctggaatgcagtggcgtgatctcacctcactgcaacctctgcctcctgggttcaagcgattctcctgcctcagcctcccaagtaactaggattacaggcactcaccaccacacctggctgattttttgtgtttttagtagagagcaccttgggaggctgaggcgggtagatcacgaggtcaggagttcaagaccagcctggccaacatggcgaaacctcgtctctactaaatatacaaaataaattctctgggcatggtggcacacacctgtaatcccagctattcaggacgccaagtcatgagaatcatttgaacccaggaggcataggctgcaatgagccaagattatgccgctgcactccagcctgggcgacagagcaagactctgttctcaaaaagaaaaacaaaaaacatagtgagaagagatggtttggattaattatgtttataggcctagaggcagaaagccccttttatgctttcaaggcacattgtatttaatgttactgtgggaaggtattactaatcattttctcttgcctgtaccaagtaccccttaggtaagtgatattgtagatcctaactagaaaatcttttataggagggcaacaaatggatgccacaagttagtaaagtaaaacatacccactgataatccacatttttgaaaagagagaatggatttgtccaaagtattgggttcgttactatacaaatttctgtggaaatatagttaaatcattcaagataaattattcatatcattaaacaagcttgtataaatgttatctacatgatattctttttaatatgtttcttcttcagaagcctaaagaaactgttccaactcttgctccaaaaactctttcagtagcagcagcttttaatgaagatgaagatgtaagttgatatcgagttttgtttttttactttaaccagttatttaaggaaggtattagtggcaaattataggttataatagtattagtgaattttctttataatagtttttgtgtctgtgtgtgacatccataaaaactggatactctatttttgcattttatttggttgtaagattattttagagtattgttgactttggggacaagaagcttaaggatgaaatcagcaaatgtttattatgagtagtttgtgctaggaagtatgtaggatccaaaaaaagaaaaatctaatactgttgccttaataatttttatagttggggtcttcagtaatgatacattatgcatgcattcaattttaaaaagccaactattggctaggcgcggtgtctcatgcctgtaagcctagctctttgggaggctgaggcaggtggatcacttgaggtcagcggttcaagaccagcctggccaatatggtgaaaccccatctctactaaaaatacaaaaattagacaggcgtggtggcacaggccta

SEQ ID NO: 16215 - DNA, 691 bp, Homo sapiens
cgtgaccggctaacggaattaagtcgggccccataggggaacccggcacgatccacccccttggagccagagaaacctgggtccaagaaaccgcaaaggaccaaggcgccacttcagcacccgctgtcgtatgacgccccccgaacagatgaccgccccgaagttactgggtcttgtcttcatgatggtatataaactatttattaacagacaaggcctacagacttatttcttcttggacacacccacggtgcggccacggcggccagtggtcttggtgtgctggcctcggacacgaaggccccagaagtgacgcagccctctatgggcccgaatcttcttcagtcgctccaggtcttcacggagcttgttgtccagaccattggctaggacctggctgtattttccatcctttacatccttctgtctgttcaagaaccagtctgggatcttgtactggcgtggattctgcataatggtgatcacacgttccacctcatcatcagtgagttctcccgccctcttggtgaggtcaatgtctgctttcctcaacaccacatgagcatatcttcggcccacacccttcaatggcagtgatggcaaaggctattttccgccgcccatcgatgttggtgttgagtactcgcaaaatatgctggaacttttcagggatcactagagacatggctgc

SEQ ID NO: 16216 - DNA, 523 bp, Homo sapiens
gcagccgcctactactactaaattggcggccgcgtcgacgttggtaataactccagagaagcagcctgtgtatattcctaacactttgttcactagcatttaagtttagaataagcccaagtaagacaatggaaatgtatatagaactcttagttcttacatgatttaattatatcgatacatgaatttaacttactttaatgtaggcaaactatcaattttttgtccattttcctgtttgttaaaataacatacctctcctacgtattattttcttgacccaaatgaaatattaacctaaggtcaagctgggagagagaaatgactgagatgaatgtctttactaaagtaccaataaatttgtcaaactcaaaaaaaaaaaaaaagtcgacgcggccgggatttagtggtagtagtcgtcccgtgaattctgaccggttccgttggtgtaccgtcttcccttgatgaggcgtttggtgctgtgcgtatcttgtcagatcgtgtcctgggtttttgttttcct

SEQ ID NO: 16217 - DNA, 2282 bp, Homo sapiens
  misc_feature (24)..(24): n is a, c, g, or t
ggacgcgtgggtcgacccacgcgntcggacccacgcgtgcggggaggccgcggcggggaaaatggcggacgggaaggcgggagacgagaagcctgaaaagtcgcagcgagctggagccgccggaggacctgaagaagaagcagaaaaacctgtgaaaactaagactgtttcttccagtaatggaggggaaagttccagtcgcagcgctgagaagcgatcagctgaagaagaagctgccgacctcccaacaaagcctacaaagatctccaagtttggatttgccataggtagtcagacgacaaagaaagcatcagccatatccatcaaacttggatcaagtaagcctaaagaaactgttccaactcttgctccaaaaactctttcagtagcagcagcttttaatgaagatgaagatagtgaaccagaggaaatgcctccagaagcaaagatgaggatgaagaatattggaagggatacaccaacatcagctggaccaaactccttcaataaaggaaagcatgggttttctgataaccagaagctgtgggagcgaaatataaaatctcatcttggaaatgtccatgaccaagacaattaaatgatgttttgaaattggggtgtggggtgggtgtaaagttaaaaggaacagtttccttttttaaagaatggtataagactatctttggagccgctttttttttctttttcatttttttaaaagattgagtggtacactaataaatgagagtttgaaattagaggtaatttatgttttatatacagatttcaagacatttgctaattttgtagtttcatgtgattagtttccaaaggttacagataataaagaaatcagaaatggtacctttttaagaattgcatatttttttagacacaactattagcacattaagagggaagcaaagttactgtctatttaaaactgcaagcagttaactctcttaactcccttattacctaaacttgtctggctcccaggaacagccttatagagagagggagtattgtattgggaagaaaatgttactgaactattgactgaaagtaaatttagataaaatacagcttttttccttatgggcatttgttttgtttcaagtcatcataaactaggtattgcattgctatccgtggatacagacgcttagctcttaaaagattttttttttatgtaaactgttgaatatttgaaatagtccacttcaccttaatgggtcttgtctatcttcattagtcttcaaagaaaaaccatttgctaccaaagtaaatcagtattttgaatgtgcttctcttgtttttggtttattagctagttcctgtaagcatttccaccagaacttgaggcaaatcgtaaggaagctgtttcttttaaaacacaaaccaccaccaaaaatttaaatgtacatattgcttaagtatttggctgtttttattttttaaaaggtataaacaccaaaaaaaaaattaacattgtatgaagatggaaaataagaagatgcactttctgtaactttgtctaaggatttaaattactaacttatgaactccaatttgaattgaacttaactatcggctttcttactggtaaaattatatggtttattttaaatgcgtacatattgaccaatggcctctgaaaaagcacattttagatactgaaattgaaggaaagaaaatgcatcttcaaacattttttggaatctcaccacatatactttgttagatttgtgtattgtagggtgtttgttttgtatttttgtattgtatatgaactttttttaaatgtgacagttaaacacatctttaaaagcatagtcacagacaaaagcatacagtataaaaatttccttgaaaactcctacaatattatatttggaggcagcttcagactgttttattggtggtagctgcttgctgaggtcttttagttggtaataactccagagaagcagcctgtgtatattcctaacactttgttcactagcatttaagtttagaataagcccaagtaagacaatggaaatgtatatagaactcttagttcttacatgatttaattatatcgatacatgaatttaacttactttaatgtaggcaaactatcaattttttgtccattttcctgtttgttaaaataacatacctctcctacgtattattttcttgacccaaatgaaatattaacctaaggtcaagctgggagagagaaatgactgagatgaatgtctttactaaagtaccaataaatttgtcaaactcaa

SEQ ID NO: 16218 - DNA, 2211 bp, Homo sapiens
acgtccttggcgtggctgcagggggaggccgcggcggggaaaatggcggacgggaaggcgggagacgagaagcctgaaaagtcgcagcgagctggagccgccggagtaatggaggggaaagttccagtcgcagcgctgagaagcgatcagctgaagaagaagctgccgacctcccaacaaagcctacaaagatctccaagtttggatttgccataggtagtcagacgacaaagaaagcatcagccatatccatcaaacttggatcaagtaagcctaaagaaactgttccaactcttgctccaaaaactctttcagtagcagcagcttttaatgaagatgaagatagtgaaccagaggaaatgcctccagaagcaaagatgaggatgaagaatattggaagggatacaccaacatcagctggaccaaactccttcaataaaggaaagcatgggttttctgataaccagaagctgtgggagcgaaatataaaatctcatcttggaaatgtccatgaccaagacaattaaatgatgttttgaaattggggtgtggggtgggtgtaaagttaaaaggaacagtttccttttttaaagaatggtataagactatctttggagccgctttttttttctttttcatttttttaaaagattgagtggtacactaataaatgagagtttgaaattagaggtaatttatgttttatatacagatttcaagacatttgctaattttgtagtttcatgtgattagtttccaaaggttacagataataaagaaatcagaaatggtacctttttaagaattgcatatttttttagacacaactattagcacattaagagggaagcaaagttactgtctatttaaaactgcaagcagttaactctcttaactcccttattacctaaacttgtctggctcccaggaacagccttatagagagagggagtattgtattgggaagaaaatgttactgaactattgactgaaagtaaatttagataaaatacagcttttttccttatgggcatttgttttgtttcaagtcatcataaactaggtattgcattgctatccgtggatacagacgcttagctcttaaaagattttttttttatgtaaactgttgaatatttgaaatagtccacttcaccttaatgggtcttgtctatcttcattagtcttcaaagaaaaaccatttgctaccaaagtaaatcagtattttgaatgtgcttctcttgtttttggtttattagctagttcctgtaagcatttccaccagaacttgaggcaaatcgtaaggaagctgtttcttttaaaacacaaaccaccaccaaaaatttaaatgtacatattgcttaagtatttggctgtttttattttttaaaaggtataaacaccaaaaaaaaaattaacattgtatgaagatggaaaataagaagatgcactttctgtaactttgtctaaggatttaaattactaacttatgaactccaatttgaattgaacttaactatcggctttcttactggtaaaattatatggtttattttaaatgcgtacatattgaccaatggcctctgaaaaagcacattttagatactgaaattgaaggaaagaaaatgcatcttcaaacattttttggaatctcaccacatatactttgttagatttgtgtattgtagggtgtttgttttgtatttttgtattgtatatgaactttttttaaatgtgacagttaaacacatctttaaaagcatagtcacagacaaaagcatacagtataaaaatttccttgaaaactcctacaatattatatttggaggcagcttcagactgttttattggtggtagctgcttgctgaggtcttttagttggtaataactccagagaagcagcctgtgtatattcctaacactttgttcactagcatttaagtttagaataagcccaagtaagacaatggaaatgtatatagaactcttagttcttacatgatttaattatatcgatacatgaatttaacttactttaatgtaggcaaactatcaattttttgtccattttcctgtttgttaaaataacatacctctcctacgtattattttcttgacccaaatgaaatattaacctaaggtcaagctgggagagagaaatgactgagatgaatgtctttactaaagtaccaataaatttgtcaaactcaa

SEQ ID NO: 16219 - DNA, 2213 bp, Homo sapiens
gagtatcctcacctcctaccccacgggaggccgcggcggggaaaatggcggacgggaaggcgggagacgagaagcctgaaaagtcgcagcgagctggagccgccggagtaatggaggggaaagttccagtcgcagcgctgagaagcgatcagctgaagaagaagctgccgacctcccaacaaagcctacaaagatctccaagtttggatttgccataggtagtcagacgacaaagaaagcatcagccatatccatcaaacttggatcaagtaagcctaaagaaactgttccaactcttgctccaaaaactctttcagtagcagcagcttttaatgaagatgaagatagtgaaccagaggaaatgcctccagaagcaaagatgaggatgaagaatattggaagggatacaccaacatcagctggaccaaactccttcaataaaggaaagcatgggttttctgataaccagaagctgtgggagcgaaatataaaatctcatcttggaaatgtccatgaccaagacaattaaatgatgttttgaaattggggtgtggggtgggtgtaaagttaaaaggaacagtttccttttttaaagaatggtataagactatctttggagccgctttttttttctttttcatttttttaaaagattgagtggtacactaataaatgagagtttgaaattagaggtaatttatgttttatatacagatttcaagacatttgctaattttgtagtttcatgtgattagtttccaaaggttacagataataaagaaatcagaaatggtacctttttaagaattgcatatttttttagacacaactattagcacattaagagggaagcaaagttactgtctatttaaaactgcaagcagttaactctcttaactcccttattacctaaacttgtctggctcccaggaacagccttatagagagagggagtattgtattgggaagaaaatgttactgaactattgactgaaagtaaatttagataaaatacagcttttttccttatgggcatttgttttgtttcaagtcatcataaactaggtattgcattgctatccgtggatacagacgcttagctcttaaaagattttttttttatgtaaactgttgaatatttgaaatagtccacttcaccttaatgggtcttgtctatcttcattagtcttcaaagaaaaaccatttgctaccaaagtaaatcagtattttgaatgtgcttctcttgtttttggtttattagctagttcctgtaagcatttccaccagaacttgaggcaaatcgtaaggaagctgtttcttttaaaacacaaaccaccaccaaaaatttaaatgtacatattgcttaagtatttggctgtttttattttttaaaaggtataaacaccaaaaaaaaaattaacattgtatgaagatggaaaataagaagatgcactttctgtaactttgtctaaggatttaaattactaacttatgaactccaatttgaattgaacttaactatcggctttcttactggtaaaattatatggtttattttaaatgcgtacatattgaccaatggcctctgaaaaagcacattttagatactgaaattgaaggaaagaaaatgcatcttcaaacattttttggaatctcaccacatatactttgttagatttgtgtattgtagggtgtttgttttgtatttttgtattgtatatgaactttttttaaatgtgacagttaaacacatctttaaaagcatagtcacagacaaaagcatacagtataaaaatttccttgaaaactcctacaatattatatttggaggcagcttcagactgttttattggtggtagctgcttgctgaggtcttttagttggtaataactccagagaagcagcctgtgtatattcctaacactttgttcactagcatttaagtttagaataagcccaagtaagacaatggaaatgtatatagaactcttagttcttacatgatttaattatatcgatacatgaatttaacttactttaatgtaggcaaactatcaattttttgtccattttcctgtttgttaaaataacatacctctcctacgtattattttcttgacccaaatgaaatattaacctaaggtcaagctgggagagagaaatgactgagatgaatgtctttactaaagtaccaataaatttgtcaaactcaa

SEQ ID NO: 16220 - DNA, 2367 bp, Homo sapiens
  misc_feature (24)..(24): n is a, c, g, or t
  misc_feature (2298)..(2298): n is a, c, g, or t
ggacgcgtgggtcgacccacgcgntcggacccacgcgtgcggggaggccgcggcggggaaaatggcggacgggaaggcgggagacgagaagcctgaaaagtcgcagcgagctggagccgccggaggacctgaagaagaagcagaaaaacctgtgaaaactaagactgtttcttccagtaatggaggggaaagttccagtcgcagcgctgagaagcgatcagctgaagaagaagctgccgacctcccaacaaagcctacaaagatctccaagtttggatttgccataggtagtcagacgacaaagaaagcatcagccatatccatcaaacttggatcaagtaagcctaaagaaactgttccaactcttgctccaaaaactctttcagtagcagcagcttttaatgaagatgaagatagtgaaccagaggaaatgcctccagaagcaaagatgaggatgaagaatattggaagggatacaccaacatcagctggaccaaactccttcaataaaggaaagcatgggttttctgataaccagaagctgtgggagcgaaatataaaatctcatcttggaaatgtccatgaccaagacaattaaatgatgttttgaaattggggtgtggggtgggtgtaaagttaaaaggaacagtttccttttttaaagaatggtataagactatctttggagccgctttttttttctttttcatttttttaaaagattgagtggtacactaataaatgagagtttgaaattagaggtaatttatgttttatatacagatttcaagacatttgctaattttgtagtttcatgtgattagtttccaaaggttacagataataaagaaatcagaaatggtacctttttaagaattgcatatttttttagacacaactattagcacattaagagggaagcaaagttactgtctatttaaaactgcaagcagttaactctcttaactcccttattacctaaacttgtctggctcccaggaacagccttatagagagagggagtattgtattgggaagaaaatgttactgaactattgactgaaagtaaatttagataaaatacagcttttttccttatgggcatttgttttgtttcaagtcatcataaactaggtattgcattgctatccgtggatacagacgcttagctcttaaaagattttttttttatgtaaactgttgaatatttgaaatagtccacttcaccttaatgggtcttgtctatcttcattagtcttcaaagaaaaaccatttgctaccaaagtaaatcagtattttgaatgtgcttctcttgtttttggtttattagctagttcctgtaagcatttccaccagaacttgaggcaaatcgtaaggaagctgtttcttttaaaacacaaaccaccaccaaaaatttaaatgtacatattgcttaagtatttggctgtttttattttttaaaaggtataaacaccaaaaaaaaaattaacattgtatgaagatggaaaataagaagatgcactttctgtaactttgtctaaggatttaaattactaacttatgaactccaatttgaattgaacttaactatcggctttcttactggtaaaattatatggtttattttaaatgcgtacatattgaccaatggcctctgaaaaagcacattttagatactgaaattgaaggaaagaaaatgcatcttcaaacattttttggaatctcaccacatatactttgttagatttgtgtattgtagggtgtttgttttgtatttttgtattgtatatgaactttttttaaatgtgacagttaaacacatctttaaaagcatagtcacagacaaaagcatacagtataaaaatttccttgaaaactcctacaatattatatttggaggcagcttcagactgttttattggtggtagctgcttgctgaggtcttttagttggtaataactccagagaagcagcctgtgtatattcctaacactttgttcactagcatttaagtttagaataagcccaagtaagacaatggaaatgtatatagaactcttagttcttacatgatttaattatatcgatacatgaatttaacttactttaatgtaggcaaactatcaattttttgtccattttcctgtttgttaaaataacatacctctcctacgtattattttcttgacccaaatgaaatattaacctaaggtcaagctgggagagagaaatgactgagatgaatgtctttactaaagtaccaataaatttgtcaaactcaaaaaaaaaaaaacacancaacaacacaacaacacaacacaaacaacaaacaagacaaaacaaacagacaggacaaacaaacacaaa

SEQ ID NO: 16221 - DNA, 2626 bp, Homo sapiens
  misc_feature (24)..(24): n is a, c, g, or t
ggacgcgtgggtcgacccacgcgntcggacccacgcgtgcggggaggccgcggcggggaaaatggcggacgggaaggcgggagacgagaagcctgaaaagtcgcagcgagctggagccgccggaggtatataaactatttattaacagacaaggcctacagacttatttcttcttggacacacccacggtgcggccacggcggccagtggtcttggtgtgctggcctcggacacgaaggccccagaagtgacgcagccctctatgggcccgaatcttcttcagtcgctccaggtcttcacggagcttgttgtccagaccattggctaggacctggctgtattttccatcctttacatccttctgtctgttcaagaaccagtctgggatcttgtactggcgtggattctgcataatggtgatcacacgttccacctcatcatcagtgagttctcccgccctcttggtgaggacctgaagaagaagcagaaaaacctgtgaaaactaagactgtttcttccagtaatggaggggaaagttccagtcgcagcgctgagaagcgatcagctgaagaagaagctgccgacctcccaacaaagcctacaaagatctccaagtttggatttgccataggtagtcagacgacaaagaaagcatcagccatatccatcaaacttggatcaagtaagcctaaagaaactgttccaactcttgctccaaaaactctttcagtagcagcagcttttaatgaagatgaagatagtgaaccagaggaaatgcctccagaagcaaagatgaggatgaagaatattggaagggatacaccaacatcagctggaccaaactccttcaataaaggaaagcatgggttttctgataaccagaagctgtgggagcgaaatataaaatctcatcttggaaatgtccatgaccaagacaattaaatgatgttttgaaattggggtgtggggtgggtgtaaagttaaaaggaacagtttccttttttaaagaatggtataagactatctttggagccgctttttttttctttttcatttttttaaaagattgagtggtacactaataaatgagagtttgaaattagaggtaatttatgttttatatacagatttcaagacatttgctaattttgtagtttcatgtgattagtttccaaaggttacagataataaagaaatcagaaatggtacctttttaagaattgcatatttttttagacacaactattagcacattaagagggaagcaaagttactgtctatttaaaactgcaagcagttaactctcttaactcccttattacctaaacttgtctggctcccaggaacagccttatagagagagggagtattgtattgggaagaaaatgttactgaactattgactgaaagtaaatttagataaaatacagcttttttccttatgggcatttgttttgtttcaagtcatcataaactaggtattgcattgctatccgtggatacagacgcttagctcttaaaagattttttttttatgtaaactgttgaatatttgaaatagtccacttcaccttaatgggtcttgtctatcttcattagtcttcaaagaaaaaccatttgctaccaaagtaaatcagtattttgaatgtgcttctcttgtttttggtttattagctagttcctgtaagcatttccaccagaacttgaggcaaatcgtaaggaagctgtttcttttaaaacacaaaccaccaccaaaaatttaaatgtacatattgcttaagtatttggctgtttttattttttaaaaggtataaacaccaaaaaaaaaattaacattgtatgaagatggaaaataagaagatgcactttctgtaactttgtctaaggatttaaattactaacttatgaactccaatttgaattgaacttaactatcggctttcttactggtaaaattatatggtttattttaaatgcgtacatattgaccaatggcctctgaaaaagcacattttagatactgaaattgaaggaaagaaaatgcatcttcaaacattttttggaatctcaccacatatactttgttagatttgtgtattgtagggtgtttgttttgtatttttgtattgtatatgaactttttttaaatgtgacagttaaacacatctttaaaagcatagtcacagacaaaagcatacagtataaaaatttccttgaaaactcctacaatattatatttggaggcagcttcagactgttttattggtggtagctgcttgctgaggtcttttagttggtaataactccagagaagcagcctgtgtatattcctaacactttgttcactagcatttaagtttagaataagcccaagtaagacaatggaaatgtatatagaactcttagttcttacatgatttaattatatcgatacatgaatttaacttactttaatgtaggcaaactatcaattttttgtccattttcctgtttgttaaaataacatacctctcctacgtattattttcttgacccaaatgaaatattaacctaaggtcaagctgggagagagaaatgactgagatgaatgtctttactaaagtaccaataaatttgtcaaactcaa

SEQ ID NO: 16222 - DNA, 2483 bp, Homo sapiens
  misc_feature (24)..(24): n is a, c, g, or t
ggacgcgtgggtcgacccacgcgntcggacccacgcgtgcggggaggccgcggcggggaaaatggcggacgggaaggcgggagacgagaagcctgaaaagtcgcagcgagctggagccgccggagttaattcatgggagcctcttctactgccacacaatctcagttcctgctgtatactctaacaaacagtggaagagactgttgggtcagtaggtgacaactgcagaggtatcttccttataacgatgctttttgaggttgctgctcccatcaatctgctcagtaaaaatagctcatcttggtaagttgtttcgacttcaccaggacctgaagaagaagcagaaaaacctgtgaaaactaagactgtttcttccagtaatggaggggaaagttccagtcgcagcgctgagaagcgatcagctgaagaagaagctgccgacctcccaacaaagcctacaaagatctccaagtttggatttgccataggtagtcagacgacaaagaaagcatcagccatatccatcaaacttggatcaagtaagcctaaagaaactgttccaactcttgctccaaaaactctttcagtagcagcagcttttaatgaagatgaagatagtgaaccagaggaaatgcctccagaagcaaagatgaggatgaagaatattggaagggatacaccaacatcagctggaccaaactccttcaataaaggaaagcatgggttttctgataaccagaagctgtgggagcgaaatataaaatctcatcttggaaatgtccatgaccaagacaattaaatgatgttttgaaattggggtgtggggtgggtgtaaagttaaaaggaacagtttccttttttaaagaatggtataagactatctttggagccgctttttttttctttttcatttttttaaaagattgagtggtacactaataaatgagagtttgaaattagaggtaatttatgttttatatacagatttcaagacatttgctaattttgtagtttcatgtgattagtttccaaaggttacagataataaagaaatcagaaatggtacctttttaagaattgcatatttttttagacacaactattagcacattaagagggaagcaaagttactgtctatttaaaactgcaagcagttaactctcttaactcccttattacctaaacttgtctggctcccaggaacagccttatagagagagggagtattgtattgggaagaaaatgttactgaactattgactgaaagtaaatttagataaaatacagcttttttccttatgggcatttgttttgtttcaagtcatcataaactaggtattgcattgctatccgtggatacagacgcttagctcttaaaagattttttttttatgtaaactgttgaatatttgaaatagtccacttcaccttaatgggtcttgtctatcttcattagtcttcaaagaaaaaccatttgctaccaaagtaaatcagtattttgaatgtgcttctcttgtttttggtttattagctagttcctgtaagcatttccaccagaacttgaggcaaatcgtaaggaagctgtttcttttaaaacacaaaccaccaccaaaaatttaaatgtacatattgcttaagtatttggctgtttttattttttaaaaggtataaacaccaaaaaaaaaattaacattgtatgaagatggaaaataagaagatgcactttctgtaactttgtctaaggatttaaattactaacttatgaactccaatttgaattgaacttaactatcggctttcttactggtaaaattatatggtttattttaaatgcgtacatattgaccaatggcctctgaaaaagcacattttagatactgaaattgaaggaaagaaaatgcatcttcaaacattttttggaatctcaccacatatactttgttagatttgtgtattgtagggtgtttgttttgtatttttgtattgtatatgaactttttttaaatgtgacagttaaacacatctttaaaagcatagtcacagacaaaagcatacagtataaaaatttccttgaaaactcctacaatattatatttggaggcagcttcagactgttttattggtggtagctgcttgctgaggtcttttagttggtaataactccagagaagcagcctgtgtatattcctaacactttgttcactagcatttaagtttagaataagcccaagtaagacaatggaaatgtatatagaactcttagttcttacatgatttaattatatcgatacatgaatttaacttactttaatgtaggcaaactatcaattttttgtccattttcctgtttgttaaaataacatacctctcctacgtattattttcttgacccaaatgaaatattaacctaaggtcaagctgggagagagaaatgactgagatgaatgtctttactaaagtaccaataaatttgtcaaactcaa

SEQ ID NO: 16223 - DNA, 2400 bp, Homo sapiens
gtcatcgctgtctggaacagcgatgactcgagagggaggccgcggcggggaaaatggcggacgggaaggcgggagacgagaagcctgaaaagtcgcagcgagctggagccgccggagttaattcatgggagcctcttctactgccacacaatctcagttcctgctgtatactctaacaaacagtggaagagactgttgggtcagtaggtgacaactgcagaggtatcttccttataacgatgctttttgaggttgctgctcccatcaatctgctcagtaaaaatagctcatcttgtaatggaggggaaagttccagtcgcagcgctgagaagcgatcagctgaagaagaagctgccgacctcccaacaaagcctacaaagatctccaagtttggatttgccataggtagtcagacgacaaagaaagcatcagccatatccatcaaacttggatcaagtaagcctaaagaaactgttccaactcttgctccaaaaactctttcagtagcagcagcttttaatgaagatgaagatagtgaaccagaggaaatgcctccagaagcaaagatgaggatgaagaatattggaagggatacaccaacatcagctggaccaaactccttcaataaaggaaagcatgggttttctgataaccagaagctgtgggagcgaaatataaaatctcatcttggaaatgtccatgaccaagacaattaaatgatgttttgaaattggggtgtggggtgggtgtaaagttaaaaggaacagtttccttttttaaagaatggtataagactatctttggagccgctttttttttctttttcatttttttaaaagattgagtggtacactaataaatgagagtttgaaattagaggtaatttatgttttatatacagatttcaagacatttgctaattttgtagtttcatgtgattagtttccaaaggttacagataataaagaaatcagaaatggtacctttttaagaattgcatatttttttagacacaactattagcacattaagagggaagcaaagttactgtctatttaaaactgcaagcagttaactctcttaactcccttattacctaaacttgtctggctcccaggaacagccttatagagagagggagtattgtattgggaagaaaatgttactgaactattgactgaaagtaaatttagataaaatacagcttttttccttatgggcatttgttttgtttcaagtcatcataaactaggtattgcattgctatccgtggatacagacgcttagctcttaaaagattttttttttatgtaaactgttgaatatttgaaatagtccacttcaccttaatgggtcttgtctatcttcattagtcttcaaagaaaaaccatttgctaccaaagtaaatcagtattttgaatgtgcttctcttgtttttggtttattagctagttcctgtaagcatttccaccagaacttgaggcaaatcgtaaggaagctgtttcttttaaaacacaaaccaccaccaaaaatttaaatgtacatattgcttaagtatttggctgtttttattttttaaaaggtataaacaccaaaaaaaaaattaacattgtatgaagatggaaaataagaagatgcactttctgtaactttgtctaaggatttaaattactaacttatgaactccaatttgaattgaacttaactatcggctttcttactggtaaaattatatggtttattttaaatgcgtacatattgaccaatggcctctgaaaaagcacattttagatactgaaattgaaggaaagaaaatgcatcttcaaacattttttggaatctcaccacatatactttgttagatttgtgtattgtagggtgtttgttttgtatttttgtattgtatatgaactttttttaaatgtgacagttaaacacatctttaaaagcatagtcacagacaaaagcatacagtataaaaatttccttgaaaactcctacaatattatatttggaggcagcttcagactgttttattggtggtagctgcttgctgaggtcttttagttggtaataactccagagaagcagcctgtgtatattcctaacactttgttcactagcatttaagtttagaataagcccaagtaagacaatggaaatgtatatagaactcttagttcttacatgatttaattatatcgatacatgaatttaacttactttaatgtaggcaaactatcaattttttgtccattttcctgtttgttaaaataacatacctctcctacgtattattttcttgacccaaatgaaatattaacctaaggtcaagctgggagagagaaatgactgagatgaatgtctttactaaagtaccaataaatttgtcaaactcaa

SEQ ID NO: 16224 - DNA, 2465 bp, Homo sapiens
ttagcgtggtcgcggccgaggtacaaattgtagtgtttagttgaagggtcttgactttttgtgaactctgtgtttataattttaaattgctctgtattttatgctagttaattcatgggagcctcttctactgccacacaatctcagttcctgctgtatactctaacaaacagtggaagagactgttgggtcagtaggtgacaactgcagaggtatcttccttataacgatgctttttgaggttgctgctcccatcaatctgctcagtaaaaatagctcatcttggtaagttgtttcgacttcaccaggacctgaagaagaagcagaaaaacctgtgaaaactaagactgtttcttccagtaatggaggggaaagttccagtcgcagcgctgagaagcgatcagctgaagaagaagctgccgacctcccaacaaagcctacaaagatctccaagtttggatttgccataggtagtcagacgacaaagaaagcatcagccatatccatcaaacttggatcaagtaagcctaaagaaactgttccaactcttgctccaaaaactctttcagtagcagcagcttttaatgaagatgaagatagtgaaccagaggaaatgcctccagaagcaaagatgaggatgaagaatattggaagggatacaccaacatcagctggaccaaactccttcaataaaggaaagcatgggttttctgataaccagaagctgtgggagcgaaatataaaatctcatcttggaaatgtccatgaccaagacaattaaatgatgttttgaaattggggtgtggggtgggtgtaaagttaaaaggaacagtttccttttttaaagaatggtataagactatctttggagccgctttttttttctttttcatttttttaaaagattgagtggtacactaataaatgagagtttgaaattagaggtaatttatgttttatatacagatttcaagacatttgctaattttgtagtttcatgtgattagtttccaaaggttacagataataaagaaatcagaaatggtacctttttaagaattgcatatttttttagacacaactattagcacattaagagggaagcaaagttactgtctatttaaaactgcaagcagttaactctcttaactcccttattacctaaacttgtctggctcccaggaacagccttatagagagagggagtattgtattgggaagaaaatgttactgaactattgactgaaagtaaatttagataaaatacagcttttttccttatgggcatttgttttgtttcaagtcatcataaactaggtattgcattgctatccgtggatacagacgcttagctcttaaaagattttttttttatgtaaactgttgaatatttgaaatagtccacttcaccttaatgggtcttgtctatcttcattagtcttcaaagaaaaaccatttgctaccaaagtaaatcagtattttgaatgtgcttctcttgtttttggtttattagctagttcctgtaagcatttccaccagaacttgaggcaaatcgtaaggaagctgtttcttttaaaacacaaaccaccaccaaaaatttaaatgtacatattgcttaagtatttggctgtttttattttttaaaaggtataaacaccaaaaaaaaaattaacattgtatgaagatggaaaataagaagatgcactttctgtaactttgtctaaggatttaaattactaacttatgaactccaatttgaattgaacttaactatcggctttcttactggtaaaattatatggtttattttaaatgcgtacatattgaccaatggcctctgaaaaagcacattttagatactgaaattgaaggaaagaaaatgcatcttcaaacattttttggaatctcaccacatatactttgttagatttgtgtattgtagggtgtttgttttgtatttttgtattgtatatgaactttttttaaatgtgacagttaaacacatctttaaaagcatagtcacagacaaaagcatacagtataaaaatttccttgaaaactcctacaatattatatttggaggcagcttcagactgttttattggtggtagctgcttgctgaggtcttttagttggtaataactccagagaagcagcctgtgtatattcctaacactttgttcactagcatttaagtttagaataagcccaagtaagacaatggaaatgtatatagaactcttagttcttacatgatttaattatatcgatacatgaatttaacttactttaatgtaggcaaactatcaattttttgtccattttcctgtttgttaaaataacatacctctcctacgtattattttcttgacccaaatgaaatattaacctaaggtcaagctgggagagagaaatgactgagatgaatgtctttactaaagtaccaataaatttgtcaaactcaa

SEQ ID NO: 16225 - DNA, 2084 bp, Homo sapiens
aactgcgaaggctcgggaaacgcacacgagacgccctgccgacctcccaacaaagcctacaaagatctccaagtttggatttgccataggtagtcagacgacaaagaaagcatcagccatatccatcaaacttggatcaagtaagcctaaagaaactgttccaactcttgctccaaaaactctttcagtagcagcagcttttaatgaagatgaagatagtgaaccagaggaaatgcctccagaagcaaagatgaggatgaagaatattggaagggatacaccaacatcagctggaccaaactccttcaataaaggaaagcatgggttttctgataaccagaagctgtgggagcgaaatataaaatctcatcttggaaatgtccatgaccaagacaattaaatgatgttttgaaattggggtgtggggtgggtgtaaagttaaaaggaacagtttccttttttaaagaatggtataagactatctttggagccgctttttttttctttttcatttttttaaaagattgagtggtacactaataaatgagagtttgaaattagaggtaatttatgttttatatacagatttcaagacatttgctaattttgtagtttcatgtgattagtttccaaaggttacagataataaagaaatcagaaatggtacctttttaagaattgcatatttttttagacacaactattagcacattaagagggaagcaaagttactgtctatttaaaactgcaagcagttaactctcttaactcccttattacctaaacttgtctggctcccaggaacagccttatagagagagggagtattgtattgggaagaaaatgttactgaactattgactgaaagtaaatttagataaaatacagcttttttccttatgggcatttgttttgtttcaagtcatcataaactaggtattgcattgctatccgtggatacagacgcttagctcttaaaagattttttttttatgtaaactgttgaatatttgaaatagtccacttcaccttaatgggtcttgtctatcttcattagtcttcaaagaaaaaccatttgctaccaaagtaaatcagtattttgaatgtgcttctcttgtttttggtttattagctagttcctgtaagcatttccaccagaacttgaggcaaatcgtaaggaagctgtttcttttaaaacacaaaccaccaccaaaaatttaaatgtacatattgcttaagtatttggctgtttttattttttaaaaggtataaacaccaaaaaaaaaattaacattgtatgaagatggaaaataagaagatgcactttctgtaactttgtctaaggatttaaattactaacttatgaactccaatttgaattgaacttaactatcggctttcttactggtaaaattatatggtttattttaaatgcgtacatattgaccaatggcctctgaaaaagcacattttagatactgaaattgaaggaaagaaaatgcatcttcaaacattttttggaatctcaccacatatactttgttagatttgtgtattgtagggtgtttgttttgtatttttgtattgtatatgaactttttttaaatgtgacagttaaacacatctttaaaagcatagtcacagacaaaagcatacagtataaaaatttccttgaaaactcctacaatattatatttggaggcagcttcagactgttttattggtggtagctgcttgctgaggtcttttagttggtaataactccagagaagcagcctgtgtatattcctaacactttgttcactagcatttaagtttagaataagcccaagtaagacaatggaaatgtatatagaactcttagttcttacatgatttaattatatcgatacatgaatttaacttactttaatgtaggcaaactatcaattttttgtccattttcctgtttgttaaaataacatacctctcctacgtattattttcttgacccaaatgaaatattaacctaaggtcaagctgggagagagaaatgactgagatgaatgtctttactaaagtaccaataaatttgtcaaactcaa

SEQ ID NO: 16226 - DNA, 2771 bp, Homo sapiens
  misc_feature (24)..(24): n is a, c, g, or t
ggacgcgtgggtcgacccacgcgntcggacccacgcgtgcggggaggccgcggcggggaaaatggcggacgggaaggcgggagacgagaagcctgaaaagtcgcagcgagctggagccgccggaggacctgaagaagaagcagaaaaacctgtgaaaactaagactgtttcttccagtaatggaggggaaagttccagtcgcagcgctgagaagcgatcagctgaagaagaagctgccgacctcccaacaaagcctacaaagatctccaagtttggatttgccataggtagtcagacgacaaagaaagcatcagccatatccatcaaacttggatcaagtaagcctaaagaaactgttccaactcttgctccaaaaactctttcagtagcagcagcttttaatgaagatgaagatagtgaaccagaggaaatgcctccagaagcaaagatgaggatgaagaatattggaagggatacaccaacatcagctggaccaaactccttcaataaaggaaagcatgggttttctgataaccagaagctgtgggagcgaaatataaaatctcatcttggaaatgtccatgaccaagacaattaaatgatgttttgaaattggggtgtggggtgggtgtaaagttaaaaggaacagtttccttttttaaagaatggtataagactatctttggagccgctttttttttctttttcatttttttaaaagattgagtggtacactaataaatgagagtttgaaattagaggtaatttatgttttatatacagatttcaagacatttgctaattttgtagtttcatgtgattagtttccaaaggttacagataataaagaaatcagaaatggtacctttttaagaattgcatatttttttagacacaactattagcacattaagagggaagcaaagttactgtctatttaaaactgcaagcagttaactctcttaactcccttattacctaaacttgtctggctcccaggaacagccttatagagagagggagtattgtattgggaagaaaatgttactgaactattgactgaaagtaaatttagataaaatacagcttttttccttatgggcatttgttttgtttcaagtcatcataaactaggtattgcattgctatccgtggatacagacgcttagctcttaaaagattttttttttatgtaaactgttgaatatttgaaatagtccacttcaccttaatgggtcttgtctatcttcattagtcttcaaagaaaaaccatttgctaccaaagtaaatcagtattttgaatgtgcttctcttgtttttggtttattagctagttcctgtaagcatttccaccagaacttgaggcaaatcgtaaggaagctgtttcttttaaaacacaaaccaccaccaaaaatttaaatgtacatattgcttaagtatttggctgtttttattttttaaaaggtataaacaccaaaaaaaaaattaacattgtatgaagatggaaaataagaagatgcactttctgtaactttgtctaaggatttaaattactaacttatgaactccaatttgaattgaacttaactatcggctttcttactggtaaaattatatggtttattttaaatgcgtacatattgaccaatggcctctgaaaaagcacattttagatactgaaattgaaggaaagaaaatgcatcttcaaacattttttggaatctcaccacatatactttgttagatttgtgtattgtagggtgtttgttttgtatttttgtattgtatatgaactttttttaaatgtgacagttaaacacatctttaaaagcatagtcacagacaaaagcatacagtataaaaatttccttgaaaactcctacaatattatatttggaggcagcttcagactgttttattggtggtagctgcttgctgaggtcttttagttggtaataactccagagaagcagcctgtgtatattcctaacactttgttcactagcatttaagtttagaataagcccaagtaagacaatggaaatgtatatagaactcttagttcttacatgatttaattatatcgatacatgaatttaacttactttaatgtaggcaaactatcaattttttgtccattttcctgtttgttaaaataacatacctctcctacgtattattttcttgacccaaatgaaatattaacctaaggtcaagctgggagagagaaatgactgagatgaatgtctttactaaagtaccaataaatttgtcaaactcaaaaaaaaaaaaaaaaaaaaaaaaaaaaaaaaaaaaaaaaaaaaaaaaaaaaaaaaaaaaaaaaaaaaaaaaaaaaaaaaaaaaaaaaaaaaaaaaaaaaaaaaaaaaaaaaaacttgggggccctctgggcccaagccttttttattttgggaaagtttttggctcgggcccaaatttgggcccctttgcccaattccccctaaggggggggctattaaaaataaagggcccgtgtttaaacaaggggggggggggaaaaccccgggggaccccaacttaaaccctttgggaaaatccccctttttggagggggggggaattgaaaaaaggccccaccacattcctttttcaaaaaagtgggccaccttaattgggaatgaaaattttgggggtttattttgtgtaaatacccgggtaaaattttgaaaaaaagctattttttaaccataagcgccaatcggaaaatccccttaataaataaagaacgga

SEQ ID NO: 16227 - DNA, 2067 bp, Homo sapiens
  misc_feature (24)..(24): n is a, c, g, or t
ggacgcgtgggtcgacccacgcgntcggacccacgcgtgcggggaggccgcggcggggaaaatggcggacgggaaggcgggagacgagaagcctgaaaagtcgcagcgagctggagccgccggagaagcctaaagaaactgttccaactcttgctccaaaaactctttcagtagcagcagcttttaatgaagatgaagatagtgaaccagaggaaatgcctccagaagcaaagatgaggatgaagaatattggaagggatacaccaacatcagctggaccaaactccttcaataaaggaaagcatgggttttctgataaccagaagctgtgggagcgaaatataaaatctcatcttggaaatgtccatgaccaagacaattaaatgatgttttgaaattggggtgtggggtgggtgtaaagttaaaaggaacagtttccttttttaaagaatggtataagactatctttggagccgctttttttttctttttcatttttttaaaagattgagtggtacactaataaatgagagtttgaaattagaggtaatttatgttttatatacagatttcaagacatttgctaattttgtagtttcatgtgattagtttccaaaggttacagataataaagaaatcagaaatggtacctttttaagaattgcatatttttttagacacaactattagcacattaagagggaagcaaagttactgtctatttaaaactgcaagcagttaactctcttaactcccttattacctaaacttgtctggctcccaggaacagccttatagagagagggagtattgtattgggaagaaaatgttactgaactattgactgaaagtaaatttagataaaatacagcttttttccttatgggcatttgttttgtttcaagtcatcataaactaggtattgcattgctatccgtggatacagacgcttagctcttaaaagattttttttttatgtaaactgttgaatatttgaaatagtccacttcaccttaatgggtcttgtctatcttcattagtcttcaaagaaaaaccatttgctaccaaagtaaatcagtattttgaatgtgcttctcttgtttttggtttattagctagttcctgtaagcatttccaccagaacttgaggcaaatcgtaaggaagctgtttcttttaaaacacaaaccaccaccaaaaatttaaatgtacatattgcttaagtatttggctgtttttattttttaaaaggtataaacaccaaaaaaaaaattaacattgtatgaagatggaaaataagaagatgcactttctgtaactttgtctaaggatttaaattactaacttatgaactccaatttgaattgaacttaactatcggctttcttactggtaaaattatatggtttattttaaatgcgtacatattgaccaatggcctctgaaaaagcacattttagatactgaaattgaaggaaagaaaatgcatcttcaaacattttttggaatctcaccacatatactttgttagatttgtgtattgtagggtgtttgttttgtatttttgtattgtatatgaactttttttaaatgtgacagttaaacacatctttaaaagcatagtcacagacaaaagcatacagtataaaaatttccttgaaaactcctacaatattatatttggaggcagcttcagactgttttattggtggtagctgcttgctgaggtcttttagttggtaataactccagagaagcagcctgtgtatattcctaacactttgttcactagcatttaagtttagaataagcccaagtaagacaatggaaatgtatatagaactcttagttcttacatgatttaattatatcgatacatgaatttaacttactttaatgtaggcaaactatcaattttttgtccattttcctgtttgttaaaataacatacctctcctacgtattattttcttgacccaaatgaaatattaacctaaggtcaagctgggagagagaaatgactgagatgaatgtctttactaaagtaccaataaatttgtcaaactcaa

SEQ ID NO: 16228 - DNA, 2282 bp, Homo sapiens
  misc_feature (24)..(24): n is a, c, g, or t
  misc_feature (2235)..(2235): n is a, c, g, or t
  misc_feature (2237)..(2237): n is a, c, g, or t
  misc_feature (2239)..(2239): n is a, c, g, or t
ggacgcgtgggtcgacccacgcgntcggacccacgcgtgcggggaggccgcggcggggaaaatggcggacgggaaggcgggagacgagaagcctgaaaagtcgcagcgagctggagccgccggaggacctgaagaagaagcagaaaaacctgtgaaaactaagactgtttcttccagtaatggaggggaaagttccagtcgcagcgctgagaagcgatcagctgaagaagaagctgccgacctcccaacaaagcctacaaagatctccaagtttggatttgccataggtagtcagacgacaaagaaagcatcagccatatccatcaaacttggatcaagtaagcctaaagaaactgttccaactcttgctccaaaaactctttcagtagcagcagcttttaatgaagatgaagatagtgaaccagaggaaatgcctccagaagcaaagatgaggatgaagaatattggaagggatacaccaacatcagctggaccaaactccttcaataaaggaaagcatgggttttctgataaccagaagctgtgggagcgaaatataaaatctcatcttggaaatgtccatgaccaagacaattaaatgatgttttgaaattggggtgtggggtgggtgtaaagttaaaaggaacagtttccttttttaaagaatggtataagactatctttggagccgctttttttttctttttcatttttttaaaagattgagtggtacactaataaatgagagtttgaaattagaggtaatttatgttttatatacagatttcaagacatttgctaattttgtagtttcatgtgattagtttccaaaggttacagataataaagaaatcagaaatggtacctttttaagaattgcatatttttttagacacaactattagcacattaagagggaagcaaagttactgtctatttaaaactgcaagcagttaactctcttaactcccttattacctaaacttgtctggctcccaggaacagccttatagagagagggagtattgtattgggaagaaaatgttactgaactattgactgaaagtaaatttagataaaatacagcttttttccttatgggcatttgttttgtttcaagtcatcataaactaggtattgcattgctatccgtggatacagacgcttagctcttaaaagattttttttttatgtaaactgttgaatatttgaaatagtccacttcaccttaatgggtcttgtctatcttcattagtcttcaaagaaaaaccatttgctaccaaagtaaatcagtattttgaatgtgcttctcttgtttttggtttattagctagttcctgtaagcatttccaccagaacttgaggcaaatcgtaaggaagctgtttcttttaaaacacaaaccaccaccaaaaatttaaatgtacatattgcttaagtatttggctgtttttattttttaaaaggtataaacaccaaaaaaaaaattaacattgtatgaagatggaaaataagaagatgcactttctgtaactttgtctaaggatttaaattactaacttatgaactccaatttgaattgaacttaactatcggctttcttactggtaaaattatatggtttattttaaatgcgtacatattgaccaatggcctctgaaaaagcacattttagatactgaaattgaaggaaagaaaatgcatcttcaaacattttttggaatctcaccacatatactttgttagatttgtgtattgtagggtgtttgttttgtatttttgtattgtatatgaactttttttaaatgtgacagttaaacacatctttaaaagcatagtcacagacaaaagcatacagtataaaaatttccttgaaaactcctacaatattatatttggaggcagcttcagactgttttattggtggtagctgcttgctgaggtcttttagttggtaataactccagagaagcagcctgtgtatattcctaacactttgttcactagcatttaagtttagaataagcccaagtaagacaatggaaatgtatatagaactcttagttcttacatgatttaattatatcgatacatgaatttaacttactttaatgtaggcaaactatcaattttttgtccattttcctgtttgttaaaataacatacctctcctacgtattattttcttgacccaaatgaaatattaacctaaggtcaagctgggagagagaaatgancntngaggattacatctcggtgcgtggggttaaattatccaaagttt

SEQ ID NO: 16229 - DNA, 2411 bp, Homo sapiens
  misc_feature (24)..(24): n is a, c, g, or t
ggacgcgtgggtcgacccacgcgntcggacccacgcgtgcggggaggccgcggcggggaaaatggcggacgggaaggcgggagacgagaagcctgaaaagtcgcagcgagctggagccgccggaggtatataaactatttattaacagacaaggcctacagacttatttcttcttggacacacccacggtgcggccacggcggccagtggtcttggtgtgctggcctcggacacgaaggccccagaagtgacgcagccctctatgggcccgaatcttcttcagtcgctccaggtcttcacggagcttgttgtccagaccattggctaggacctggctgtattttccatcctttacatccttctgtctgttcaagaaccagtctgggatcttgtactggcgtggattctgcataatggtgatcacacgttccacctcatcatcagtgagttctcccgccctcttggtgagaagcctaaagaaactgttccaactcttgctccaaaaactctttcagtagcagcagcttttaatgaagatgaagatagtgaaccagaggaaatgcctccagaagcaaagatgaggatgaagaatattggaagggatacaccaacatcagctggaccaaactccttcaataaaggaaagcatgggttttctgataaccagaagctgtgggagcgaaatataaaatctcatcttggaaatgtccatgaccaagacaattaaatgatgttttgaaattggggtgtggggtgggtgtaaagttaaaaggaacagtttccttttttaaagaatggtataagactatctttggagccgctttttttttctttttcatttttttaaaagattgagtggtacactaataaatgagagtttgaaattagaggtaatttatgttttatatacagatttcaagacatttgctaattttgtagtttcatgtgattagtttccaaaggttacagataataaagaaatcagaaatggtacctttttaagaattgcatatttttttagacacaactattagcacattaagagggaagcaaagttactgtctatttaaaactgcaagcagttaactctcttaactcccttattacctaaacttgtctggctcccaggaacagccttatagagagagggagtattgtattgggaagaaaatgttactgaactattgactgaaagtaaatttagataaaatacagcttttttccttatgggcatttgttttgtttcaagtcatcataaactaggtattgcattgctatccgtggatacagacgcttagctcttaaaagattttttttttatgtaaactgttgaatatttgaaatagtccacttcaccttaatgggtcttgtctatcttcattagtcttcaaagaaaaaccatttgctaccaaagtaaatcagtattttgaatgtgcttctcttgtttttggtttattagctagttcctgtaagcatttccaccagaacttgaggcaaatcgtaaggaagctgtttcttttaaaacacaaaccaccaccaaaaatttaaatgtacatattgcttaagtatttggctgtttttattttttaaaaggtataaacaccaaaaaaaaaattaacattgtatgaagatggaaaataagaagatgcactttctgtaactttgtctaaggatttaaattactaacttatgaactccaatttgaattgaacttaactatcggctttcttactggtaaaattatatggtttattttaaatgcgtacatattgaccaatggcctctgaaaaagcacattttagatactgaaattgaaggaaagaaaatgcatcttcaaacattttttggaatctcaccacatatactttgttagatttgtgtattgtagggtgtttgttttgtatttttgtattgtatatgaactttttttaaatgtgacagttaaacacatctttaaaagcatagtcacagacaaaagcatacagtataaaaatttccttgaaaactcctacaatattatatttggaggcagcttcagactgttttattggtggtagctgcttgctgaggtcttttagttggtaataactccagagaagcagcctgtgtatattcctaacactttgttcactagcatttaagtttagaataagcccaagtaagacaatggaaatgtatatagaactcttagttcttacatgatttaattatatcgatacatgaatttaacttactttaatgtaggcaaactatcaattttttgtccattttcctgtttgttaaaataacatacctctcctacgtattattttcttgacccaaatgaaatattaacctaaggtcaagctgggagagagaaatgactgagatgaatgtctttactaaagtaccaataaatttgtcaaactcaa

SEQ ID NO: 16230 - DNA, 3072 bp, Homo sapiens
aaaaaaaatttttttagagatgggggacttgctgtgttgaccaggctggcctggaactcctggtctcaagcagccctcctgactcagcttcccaaagtgttgagattgcacatgtgaggcactgtgcctgcctgggtatctatatcttctaaatggggagtagcaggaaagggacagaacaaaaggtgggagaattgggagaataaccagtaaaaagcatgttacagaagccaaggaaagggtgtttttattttttattttttttatttttattttttgagacagtctcactctgttacccaggctggaatgcagtggcgtgatctcacctcactgcaacctctgcctcctgggttcaagcgattctcctgcctcagcctcccaagtaactaggattacaggcactcaccaccacacctggctgattttttgtgtttttagtagagagcaccttgggaggctgaggcgggtagatcacgaggtcaggagttcaagaccagcctggccaacatggcgaaacctcgtctctactaaatatacaaaataaattctctgggcatggtggcacacacctgtaatcccagctattcaggacgccaagtcatgagaatcatttgaacccaggaggcataggctgcaatgagccaagattatgccgctgcactccagcctgggcgacagagcaagactctgttctcaaaaagaaaaacaaaaaacatagtgagaagagatggtttggattaattatgtttataggcctagaggcagaaagccccttttatgctttcaaggcacattgtatttaatgttactgtgggaaggtattactaatcattttctcttgcctgtaccaagtaccccttaggtaagtgatattgtagatcctaactagaaaatcttttataggagggcaacaaatggatgccacaagttagtaaagtaaaacatacccactgataatccacatttttgaaaagagagaatggatttgtccaaagtattgggttcgttactatacaaatttctgtggaaatatagttaaatcattcaagataaattattcatatcattaaacaagcttgtataaatgttatctacatgatattctttttaatatgtttcttcttcagaagcctaaagaaactgttccaactcttgctccaaaaactctttcagtagcagcagcttttaatgaagatgaagatagtgaaccagaggaaatgcctccagaagcaaagatgaggatgaagaatattggaagggatacaccaacatcagctggaccaaactccttcaataaaggaaagcatgggttttctgataaccagaagctgtgggagcgaaatataaaatctcatcttggaaatgtccatgaccaagacaattaaatgatgttttgaaattggggtgtggggtgggtgtaaagttaaaaggaacagtttccttttttaaagaatggtataagactatctttggagccgctttttttttctttttcatttttttaaaagattgagtggtacactaataaatgagagtttgaaattagaggtaatttatgttttatatacagatttcaagacatttgctaattttgtagtttcatgtgattagtttccaaaggttacagataataaagaaatcagaaatggtacctttttaagaattgcatatttttttagacacaactattagcacattaagagggaagcaaagttactgtctatttaaaactgcaagcagttaactctcttaactcccttattacctaaacttgtctggctcccaggaacagccttatagagagagggagtattgtattgggaagaaaatgttactgaactattgactgaaagtaaatttagataaaatacagcttttttccttatgggcatttgttttgtttcaagtcatcataaactaggtattgcattgctatccgtggatacagacgcttagctcttaaaagattttttttttatgtaaactgttgaatatttgaaatagtccacttcaccttaatgggtcttgtctatcttcattagtcttcaaagaaaaaccatttgctaccaaagtaaatcagtattttgaatgtgcttctcttgtttttggtttattagctagttcctgtaagcatttccaccagaacttgaggcaaatcgtaaggaagctgtttcttttaaaacacaaaccaccaccaaaaatttaaatgtacatattgcttaagtatttggctgtttttattttttaaaaggtataaacaccaaaaaaaaaattaacattgtatgaagatggaaaataagaagatgcactttctgtaactttgtctaaggatttaaattactaacttatgaactccaatttgaattgaacttaactatcggctttcttactggtaaaattatatggtttattttaaatgcgtacatattgaccaatggcctctgaaaaagcacattttagatactgaaattgaaggaaagaaaatgcatcttcaaacattttttggaatctcaccacatatactttgttagatttgtgtattgtagggtgtttgttttgtatttttgtattgtatatgaactttttttaaatgtgacagttaaacacatctttaaaagcatagtcacagacaaaagcatacagtataaaaatttccttgaaaactcctacaatattatatttggaggcagcttcagactgttttattggtggtagctgcttgctgaggtcttttagttggtaataactccagagaagcagcctgtgtatattcctaacactttgttcactagcatttaagtttagaataagcccaagtaagacaatggaaatgtatatagaactcttagttcttacatgatttaattatatcgatacatgaatttaacttactttaatgtaggcaaactatcaattttttgtccattttcctgtttgttaaaataacatacctctcctacgtattattttcttgacccaaatgaaatattaacctaaggtcaagctgggagagagaaatgactgagatgaatgtctttactaaagtaccaataaatttgtcaaactcaa

SEQ ID NO: 16231 - DNA, 2155 bp, Homo sapiens
gaaacataactatactccctctctctataaggctgttcctgggagccagacaagtttaggtaataagggagttaagagagttaactgcttgcagttttaaatagacagtaactttgcttccctcttaatgtgctaatagtttgtaacattttcttcccaatacaatactccctctctctataaggctgttcctgggagtattgtattgggaagaagcctaaagaaactgttccaactcttgctccaaaaactctttcagtagcagcagcttttaatgaagatgaagatagtgaaccagaggaaatgcctccagaagcaaagatgaggatgaagaatattggaagggatacaccaacatcagctggaccaaactccttcaataaaggaaagcatgggttttctgataaccagaagctgtgggagcgaaatataaaatctcatcttggaaatgtccatgaccaagacaattaaatgatgttttgaaattggggtgtggggtgggtgtaaagttaaaaggaacagtttccttttttaaagaatggtataagactatctttggagccgctttttttttctttttcatttttttaaaagattgagtggtacactaataaatgagagtttgaaattagaggtaatttatgttttatatacagatttcaagacatttgctaattttgtagtttcatgtgattagtttccaaaggttacagataataaagaaatcagaaatggtacctttttaagaattgcatatttttttagacacaactattagcacattaagagggaagcaaagttactgtctatttaaaactgcaagcagttaactctcttaactcccttattacctaaacttgtctggctcccaggaacagccttatagagagagggagtattgtattgggaagaaaatgttactgaactattgactgaaagtaaatttagataaaatacagcttttttccttatgggcatttgttttgtttcaagtcatcataaactaggtattgcattgctatccgtggatacagacgcttagctcttaaaagattttttttttatgtaaactgttgaatatttgaaatagtccacttcaccttaatgggtcttgtctatcttcattagtcttcaaagaaaaaccatttgctaccaaagtaaatcagtattttgaatgtgcttctcttgtttttggtttattagctagttcctgtaagcatttccaccagaacttgaggcaaatcgtaaggaagctgtttcttttaaaacacaaaccaccaccaaaaatttaaatgtacatattgcttaagtatttggctgtttttattttttaaaaggtataaacaccaaaaaaaaaattaacattgtatgaagatggaaaataagaagatgcactttctgtaactttgtctaaggatttaaattactaacttatgaactccaatttgaattgaacttaactatcggctttcttactggtaaaattatatggtttattttaaatgcgtacatattgaccaatggcctctgaaaaagcacattttagatactgaaattgaaggaaagaaaatgcatcttcaaacattttttggaatctcaccacatatactttgttagatttgtgtattgtagggtgtttgttttgtatttttgtattgtatatgaactttttttaaatgtgacagttaaacacatctttaaaagcatagtcacagacaaaagcatacagtataaaaatttccttgaaaactcctacaatattatatttggaggcagcttcagactgttttattggtggtagctgcttgctgaggtcttttagttggtaataactccagagaagcagcctgtgtatattcctaacactttgttcactagcatttaagtttagaataagcccaagtaagacaatggaaatgtatatagaactcttagttcttacatgatttaattatatcgatacatgaatttaacttactttaatgtaggcaaactatcaattttttgtccattttcctgtttgttaaaataacatacctctcctacgtattattttcttgacccaaatgaaatattaacctaaggtcaagctgggagagagaaatgactgagatgaatgtctttactaaagtaccaataaatttgtcaaactcaa

SEQ ID NO: 16232 - DNA, 2226 bp, Homo sapiens
  misc_feature (24)..(24): n is a, c, g, or t
ggacgcgtgggtcgacccacgcgntcggacccacgcgtgcggggaggccgcggcggggaaaatggcggacgggaaggcgggagacgagaagcctgaaaagtcgcagcgagctggagccgccggaggacctgaagaagaagcagaaaaacctgtgaaaactaagactgtttcttccagtaatggaggggaaagttccagtcgcagcgctgagaagcgatcagctgaagaagaagctgccgacctcccaacaaagcctacaaagatctccaagtttggatttgccataggtagtcagacgacaaagaaagcatcagccatatccatcaaacttggatcaagtaagcctaaagaaactgttccaactcttgctccaaaaactctttcagtagcagcagcttttaatgaagatgaagatggatacaccaacatcagctggaccaaactccttcaataaaggaaagcatgggttttctgataaccagaagctgtgggagcgaaatataaaatctcatcttggaaatgtccatgaccaagacaattaaatgatgttttgaaattggggtgtggggtgggtgtaaagttaaaaggaacagtttccttttttaaagaatggtataagactatctttggagccgctttttttttctttttcatttttttaaaagattgagtggtacactaataaatgagagtttgaaattagaggtaatttatgttttatatacagatttcaagacatttgctaattttgtagtttcatgtgattagtttccaaaggttacagataataaagaaatcagaaatggtacctttttaagaattgcatatttttttagacacaactattagcacattaagagggaagcaaagttactgtctatttaaaactgcaagcagttaactctcttaactcccttattacctaaacttgtctggctcccaggaacagccttatagagagagggagtattgtattgggaagaaaatgttactgaactattgactgaaagtaaatttagataaaatacagcttttttccttatgggcatttgttttgtttcaagtcatcataaactaggtattgcattgctatccgtggatacagacgcttagctcttaaaagattttttttttatgtaaactgttgaatatttgaaatagtccacttcaccttaatgggtcttgtctatcttcattagtcttcaaagaaaaaccatttgctaccaaagtaaatcagtattttgaatgtgcttctcttgtttttggtttattagctagttcctgtaagcatttccaccagaacttgaggcaaatcgtaaggaagctgtttcttttaaaacacaaaccaccaccaaaaatttaaatgtacatattgcttaagtatttggctgtttttattttttaaaaggtataaacaccaaaaaaaaaattaacattgtatgaagatggaaaataagaagatgcactttctgtaactttgtctaaggatttaaattactaacttatgaactccaatttgaattgaacttaactatcggctttcttactggtaaaattatatggtttattttaaatgcgtacatattgaccaatggcctctgaaaaagcacattttagatactgaaattgaaggaaagaaaatgcatcttcaaacattttttggaatctcaccacatatactttgttagatttgtgtattgtagggtgtttgttttgtatttttgtattgtatatgaactttttttaaatgtgacagttaaacacatctttaaaagcatagtcacagacaaaagcatacagtataaaaatttccttgaaaactcctacaatattatatttggaggcagcttcagactgttttattggtggtagctgcttgctgaggtcttttagttggtaataactccagagaagcagcctgtgtatattcctaacactttgttcactagcatttaagtttagaataagcccaagtaagacaatggaaatgtatatagaactcttagttcttacatgatttaattatatcgatacatgaatttaacttactttaatgtaggcaaactatcaattttttgtccattttcctgtttgttaaaataacatacctctcctacgtattattttcttgacccaaatgaaatattaacctaaggtcaagctgggagagagaaatgactgagatgaatgtctttactaaagtaccaataaatttgtcaaactcaa

SEQ ID NO: 16233 - DNA, 1992 bp, Homo sapiens
  misc_feature (24)..(24): n is a, c, g, or t
ggacgcgtgggtcgacccacgcgntcggacccacgcgtgcggggaggccgcggcggggaaaatggcggacgggaaggcgggagacgagaagcctgaaaagtcgcagcgagctggagccgccggagagtgaaccagaggaaatgcctccagaagcaaagatgaggatgaagaatattggaagggatacaccaacatcagctggaccaaactccttcaataaaggaaagcatgggttttctgataaccagaagctgtgggagcgaaatataaaatctcatcttggaaatgtccatgaccaagacaattaaatgatgttttgaaattggggtgtggggtgggtgtaaagttaaaaggaacagtttccttttttaaagaatggtataagactatctttggagccgctttttttttctttttcatttttttaaaagattgagtggtacactaataaatgagagtttgaaattagaggtaatttatgttttatatacagatttcaagacatttgctaattttgtagtttcatgtgattagtttccaaaggttacagataataaagaaatcagaaatggtacctttttaagaattgcatatttttttagacacaactattagcacattaagagggaagcaaagttactgtctatttaaaactgcaagcagttaactctcttaactcccttattacctaaacttgtctggctcccaggaacagccttatagagagagggagtattgtattgggaagaaaatgttactgaactattgactgaaagtaaatttagataaaatacagcttttttccttatgggcatttgttttgtttcaagtcatcataaactaggtattgcattgctatccgtggatacagacgcttagctcttaaaagattttttttttatgtaaactgttgaatatttgaaatagtccacttcaccttaatgggtcttgtctatcttcattagtcttcaaagaaaaaccatttgctaccaaagtaaatcagtattttgaatgtgcttctcttgtttttggtttattagctagttcctgtaagcatttccaccagaacttgaggcaaatcgtaaggaagctgtttcttttaaaacacaaaccaccaccaaaaatttaaatgtacatattgcttaagtatttggctgtttttattttttaaaaggtataaacaccaaaaaaaaaattaacattgtatgaagatggaaaataagaagatgcactttctgtaactttgtctaaggatttaaattactaacttatgaactccaatttgaattgaacttaactatcggctttcttactggtaaaattatatggtttattttaaatgcgtacatattgaccaatggcctctgaaaaagcacattttagatactgaaattgaaggaaagaaaatgcatcttcaaacattttttggaatctcaccacatatactttgttagatttgtgtattgtagggtgtttgttttgtatttttgtattgtatatgaactttttttaaatgtgacagttaaacacatctttaaaagcatagtcacagacaaaagcatacagtataaaaatttccttgaaaactcctacaatattatatttggaggcagcttcagactgttttattggtggtagctgcttgctgaggtcttttagttggtaataactccagagaagcagcctgtgtatattcctaacactttgttcactagcatttaagtttagaataagcccaagtaagacaatggaaatgtatatagaactcttagttcttacatgatttaattatatcgatacatgaatttaacttactttaatgtaggcaaactatcaattttttgtccattttcctgtttgttaaaataacatacctctcctacgtattattttcttgacccaaatgaaatattaacctaaggtcaagctgggagagagaaatgactgagatgaatgtctttactaaagtaccaataaatttgtcaaactcaa

SEQ ID NO: 16234 - DNA, 2066 bp, Homo sapiens
tgcaaaatcagcaccgtagaagacaggcatttattttttaaatgtagttaaggtaaataactcactaattttctccttttaccaaaatttacagtagtgaaaatgctaaaagacttagatataaaatttagcgtattagtaatcaggaattgaataagtttgtatgcagttatcttggtttacttacttttttctttagagtgaaccagaggaaatgcctccagaagcaaagatgaggatgaagaatattggaagggatacaccaacatcagctggaccaaactccttcaataaaggaaagcatgggttttctgataaccagaagctgtgggagcgaaatataaaatctcatcttggaaatgtccatgaccaagacaattaaatgatgttttgaaattggggtgtggggtgggtgtaaagttaaaaggaacagtttccttttttaaagaatggtataagactatctttggagccgctttttttttctttttcatttttttaaaagattgagtggtacactaataaatgagagtttgaaattagaggtaatttatgttttatatacagatttcaagacatttgctaattttgtagtttcatgtgattagtttccaaaggttacagataataaagaaatcagaaatggtacctttttaagaattgcatatttttttagacacaactattagcacattaagagggaagcaaagttactgtctatttaaaactgcaagcagttaactctcttaactcccttattacctaaacttgtctggctcccaggaacagccttatagagagagggagtattgtattgggaagaaaatgttactgaactattgactgaaagtaaatttagataaaatacagcttttttccttatgggcatttgttttgtttcaagtcatcataaactaggtattgcattgctatccgtggatacagacgcttagctcttaaaagattttttttttatgtaaactgttgaatatttgaaatagtccacttcaccttaatgggtcttgtctatcttcattagtcttcaaagaaaaaccatttgctaccaaagtaaatcagtattttgaatgtgcttctcttgtttttggtttattagctagttcctgtaagcatttccaccagaacttgaggcaaatcgtaaggaagctgtttcttttaaaacacaaaccaccaccaaaaatttaaatgtacatattgcttaagtatttggctgtttttattttttaaaaggtataaacaccaaaaaaaaaattaacattgtatgaagatggaaaataagaagatgcactttctgtaactttgtctaaggatttaaattactaacttatgaactccaatttgaattgaacttaactatcggctttcttactggtaaaattatatggtttattttaaatgcgtacatattgaccaatggcctctgaaaaagcacattttagatactgaaattgaaggaaagaaaatgcatcttcaaacattttttggaatctcaccacatatactttgttagatttgtgtattgtagggtgtttgttttgtatttttgtattgtatatgaactttttttaaatgtgacagttaaacacatctttaaaagcatagtcacagacaaaagcatacagtataaaaatttccttgaaaactcctacaatattatatttggaggcagcttcagactgttttattggtggtagctgcttgctgaggtcttttagttggtaataactccagagaagcagcctgtgtatattcctaacactttgttcactagcatttaagtttagaataagcccaagtaagacaatggaaatgtatatagaactcttagttcttacatgatttaattatatcgatacatgaatttaacttactttaatgtaggcaaactatcaattttttgtccattttcctgtttgttaaaataacatacctctcctacgtattattttcttgacccaaatgaaatattaacctaaggtcaagctgggagagagaaatgactgagatgaatgtctttactaaagtaccaataaatttgtcaaactcaa

SEQ ID NO: 16235 - DNA, 2495 bp, Homo sapiens
  misc_feature (24)..(24): n is a, c, g, or t
ggacgcgtgggtcgacccacgcgntcggacccacgcgtgcggggaggccgcggcggggaaaatggcggacgggaaggcgggagacgagaagcctgaaaagtcgcagcgagctggagccgccggaggtatataaactatttattaacagacaaggcctacagacttatttcttcttggacacacccacggtgcggccacggcggccagtggtcttggtgtgctggcctcggacacgaaggccccagaagtgacgcagccctctatgggcccgaatcttcttcagtcgctccaggtcttcacggagcttgttgtccagaccattggctaggacctggctgtattttccatcctttacatccttctgtctgttcaagaaccagtctgggatcttgtactggcgtggattctgcataatggtgatcacacgttccacctcatcatcagtgagttctcccgccctcttggtgaggacctgaagaagaagcagaaaaacctgtgaaaactaagactgtttcttccagtaatggaggggaaagttccagtcgcagcgctgagaagcgatcagctgaagaagaagctgccgacctcccaacaaagcctacaaagatctccaagtttggatttgccataggtagtcagacgacaaagaaagcatcagccatatccatcaaacttggatcaagtggatacaccaacatcagctggaccaaactccttcaataaaggaaagcatgggttttctgataaccagaagctgtgggagcgaaatataaaatctcatcttggaaatgtccatgaccaagacaattaaatgatgttttgaaattggggtgtggggtgggtgtaaagttaaaaggaacagtttccttttttaaagaatggtataagactatctttggagccgctttttttttctttttcatttttttaaaagattgagtggtacactaataaatgagagtttgaaattagaggtaatttatgttttatatacagatttcaagacatttgctaattttgtagtttcatgtgattagtttccaaaggttacagataataaagaaatcagaaatggtacctttttaagaattgcatatttttttagacacaactattagcacattaagagggaagcaaagttactgtctatttaaaactgcaagcagttaactctcttaactcccttattacctaaacttgtctggctcccaggaacagccttatagagagagggagtattgtattgggaagaaaatgttactgaactattgactgaaagtaaatttagataaaatacagcttttttccttatgggcatttgttttgtttcaagtcatcataaactaggtattgcattgctatccgtggatacagacgcttagctcttaaaagattttttttttatgtaaactgttgaatatttgaaatagtccacttcaccttaatgggtcttgtctatcttcattagtcttcaaagaaaaaccatttgctaccaaagtaaatcagtattttgaatgtgcttctcttgtttttggtttattagctagttcctgtaagcatttccaccagaacttgaggcaaatcgtaaggaagctgtttcttttaaaacacaaaccaccaccaaaaatttaaatgtacatattgcttaagtatttggctgtttttattttttaaaaggtataaacaccaaaaaaaaaattaacattgtatgaagatggaaaataagaagatgcactttctgtaactttgtctaaggatttaaattactaacttatgaactccaatttgaattgaacttaactatcggctttcttactggtaaaattatatggtttattttaaatgcgtacatattgaccaatggcctctgaaaaagcacattttagatactgaaattgaaggaaagaaaatgcatcttcaaacattttttggaatctcaccacatatactttgttagatttgtgtattgtagggtgtttgttttgtatttttgtattgtatatgaactttttttaaatgtgacagttaaacacatctttaaaagcatagtcacagacaaaagcatacagtataaaaatttccttgaaaactcctacaatattatatttggaggcagcttcagactgttttattggtggtagctgcttgctgaggtcttttagttggtaataactccagagaagcagcctgtgtatattcctaacactttgttcactagcatttaagtttagaataagcccaagtaagacaatggaaatgtatatagaactcttagttcttacatgatttaattatatcgatacatgaatttaacttactttaatgtaggcaaactatcaattttttgtccattttcctgtttgttaaaataacatacctctcctacgtattattttcttgacccaaatgaaatattaacctaaggtcaagctgggagagagaaatgactgagatgaatgtctttactaaagtaccaataaatttgtcaaactcaa

SEQ ID NO: 16236 - DNA, 2151 bp, Homo sapiens
  misc_feature (24)..(24): n is a, c, g, or t
ggacgcgtgggtcgacccacgcgntcggacccacgcgtgcggggaggccgcggcggggaaaatggcggacgggaaggcgggagacgagaagcctgaaaagtcgcagcgagctggagccgccggaggacctgaagaagaagcagaaaaacctgtgaaaactaagactgtttcttccagtaatggaggggaaagttccagtcgcagcgctgagaagcgatcagctgaagaagaagctgccgacctcccaacaaagcctacaaagatctccaagtttggatttgccataggtagtcagacgacaaagaaagcatcagccatatccatcaaacttggatcaagtggatacaccaacatcagctggaccaaactccttcaataaaggaaagcatgggttttctgataaccagaagctgtgggagcgaaatataaaatctcatcttggaaatgtccatgaccaagacaattaaatgatgttttgaaattggggtgtggggtgggtgtaaagttaaaaggaacagtttccttttttaaagaatggtataagactatctttggagccgctttttttttctttttcatttttttaaaagattgagtggtacactaataaatgagagtttgaaattagaggtaatttatgttttatatacagatttcaagacatttgctaattttgtagtttcatgtgattagtttccaaaggttacagataataaagaaatcagaaatggtacctttttaagaattgcatatttttttagacacaactattagcacattaagagggaagcaaagttactgtctatttaaaactgcaagcagttaactctcttaactcccttattacctaaacttgtctggctcccaggaacagccttatagagagagggagtattgtattgggaagaaaatgttactgaactattgactgaaagtaaatttagataaaatacagcttttttccttatgggcatttgttttgtttcaagtcatcataaactaggtattgcattgctatccgtggatacagacgcttagctcttaaaagattttttttttatgtaaactgttgaatatttgaaatagtccacttcaccttaatgggtcttgtctatcttcattagtcttcaaagaaaaaccatttgctaccaaagtaaatcagtattttgaatgtgcttctcttgtttttggtttattagctagttcctgtaagcatttccaccagaacttgaggcaaatcgtaaggaagctgtttcttttaaaacacaaaccaccaccaaaaatttaaatgtacatattgcttaagtatttggctgtttttattttttaaaaggtataaacaccaaaaaaaaaattaacattgtatgaagatggaaaataagaagatgcactttctgtaactttgtctaaggatttaaattactaacttatgaactccaatttgaattgaacttaactatcggctttcttactggtaaaattatatggtttattttaaatgcgtacatattgaccaatggcctctgaaaaagcacattttagatactgaaattgaaggaaagaaaatgcatcttcaaacattttttggaatctcaccacatatactttgttagatttgtgtattgtagggtgtttgttttgtatttttgtattgtatatgaactttttttaaatgtgacagttaaacacatctttaaaagcatagtcacagacaaaagcatacagtataaaaatttccttgaaaactcctacaatattatatttggaggcagcttcagactgttttattggtggtagctgcttgctgaggtcttttagttggtaataactccagagaagcagcctgtgtatattcctaacactttgttcactagcatttaagtttagaataagcccaagtaagacaatggaaatgtatatagaactcttagttcttacatgatttaattatatcgatacatgaatttaacttactttaatgtaggcaaactatcaattttttgtccattttcctgtttgttaaaataacatacctctcctacgtattattttcttgacccaaatgaaatattaacctaaggtcaagctgggagagagaaatgactgagatgaatgtctttactaaagtaccaataaatttgtcaaactcaa

SEQ ID NO: 16237 - DNA, 1868 bp, Homo sapiens
tctatttactttttccttctccaacactctaaagagtaacgttctgttaagggtgccggatacaccaacatcagctggaccaaactccttcaataaaggaaagcatgggttttctgataaccagaagctgtgggagcgaaatataaaatctcatcttggaaatgtccatgaccaagacaattaaatgatgttttgaaattggggtgtggggtgggtgtaaagttaaaaggaacagtttccttttttaaagaatggtataagactatctttggagccgctttttttttctttttcatttttttaaaagattgagtggtacactaataaatgagagtttgaaattagaggtaatttatgttttatatacagatttcaagacatttgctaattttgtagtttcatgtgattagtttccaaaggttacagataataaagaaatcagaaatggtacctttttaagaattgcatatttttttagacacaactattagcacattaagagggaagcaaagttactgtctatttaaaactgcaagcagttaactctcttaactcccttattacctaaacttgtctggctcccaggaacagccttatagagagagggagtattgtattgggaagaaaatgttactgaactattgactgaaagtaaatttagataaaatacagcttttttccttatgggcatttgttttgtttcaagtcatcataaactaggtattgcattgctatccgtggatacagacgcttagctcttaaaagattttttttttatgtaaactgttgaatatttgaaatagtccacttcaccttaatgggtcttgtctatcttcattagtcttcaaagaaaaaccatttgctaccaaagtaaatcagtattttgaatgtgcttctcttgtttttggtttattagctagttcctgtaagcatttccaccagaacttgaggcaaatcgtaaggaagctgtttcttttaaaacacaaaccaccaccaaaaatttaaatgtacatattgcttaagtatttggctgtttttattttttaaaaggtataaacaccaaaaaaaaaattaacattgtatgaagatggaaaataagaagatgcactttctgtaactttgtctaaggatttaaattactaacttatgaactccaatttgaattgaacttaactatcggctttcttactggtaaaattatatggtttattttaaatgcgtacatattgaccaatggcctctgaaaaagcacattttagatactgaaattgaaggaaagaaaatgcatcttcaaacattttttggaatctcaccacatatactttgttagatttgtgtattgtagggtgtttgttttgtatttttgtattgtatatgaactttttttaaatgtgacagttaaacacatctttaaaagcatagtcacagacaaaagcatacagtataaaaatttccttgaaaactcctacaatattatatttggaggcagcttcagactgttttattggtggtagctgcttgctgaggtcttttagttggtaataactccagagaagcagcctgtgtatattcctaacactttgttcactagcatttaagtttagaataagcccaagtaagacaatggaaatgtatatagaactcttagttcttacatgatttaattatatcgatacatgaatttaacttactttaatgtaggcaaactatcaattttttgtccattttcctgtttgttaaaataacatacctctcctacgtattattttcttgacccaaatgaaatattaacctaaggtcaagctgggagagagaaatgactgagatgaatgtctttactaaagtaccaataaatttgtcaaactcaa

SEQ ID NO: 16238 - DNA, 1816 bp, Homo sapiens
  misc_feature (24)..(24): n is a, c, g, or t
ggacgcgtgggtcgacccacgcgntcggacccacgcgtgcggggaggccgcggcggggaaaatggcggacgggaaggcgggagacgagaagcctgaaaagtcgcagcgagctggagccgccggaggacctgaagaagaagcagaaaaacctgtgaaaactaagactgtttcttccagtaatggaggggaaagttccagtcgcagcgctgagaagcgatcagctgaagaagaagctgccgacctcccaacaaagcctacaaagatctccaagtttggatttgccataggtagtcagacgacaaagaaagcatcagccatatccatcaaacttggatcaagtaagcctaaagaaactgttccaactcttgctccaaaaactctttcagtagcagcagcttttaatgaagatgaagatagtgaaccagaggaaatgcctccagaagcaaagatgaggatgaagaatattggaagggatacaccaacatcagctggaccaaactccttcaataaaggaaagcatgggttttctgataaccagaagctgtgggagcgaaatataaaatctcatcttggaaatgtccatgaccaagacaattaaatgatgttttgaaattggggtgtggggtgggtgtaaagttaaaaggaacagtttccttttttaaagaatggtataagactatctttggagccgctttttttttctttttcatttttttaaaagattgagtggtacactaataaatgagagtttgaaattagaggtaatttatgttttatatacagatttcaagacatttgctaattttgtagtttcatgtgattagtttccaaaggttacagataataaagaaatcagaaatggtacctttttaagaattgcatatttttttagacacaactattagcacattaagagggaagcaaagttactgtctatttaaaactgcaagcagttaactctcttaactcccttattacctaaacttgtctggctcccaggaacagccttatagagagagggagtattgtattgggaagaaaatgttactgaactattgactgaaagtaaatttagataaaatacagcttttttccttatgggcatttgttttgtttcaagtcatcataaactaggtattgcattgctatccgtggatacagacgcttagctcttaaaagattttttttttatgtaaactgttgaatatttgaaatagtccacttcaccttaatgggtcttgtctatcttcattagtcttcaaagaaaaaccatttgctaccaaagtaaatcagtattttgaatgtgcttctcttgtttttggtttattagctagttcctgtaagcatttccaccagaacttgaggcaaatcgtaaggaagctgtttcttttaaaacacaaaccaccaccaaaaatttaaatgtacatattgcttaagtatttggctgtttttattttttaaaaggtataaacaccaaaaaaaaaattaacattgtatgaagatggaaaataagaagatgcactttctgtaactttgtctaaggatttaaattactaacttatgaactccaatttgaattgaacttaactatcttagttcttacatgatttaattatatcgatacatgaatttaacttactttaatgtaggcaaactatcaattttttgtccattttcctgtttgttaaaataacatacctctcctacgtattattttcttgacccaaatgaaatattaacctaaggtcaagctgggagagagaaatgactgagatgaatgtctttactaaagtaccaataaatttgtcaaactcaa

SEQ ID NO: 16239 - DNA, 428 bp, Homo sapiens
tccacaaacagtctgaagctgcctccaaatataatatggtaggagttttcaaggaaatgttttattggtggtagctgcttgctgaggtcttttagttggtaataactccagagaagcagcctgtgtatattcctaacactttgttcactagcatttaagtttagaataagcccaagtaagacaatggaaatgtatatagaactcttagttcttacatgatttaattatatcgatacatgaatttaacttactttaatgtaggcaaactatcaattttttgtccattttcctgtttgttaaaataacatacctctcctacgtattattttcttgacccaaatgaaatattaacctaaggtcaagctgggagagagaaatgactgagatgaatgtctttactaaagtaccaataaatttgtcaaactcaa

SEQ ID NO: 16240 - DNA, 1103 bp, Homo sapiens
  misc_feature (24)..(24): n is a, c, g, or t
ggacgcgtgggtcgacccacgcgntcggacccacgcgtgcggggaggccgcggcggggaaaatggcggacgggaaggcgggagacgagaagcctgaaaagtcgcagcgagctggagccgccggaggtatataaactatttattaacagacaaggcctacagacttatttcttcttggacacacccacggtgcggccacggcggccagtggtcttggtgtgctggcctcggacacgaaggccccagaagtgacgcagccctctatgggcccgaatcttcttcagtcgctccaggtcttcacggagcttgttgtccagaccattggctaggacctggctgtattttccatcctttacatccttctgtctgttcaagaaccagtctgggatcttgtactggcgtggattctgcataatggtgatcacacgttccacctcatcatcagtgagttctcccgccctcttggtgaggacctgaagaagaagcagaaaaacctgtgaaaactaagactgtttcttccagtaatggaggggaaagttccagtcgcagcgctgagaagcgatcagctgaagaagaagctgccgacctcccaacaaagcctacaaagatctccaagtttggatttgccataggtagtcagacgacaaagaaagcatcagccatatccatcaaacttggatcaagtgtgagttgttatttcatatatgatgtttgtaatgggtcttaaggatttgctttggaaacgtggcgtttactaggttatggtaaattaagggtgaaaaggtacattgtttgagaagtaatctttgacgtatgaacttagatgattagcaccctgtttaagaagggtctgaatgaattttatctcaataaagctgttaagaaacaaagatttggaatattaggaacaactattatagggaatatgatttataaaataataaacttagaatttttctgcgttggctgggcacagtggctcacacctgtaatctgaaaacttggggaggccaaagtgggaggaccagttgagcccaggaatttcagaccagtctgggcaacatagcaagatctatctctacaaaaaataaaaatataattaaa

SEQ ID NO: 16241 - DNA, 1296 bp, Homo sapiens
  misc_feature (24)..(24): n is a, c, g, or t
ggacgcgtgggtcgacccacgcgntcggacccacgcgtgcggggaggccgcggcggggaaaatggcggacgggaaggcgggagacgagaagcctgaaaagtcgcagcgagctggagccgccggaggtatataaactatttattaacagacaaggcctacagacttatttcttcttggacacacccacggtgcggccacggcggccagtggtcttggtgtgctggcctcggacacgaaggccccagaagtgacgcagccctctatgggcccgaatcttcttcagtcgctccaggtcttcacggagcttgttgtccagaccattggctaggacctggctgtattttccatcctttacatccttctgtctgttcaagaaccagtctgggatcttgtactggcgtggattctgcataatggtgatcacacgttccacctcatcatcagtgagttctcccgccctcttggtgaggacctgaagaagaagcagaaaaacctgtgaaaactaagactgtttcttccagtaatggaggggaaagttccagtcgcagcgctgagaagcgatcagctgaagaagaagctgccgacctcccaacaaagcctacaaagatctccaagtttggatttgccataggtagtcagacgacaaagaaagcatcagccatatccatcaaacttggatcaagtaagcctaaagaaactgttccaactcttgctccaaaaactctttcagtagcagcagcttttaatgaagatgaagatgtaagttgatatcgagttttgtttttttactttaaccagttatttaaggaaggtattagtggcaaattataggttataatagtattagtgaattttctttataatagtttttgtgtctgtgtgtgacatccataaaaactggatactctatttttgcattttatttggttgtaagattattttagagtattgttgactttggggacaagaagcttaaggatgaaatcagcaaatgtttattatgagtagtttgtgctaggaagtatgtaggatccaaaaaaagaaaaatctaatactgttgccttaataatttttatagttggggtcttcagtaatgatacattatgcatgcattcaattttaaaaagccaactattggctaggcgcggtgtctcatgcctgtaagcctagctctttgggaggctgaggcaggtggatcacttgaggtcagcggttcaagaccagcctggccaatatggtgaaaccccatctctactaaaaatacaaaaattagacaggcgtggtggcacaggccta

SEQ ID NO: 16242 - DNA, 397 bp, Homo sapiens
ccctggttcacaccattctcctgcctcagcctcccgagtagctgggactacaggtgcccaccaagacgcctggctaattttttgtattttttggtggagacggggtttcaccgtgttggccaggatggtgtcgatctcctgacctcgtgatctgcctgcctcggcctcccaaagtgctgggattacaggcgtgagacaccacgcctggcctagtttggcagctttttaaaccaaactcgaaccaaccatatgatctagccatttaagtatttacccaagagaacaagaaatatatgttcatgaaaagacttttgcttaaatgttcatagcggccttatttgtaaatggcccagacgtgtggataaaccaactgtagtacatccatgtaacagagtac

SEQ ID NO: 16243 - DNA, 461 bp, Homo sapiens
gtaagtgatagtaggaaacctttttcccctggtttaaaaaggatggatgcaataacatttataggtaagactgaggagcattttaaaaaccacaggccgggcacagtggctcatgcctgtaaccctagcactttgggaggctgaaacagttggatcacctgaggtcaggagtttgagaccagcctgggcagtgtggtgaaacacggggcatccaccaagagaaataaatcaaagtccaagtacttgaattcataatctgaggagagaggtgtatgtaaacaaaacacattcagtgtgacaatgtcagagagtatatggggttgctttggccctgtagaagaggtacttggcctgttttggagaaagatgggaatgcttcatagtgtgcttcatagtggatgtaaagtttgctgattcttgaagggtgagtaggatttcccctagcaagcactattggaagg

SEQ ID NO: 16244 - DNA, 439 bp, Homo sapiens
taactttttaagaaactgccaaaatcttttccagcatttcagaaaaatcttagaaaatgctatactatgttatattcccactggcagtatatgggggagttccagttcctccataccctcatcaacatgaggcatgatcagtctttttaattttaaccatgtcagtaggtgtgtgatggtctctcactgtggtgatttttatttgcacttccctggtgattttgagcatcttttcgtatgcttatttgccatatatcttctttggtgatatttctgttcaaagcctttgctcattttttaattgagttgcttttctactattcactattgaacactatttatatattttgaatacaaatactttatcagacatgtgatctacaaatattttccccagtgtgtggtttgtctttcttttctttctactgatagtatctta

SEQ ID NO: 16245 - DNA, 159 bp, Homo sapiens
ctctccagctaagccaagaaaggatgatttatcttccagtgagtaccagcctatttgagtgtaggaaggagaaaaatctgtgctcctgctcctgggtactgggcaaagaaaccctttggttggggatttttgcctggtaccaactttataggtgccaac

SEQ ID NO: 16246 - DNA, 805 bp, Homo sapiens
aaactgcctgtaaatctccctcctggagttggcaaggccctgagaagtgctgtatcgagaatcctgttgaccttgtttaacgaagcacttcctaggctcgtttgcccaggagccccttaacatcccatgaatgagcattctagagggtgaaccctgggaaatgctgacccagcctttctaacactgacatttgaagttctgtgcctttctaaatgtggagcctgtcaccactgtgtgatgatgggtgcctcctgggagttccatgaacccagaacagatgagctaggcaggagagaaccacgcgagagcctactcctgatgccccccagagagggtagcagaaggcagcaaaatctccccatgttgaaagtcacaacatgaaccacttaatgggagtgtaccttgggccaggcacgtgctgagccttttacatgttttctcacttaacccttccaatcatcctttaatgtaggtatttcttattttcacattttcctctatttacttttaatttatattccagcagatgcatttttaaaattcatatcaatatggctgggcgcggtgactcacgcctgtactcccaacactttgggagccaaggcgggcggatcgcttgagctcaggagttagagaccaacctgggcaatatggtgaaatgtcatctctcaaaaaatacaaaacttaggccgggcgcggtggctcacgcctgtaatcccagcactttgggaggctgaggcgggcggatcacaaggtcaggagttcgagaccagcctgaccaacatggtgaaaccctatctctact

SEQ ID NO: 16247 - DNA, 3521 bp, Homo sapiens
tttccttttattggcgtttgtaaaatttcttcttttaaaattgttatattttagagacagggtctcgctctgtcacccaggctggagtgcagtggtgcaatcacagctcaccacagcctccaactcctgggctcaaggcatcctcccacgtaggccttccaaagcgctgagattgtaggcataagccaccaggcccagcctattacctttacgttgtacttagtcccagataaaaaatgaccttagatcagtcctttcctctttggctggggagaggggggcttaaattccggtactgtgaaacagaagaatggactcagtgctatgtgacaaatctatgtatgtaaatgtgtgtatatacacacacataaattatatatatgaatatattttcattttcatattttgcaaggagagtagccaatgctctggacctctggtcctttttgtagggtaccctctgaggccgggaacctttgctcaactctcaggctgtccagggaagctttaggcggtgataccgagctacagaccaatataagagctcggggctgtggcactgaagagaggaggcggccgttgggaactgaggtgggcccagggcttgagctgagttggcgagggtggaggtggtgccggtcccacgccgtggtggggaccgagctgcgggctggagggaggggcagcgccgagggggcgggacggggagggctcgcggagtaggccaacggttggccccaaccgccactgactacagcctgcgcccgcctcttttcgttgccgttacctgtttccggcagtcgacacgctcttcgcttctcggggcttgtctccgtgtcctccgtctcagttgtttctccctctctatcctcctctgtctcagtctccccagccttggggccggtgcctcttccgggcttcggcgaatgagacctgcggacctgcccccgcgccccatggaagaatccccggcgtccagctctgccccgacagagacggaggagccggggtccagtgcagaggtcatggaagaagtgacaacatgctccttcaacagccctctgttccggcaggaagatgacagagggattacctaccggatcccagccctgctctacataccccccacccacaccttcctggcctttgcagagaagcgttccacgaggagagatgaggatgctctccacctggtgctgaggcgagggttgaggattgggcagttggtacagtgggggcccctgaagccactgatggaagccacactaccggggcatcggaccatgaacccctgtcctgtatgggagcagaagagtggttgtgtgttcctgttcttcatctgtgtgcggggccatgtcacagagcgtcaacagattgtgtcaggcaggaatgctgcccgcctttgcttcatctacagtcaggatgctggatgttcatggagtgaggtgagggacttgactgaggaggtcattggctcagagctgaagcactgggccacatttgctgtgggcccaggtcatggcatccagctgcagtcagggagactggtcatccctgcgtatacctactacatcccttcctggttcttttgcttccagctaccatgtaaaaccaggcctcattctctgatgatctacagtgatgacctaggggtcacatggcaccatggtagactcattaggcccatggttacagtagaatgtgaagtggcagaggtgactgggagggctggccaccctgtgctatattgcagtgcccggacaccaaacaggtgccgggcagaggcgctcagcactgaccatggtgaaggctttcagagactggccctgagtcgacagctctgtgagcccccacatggttgccaagggagtgtggtaagtttccggcccctggagatcccacataggtgccaggactctagcagcaaagatgcacccaccattcagcagagctctccaggcagttcactgaggctggaggaggaagctggaacaccgtcagaatcatggctcttgtactcacacccaaccagtaggaaacagagggttgacctaggtatctatctcaaccagacccccttggaggctgcctgctggtcccgcccctggatcttgcactgtgggccctgtggctactctgatctggctgctctggaggaggagggcttgtttgggtgtttgtttgaatgtgggaccaagcaagagtgtgagcagattgccttccgcctgtttacacaccgggagatcctgagtcacctgcagggggactgcaccagccctggtaggaacccaagccaattcaaaagcaattaattggcttaggacccaatttccatagatgcaaatggcagttacagacaggttaacagaagctactgaagtctacagataatcaaaaaacttaatattctgttccctaccttttttcacttttcctcctccaaagagcaaaatgaaaattttgccttagctactgcagtggaaagagcactgaactaggagttggaagacaaggatgtggtcctggctctgccactggcttgcttttggaccttggatgtgtcacctgaactctctggacctcaggtttccatctgtaaaatgagagtattggttctaagatttctcatcttctcatccctaggacaagcatagtgcctgcatgcttcatgatcagtaagtcctggctgcataaaggactctgatgtcaaaatggaaaccaggggacttaccttttcacatgacttacccctcatccgagtgtgaggttacaagcaggtgtcatggcaggaaggaagaccagatctgtatgatttgttccatttttaataacaaaaatatccacacccttttaataatgctcagagttctgtaggctctctatcctagaggaattgagcaaaacagaagaatcatgaagtctcctaccttctacagccttgtagttctgcttaccttctcttcctcatccagaaagcatcattttctagggagaacaatgagaatctcaatgccagtagtactggataatagtgcgtattgcttctggtggcattaccctgatgatgggctgaagttcatttattagggtggttcctgatgggaaaaggacatggattaggactttaaaacactggacagaatttcccacagtctttgccctcaaggagttcaccagtttatggggctagaagagcgagaaaattcaagaaaataaatgtagctggtgggagactttgtagatgttgggctatatgttggggtgatggtagctcctgatgtaattttcttagttgcatcttcaatatgcctggagtcgtctgtccaaggcttgtccaggcttctgggtttctctcaagtttgtttttctcaggatattgtcctggcccagctactcctttacctgtgagaagatcttcaccattaggaagatctctagacccccagatctcagaatcaggcctatttgtgtaggcccatggaaatcactacttgtgaagtagagatgcctttttgtctaaa

SEQ ID NO: 16248 - DNA, 1549 bp, Homo sapiens
tttccttttattggcgtttgtaaaatttcttcttttaaaattgttatattttagagacagggtctcgctctgtcacccaggctggagtgcagtggtgcaatcacagctcaccacagcctccaactcctgggctcaaggcatcctcccacgtaggccttccaaagcgctgagattgtaggcataagccaccaggcccagcctattacctttacgttgtacttagtcccagataaaaaatgaccttagatcagtcctttcctctttggctggggagaggggggcttaaattccggtactgtgaaacagaagaatggactcagtgctatgtgacaaatctatgtatgtaaatgtgtgtatatacacacacataaattatatatatgaatatattttcattttcatattttgcaaggagagtagccaatgctctggacctctggtcctttttgtagggtaccctctgaggccgggaacctttgctcaactctcaggctgtccagggaagctttaggcggtgataccgagctacagaccaatataagagctcggggctgtggcactgaagagaggaggcggccgttgggaactgaggtgggcccagggcttgagctgagttggcgagggtggaggtggtgccggtcccacgccgtggtggggaccgagctgcgggctggagggaggggcagcgccgagggggcgggacggggagggctcgcggagtaggccaacggttggccccaaccgccactgactacagcctgcgcccgcctcttttcgttgccgttacctgtttccggcagtcgacacgctcttcgcttctcggggcttgtctccgtgtcctccgtctcagttgtttctccctctctatcctcctctgtctcagtctccccagccttggggccggtgcctcttccgggcttcggcgaatgagacctgcggacctgcccccgcgccccatggaagaatccccggcgtccagctctgccccgacagagacggaggagccggggtccagtgcagaggtcatggaagaagtgacaacatgctccttcaacagccctctgttccggcaggaagatgacagagggattacctaccggatcccagccctgctctacataccccccacccacaccttcctggcctttgcagagaagcgttccacgaggagagatgaggatgctctccacctggtgctgaggcgagggttgaggattgggcagttggtacaggtgactcttcatcccagatctgagtctgggcctcagtttctcttcacaaagctcagagctcttcaggatctgtgccttttctcatcagtacaggaaagccctgtgtggggagcagaggcagaaaaaacagcaaaaacaatggctctcactgagtgcttattgtgtgccaggggcacattgggtcctcacagccattctgtgtcgtaggtactgttttcagtcatattttacagacaaggaaactgagactcagagaggttgccatttgctcaaggttatacagctataataaagcagtagaagctggtttcaaactc

SEQ ID NO: 16249 - DNA, 3229 bp, Homo sapiens
tttccttttattggcgtttgtaaaatttcttcttttaaaattgttatattttagagacagggtctcgctctgtcacccaggctggagtgcagtggtgcaatcacagctcaccacagcctccaactcctgggctcaaggcatcctcccacgtaggccttccaaagcgctgagattgtaggcataagccaccaggcccagcctattacctttacgttgtacttagtcccagataaaaaatgaccttagatcagtcctttcctctttggctggggagaggggggcttaaattccggtactgtgaaacagaagaatggactcagtgctatgtgacaaatctatgtatgtaaatgtgtgtatatacacacacataaattatatatatgaatatattttcattttcatattttgcaaggagagtagccaatgctctggacctctggtcctttttgtagggtaccctctgaggccgggaacctttgctcaactctcaggctgtccagggaagctttaggcggtgataccgagctacagaccaatataagagctcggggctgtggcactgaagagaggaggcggccgttgggaactgagtctccccagccttggggccggtgcctcttccgggcttcggcgaatgagacctgcggacctgcccccgcgccccatggaagaatccccggcgtccagctctgccccgacagagacggaggagccggggtccagtgcagaggtcatggaagaagtgacaacatgctccttcaacagccctctgttccggcaggaagatgacagagggattacctaccggatcccagccctgctctacataccccccacccacaccttcctggcctttgcagagaagcgttccacgaggagagatgaggatgctctccacctggtgctgaggcgagggttgaggattgggcagttggtacagtgggggcccctgaagccactgatggaagccacactaccggggcatcggaccatgaacccctgtcctgtatgggagcagaagagtggttgtgtgttcctgttcttcatctgtgtgcggggccatgtcacagagcgtcaacagattgtgtcaggcaggaatgctgcccgcctttgcttcatctacagtcaggatgctggatgttcatggagtgaggtgagggacttgactgaggaggtcattggctcagagctgaagcactgggccacatttgctgtgggcccaggtcatggcatccagctgcagtcagggagactggtcatccctgcgtatacctactacatcccttcctggttcttttgcttccagctaccatgtaaaaccaggcctcattctctgatgatctacagtgatgacctaggggtcacatggcaccatggtagactcattaggcccatggttacagtagaatgtgaagtggcagaggtgactgggagggctggccaccctgtgctatattgcagtgcccggacaccaaacaggtgccgggcagaggcgctcagcactgaccatggtgaaggctttcagagactggccctgagtcgacagctctgtgagcccccacatggttgccaagggagtgtggtaagtttccggcccctggagatcccacataggtgccaggactctagcagcaaagatgcacccaccattcagcagagctctccaggcagttcactgaggctggaggaggaagctggaacaccgtcagaatcatggctcttgtactcacacccaaccagtaggaaacagagggttgacctaggtatctatctcaaccagacccccttggaggctgcctgctggtcccgcccctggatcttgcactgtgggccctgtggctactctgatctggctgctctggaggaggagggcttgtttgggtgtttgtttgaatgtgggaccaagcaagagtgtgagcagattgccttccgcctgtttacacaccgggagatcctgagtcacctgcagggggactgcaccagccctggtaggaacccaagccaattcaaaagcaattaattggcttaggacccaatttccatagatgcaaatggcagttacagacaggttaacagaagctactgaagtctacagataatcaaaaaacttaatattctgttccctaccttttttcacttttcctcctccaaagagcaaaatgaaaattttgccttagctactgcagtggaaagagcactgaactaggagttggaagacaaggatgtggtcctggctctgccactggcttgcttttggaccttggatgtgtcacctgaactctctggacctcaggtttccatctgtaaaatgagagtattggttctaagatttctcatcttctcatccctaggacaagcatagtgcctgcatgcttcatgatcagtaagtcctggctgcataaaggactctgatgtcaaaatggaaaccaggggacttaccttttcacatgacttacccctcatccgagtgtgaggttacaagcaggtgtcatggcaggaaggaagaccagatctgtatgatttgttccatttttaataacaaaaatatccacacccttttaataatgctcagagttctgtaggctctctatcctagaggaattgagcaaaacagaagaatcatgaagtctcctaccttctacagccttgtagttctgcttaccttctcttcctcatccagaaagcatcattttctagggagaacaatgagaatctcaatgccagtagtactggataatagtgcgtattgcttctggtggcattaccctgatgatgggctgaagttcatttattagggtggttcctgatgggaaaaggacatggattaggactttaaaacactggacagaatttcccacagtctttgccctcaaggagttcaccagtttatggggctagaagagcgagaaaattcaagaaaataaatgtagctggtgggagactttgtagatgttgggctatatgttggggtgatggtagctcctgatgtaattttcttagttgcatcttcaatatgcctggagtcgtctgtccaaggcttgtccaggcttctgggtttctctcaagtttgtttttctcaggatattgtcctggcccagctactcctttacctgtgagaagatcttcaccattaggaagatctctagacccccagatctcagaatcaggcctatttgtgtaggcccatggaaatcactacttgtgaagtagagatgcctttttgtctaaa

SEQ ID NO: 16250 - DNA, 1221 bp, Homo sapiens
tttccttttattggcgtttgtaaaatttcttcttttaaaattgttatattttagagacagggtctcgctctgtcacccaggctggagtgcagtggtgcaatcacagctcaccacagcctccaactcctgggctcaaggcatcctcccacgtaggccttccaaagcgctgagattgtaggcataagccaccaggcccagcctattacctttacgttgtacttagtcccagataaaaaatgaccttagatcagtcctttcctctttggctggggagaggggggcttaaattccggtactgtgaaacagaagaatggactcagtgctatgtgacaaatctatgtatgtaaatgtgtgtatatacacacacataaattatatatatgaatatattttcattttcatattttgcaaggagagtagccaatgctctggacctctggtcctttttgtagggtaccctctgaggccgggaacctttgctcaactctcaggctgtccagggaagctttaggcggtgataccgagctacagaccaatataagagctcggggctgtggcactgaagagaggaggcggccgttgggaactgaggtgggcccagggcttgagctgagttggcgagggtggaggtggtgccggtcccacgccgtggtggggaccgagctgcgggctggagggaggggcagcgccgagggggcgggacggggagggctcgcggagtaggccaacggttggccccaaccgccactgactacagcctgcgcccgcctcttttcgttgccgttacctgtttccggcagtcgacacgctcttcgcttctcggggcttgtctccgtgtcctccgtctcagttgtttctccctctctatcctcctctgtctcagtctccccagccttggggccggtgcctcttccgggcttcggcgaatgagacctgcggacctgcccccgcgccccatggaagaatccccggcgtccagctctgccccgacagagacggaggagccggggtccagtgcagcacctgatttgtgtgaaacgttttgggtggcaatgccagaatcaccatctatattacttctgtcatcaacacgatcagcataattacaaaaattaatggctctaattgttatagtgataataaagcataaatgaaattgtgaggacatcaaaatttataattaaagacacctattaaaacagcagtttaaaatttataaaa

SEQ ID NO: 16251 - DNA, 255 bp, Homo sapiens
aaatttgaaagatgatttctggattacattcctgggttgtgccagataaggaccagagctcttttggttttaacatatcaggcttaaagtacctttggagctttcaggtagaagttcctgtaagcaattagatacatggttctgaaattcagaggaagagtattggctgtaaatggaaaactggaatctcccatacaggtaattggaactataggtatggatgaaattgcctaggtgagggaatataacttgggg

SEQ ID NO: 16252 - DNA, 407 bp, Homo sapiens
tcctaaatatttcatatttttggtgccattatcattgtatttttcaaatttcattttgtacttgttagtggtatatataggattacaactggtccatatattgattttacaaaattgttaaattattaatttcataatttatctgtaaatcttctggattttcaatgtacacattagatcatctgtaagtaatgcaatattttataattcttacatattttgttgctttttcttgtttaactgcatttgctagatcttctgtacaatgtcaaatagacagtgatagtgaatatccttgtcttattactgatttcagagagaaagcttacaacattttaccataaatatgatatttactataaatattttgtatatactcttatcagattaaagaagtttcctcctgt

SEQ ID NO: 16253 - DNA, 428 bp, Homo sapiens
atattttaataatgacactgtggctagcctttcttttccttcctccgttactctctacttataatttgcataataaatgaaactcctattttatctctcattccaatggcttctcttaggaaattaatggtttagaaaaatagcttacagctgggagccgtggctcacacctgtaatctcagcactttgggaggccgaggcaggtggttcacaaggtcaggagttcaagaccagcctgaccaacatggtgaaaccctgtctctactaaaaatacaaaaattagctgggcgtggtggcacacgtctgtaatcccagctactcaggaggctgaggcaggaaaatcacctgaacctgggaggcagaggttacagtgagcctagatcacccactgcacgctagcctgggtgacaaagcgagactccatctca

SEQ ID NO: 16254 - DNA, 483 bp, Homo sapiens
gaaactcgtgattcatttctgaaccaaatgaaccttggtacagggtaagtataggtatagccaaactgttacacaatagggctgtgatgcatttatgtagggaatgtaatcacagtgccttccatggcaaggatgattaagcattagaaaaatctttcagtgtggtttaccacataaagtggtgaagagtgaaaaagtatcagtagataaagaacaagcactggataaaatttaaaattttacatgtatacgcacatgtaaagttcttggaaaacttagaaggaaacttgcttaatcaaatatctatcaaagtcttatgttttatgctgaaatttaaaatgcgttaccatcaagatatattgaaacaggagcagttagggcatgatagctatcaccatagctctttgacgttgtactaaagaatccagccaatgcaagatgacaggaaaaagaaatgaagtgtgattagaaaaaaagtgaaaa

SEQ ID NO: 16255 - DNA, 379 bp, Homo sapiens
tcactttccttgaatgtgcaaaatgtaggcaaggacagacagtgagaaagacatattaccttagatcagataatttgtgagctttaaccctaacactagtgtattttctgagaagaccacaggcaggacagacacacctaagcatatccaatacagacacaactttcaggctccaagctattctaacagagacttgatgaacatggaatatggactgcatgtattttctattaaaaacagaaagatcatgacttaaagaagcctattaaaacttaccaaagacaggccagtcccaaaaaaaaaaagattgatataaattggcaaaaacagtatagcaactaaccctagccaacttttcaaaatgccttccattactcaa

SEQ ID NO: 16256 - DNA, 1045 bp, Homo sapiens
tgagatggagtctctctctgttgcccaggctgtgtcacgtctgacttctcagattacacctgagagggaagccccagccatcacaatgtgagaacattttacaatgaacaggatatgccaagtacattttaagactcattcaggattagcgttcaccttaaacttgacagactcagagaatgggctggccacgtgctgtgcacaacccttagtgcccttctgtgactaatatttggataattgattgttggaagctcaggaagcctctctctctcagaggggttgaagttaacttctttatttctgaggtagggaagaaaatgacgatgttctgccttttgctagactgaatactgtcttccaaaaattcacattcaccaggaatcccagaatgtgaccttattagaaaataggggcagggcatggtggctcatgcttgtaatcttagcactttgggaggctgaggcaggaggatcacttgaggtcaggagttcgagaccagcctggctagcatggcaaaccctgtctctactaaaaacataaaaattagctaggcatggtggcgtgcacctgtaatcccagctacttcagaggctgaggctgaagaatcacttgaacccaggaggcagagttgaagcgagctgagattgtgtcactgaactccagcctgggcaacagagcaagactccatcacaaaaaaaagaaaagaaaatagggtcactgcagatctaattacaaagaggtcatattggaatagcgtgaaccttaaatcgagtaataatggcatcctcatgggaagagaagaagagacagagacacacaggggagaaggccacatgagaatgaaggaagagaatggaatgatgtggacacaagccaaagaatgccagcaaccaccagaagccagaagaggcaaggaaggattcacccctagagccttcagagggagcatggccctgcgggtttcagacatcaagcttctggaactggagagaatgactttctgttgtcctgagccacccatttggggaactctgttagaaca

SEQ ID NO: 16257 - DNA, 408 bp, Homo sapiens
atttgctgttccccagttgcccttactgaaagtaatcagcatacccaaagcaacatattttggggtggcatttgctgaactccttccagtgcatatgcatgtgagtatgtgtatacagtgtgtttttgactgtctttctttaccagagattttacatctataaagtacctgaaaagctgaacacctaagaagtatttatgatataatagacatctggatgaaatttaaaaattaaattaaaactcccagtagctttgtctgcagatgccacacttctggaaacatctgtgtctttgtgtgtttgggtgtgagttcatgtagagtttttcctcctcatttttatgtgattcttaggaattgagtagacataagcttacataacaaaatatttcaactgcaaaaaaaaaa

SEQ ID NO: 16258 - DNA, 369 bp, Homo sapiens
aactacactgcatcaggccagcagctcaccaacactttgaatatacttactggaatctttcattcacaaagttgtaattttcatatgtggaaaaaaatcttagtgcttcaatttaggtttcacaaatcactcaaacagcactgtcaaaaactagccatgtgttctaggaggaggtaaggtttcacaggagaaactaatagtacatggaactccaatccaagtcaccctctcctttatcacagagatcacagcttccactcaacattccttgcctactttagtcacattaataatttcttccttctctgaactcccataaggtaacagaatccaccaaacaattcagcaattcacaactaaatagtgttt

SEQ ID NO: 16259 - DNA, 393 bp, Homo sapiens
gctttgttgactggggtgtgttatgtgtgaatcactcctatcttgtttatgctctaagcagtgatccatttctatcctatgaaaaagaaatgcctgggccgggcacggtggctcgctcctgtaatcccagcactttggaaggccgaggtgggcagatcttatgaggtcggaagttcgagaccagcctgaccaacatggagaaacctcgtctctactaaaaatacaaaattagccaggcatggtggtgcatgcctgtaatcccagctactcaggaaggctaaggcaggagaatcgcttgaacccaggaggcagaggttacggtgagccgagatcatgccactgcagtccagcttgggcaacaagagcgaaactcggtctcaccagaaaaaaaaa

SEQ ID NO: 16260 - DNA, 464 bp, Homo sapiens
cttttcttcagaggagctcaagctatttaatgacaatttgaccatttagagaagggctttgactttgtaatgtttagggtatttgctctggtcaattttccatgtggattcactagctgatgtgtggccatctcagagatggtttggggcctcattccataatttatgtggcagtgactcaaaaggtttagtacacatgataaatggtaacaataccttccacctaaataggggagtgtcattattttcacatatttttggtggcgtaactgataaccaaaacattttgttaaatttacccaaagttttcagcagccctgggatgccactacagttaagacatagctgtgtcagaaaggtggcaaactctgccctgccgaaaggctgccatgggaagacagacgcgtttttcatggatgactgtggaagcagtgcatttttaaaagggagttgcaattcccaga

SEQ ID NO: 16261 - DNA, 460 bp, Homo sapiens
cagtggccctatcgtggctcactgcaaccttgaattcctgggctcaagagatcctcccacctcagactcccaagtagcagtagctgagactatcagtgcgcaccaccaagtctgagtaattacaatacttttttctttttctttttcttttttttttcgtagagatggggtcttcctattttgtccaggctaatctggaactcctgccctcaaaggatcctcctgtctaattctctcaaagtgctgggattacaggcatgtgccaccgcacccggccaaatgcacctccttttttcaagtgtacaattcaatggtttttaatatattcacaaagtcatggaaccatcacacctatctaatttcaaaatgttttcatcactccaaaaaataaccccatatgggaggccgcggcgggcagatcactcgagaccagcctggccaacatattgaaaccccgtct

SEQ ID NO: 16262 - DNA, 467 bp, Homo sapiens
gagacggagtttcgctcatggcccaggctggagttcaatggcgcaatcttggctcaccgcaacctctgtctcctgggttcaagcgattctcctgcctcagccttttgagtagctgggattacaggcatgtgccaccatacccggctaattttgtattctttgtagagacggagtttctccatgttggtcaggctggtcttgaactcccgacctcaggtgatccgcccgcctcagcctcccaaagtactgggataataggtgtgagccaccgtgcccggccttagaacggatgaaatgcaggagtcagttccgggacccggctcagggcagccctggctccccaggaagaaagcccgtttcacactaacatgtacagaatccaaccgagggctttacaaaacaaaaccaaaaagataggaagcagccgggtgcacagacgcttagccacgcagctttgtactttgcgt

SEQ ID NO: 16263 - DNA, 308 bp, Homo sapiens
tatacaggaaaaaaaattgtttagactagttaggaagtacactgtcaaggataaacttaataaagggctaatcagttgtatacattttgaaggaagaaagagaaacactggtgtggaagagaacatcctgggtggataagattatacttgcaaagggaagaatgcgaaagtcattctcaacagtccataagtggctcatctttttttttttgagactgagtcttgctctgtgtcccaggctggagtggcacaatctcggctcagtacaatctccacctcccaggtttaagcagttctcgtgcctcagc

SEQ ID NO: 16264 - DNA, 367 bp, Homo sapiens
atagactcactggactcagaagaactgctgttctcttggttgcagcttattaaagtgagagagaacattacaatgaacaaaggaaaaggcacatgggataagcttacaagagttctttcccagtagagttgtgtggatgcgcttaattctccctgcaactatgtgtgacgtggcgagttggcagccagagaatctcacttgagccttgtttagggtttttattgggagtcagtcaggtattgtgtaactgaccttaactatgtatactccatccgcatagagtaaaaatgcatttaacacaaatcacatagttagcataaactctctaatcaagctggtgccatgtgacccaaggttctagacatag

SEQ ID NO: 16265 - DNA, 191 bp, Homo sapiens
agttatgatcacttctgtgaatatccactgcactctagcctggcaacttagtgagattccatctctttaaaaaaaaatgtccttgtattgtgcaagaggagattagcgatactaaatttattaaacaagttaaaatataagtgcagccactaagagaagaaataaagcatataacctccaaattgtagacc

SEQ ID NO: 16266 - DNA, 220 bp, Homo sapiens
ctgcatctgcccaggcttctctttattccttactacccaatccccattccagtcctctgttaataactcttacggacagtccccaactcatgatgacttgacttaggatttttctactttgcaatggtgcaaaagtgatccgcattcagtagaaactgttcctcaagtactcatacgacctctatttttcactttctgtacagtattcaataaattgcgt

SEQ ID NO: 16267 - DNA, 498 bp, Homo sapiens
gatataagcatccccagcaattccactccaaggaaaatatctaatagaaatgcatacattcatctaaagccatgtacaagaatgttcacagaagttccatctctcatagcccaatactgagaatcatccaaatgcacaattaattctggaaacagagtacatccacaaacaacaagatacattaatctcccaaagataatgctgaatcagagaaaccaaatacagaagagtacacacggtgtaatttcatgtatatgcattttaaaaataggcagaactaatctatggtgttagttactgtggtgttagaagtcacagtaatggttacactcggtgggggcaggataagtactgaaagaggaataaatggaacttttagtgtcctgataatattttctttcttaatctgggagccagtgttaatttagaaaagctcatcaggttgtaacttaagatttgtgcattttctgtatgtatgttatatgtcaataaaaagtt

SEQ ID NO: 16268 - DNA, 507 bp, Homo sapiens
atgcagaattaaaatttatctctgagcttcttggtttggatagatgtcccaaaatatagacctgtgtagacaaatttgtagcacactggacatgctttctccctaaaaatagtttttcggaaatcaagagggaattttctactttaacataaaaaggtgaattaaaaaaattgactctaacctttcttcccagtacttagaagtatcaagaaggtggaaaatatggcaacacagtagaccgctggtctttaaataggtactgccttaggtaaaaccctgaaaaactcttggtggagaagtcactcgcaacacttgtccaaagaccagctgcttcaaaatcacttggggcttttgtgaacatacgtactcccagatcccatcccagccgttacaaactgaactagactatctatgatctaggaatctaattttgttatcctgttaatttcaaggtttattgtaattcatataaattcaagatgacattaaagatatctgaaaccctgc

SEQ ID NO: 16269 - DNA, 929 bp, Homo sapiens
gagggcggccaggccgccgccgagcccgagtagacggcgtgcggctccatgaccccaccggcgccggtgggcagcagcggggaggcgggcaccgagctgtcgtggtgcgggtactcgccggccgccgcgccgccgcagccgcccatgtacgagtggccgccgttggaaggcaggtggggcaccgagtggctgggcagggccatgccgtccacgttgcccggcaagtggccgttcatcatgcccaggccgccctccagcgccaggctgttgggcgggcacgagaggccgccggccgagccctggaagccgtaggtgtccgggaggtggttgaagccgagcccgttcatcatgctgtacatgggcttgagcgcctggcatttccttcggaagccgcgcggccgccgccgaaaggagccctcctcgaacatgaactcgctggccgggtcgatggtccagtagtggcccttgccgggccgcccaaggcccttgggtagcttgatgaagcactcgttgagcgagaggttgtggcgcacggagttcttccagccctggtaggagccccggaagaaggggaagcggctctgcaggaactggtagatctcgctcagcgtcaggcgcttggtgggtgaactctggatggccatgacgatgagcgcgatgtaggaatagggcggcttctccgggcgccggatgccggcgttggtcttcttggccttggacgggccggacgacgcggggtccatggccgcgccgcctcccccgccgccgccgccgccgccgccgtgcggtggctgctgcttctcgggcgccgaagacatcgggtggctgctgccgccgccgccgctgccgccgctgctctgcgccgcggaccctcgtgccgaattcggcacgaggtgttaccattatttgagtacctgtctctatcaact

SEQ ID NO: 16270 - DNA, 494 bp, Homo sapiens
atgcttcccaggtgagtgtgggtcttagatgggataatgggaacagaggagtctgtgtcttcattcttccccttcaagccactgtgcccacagaagcagctgtcgagtttgagggacagaatggtggccttctgtgaactctgccagagttgcctctcagatgtggatactgagatcccaggagcaggtgagtactgactcaagtgggagcaacaaggcgagtatccctgcccccattccaaggagaaattgacagtgtcatttctaccttgggaaacattctgtccttttaaacatcctttcttttccccctacaggcttttgtcttattaagtgatctacttctcatctttagccctcagatgatagttgggggccgtgatttccttaggccacttgtcttttttcctgaagctactctccagtctgagctagccagcttcctcatggaccacgtcttcatccagccgggagacctgggcagtggtgcagtg

SEQ ID NO: 16271 - DNA, 171 bp, Homo sapiens
tggccgcaggtgctggcggcttggatggctcacacctcaccagacaccctggggccagggaggggcagaggctgccgtgtagctgcaggcgtggccctttcccctcctcgatgacagctcgtcctgtgctccaggtcttctccatactttgaggatatgaaaggagccaga

SEQ ID NO: 16272 - DNA, 510 bp, Homo sapiens
tatccatcatgctgagaagttgatgaactgtacagtaaatctgagcccacagtcaggactgagataagtcatttcagacaatacagtggagaatttatgagcaccagggacaatgtttcagattcctgtcatggaggtttctttacctatttagttgaataaagaccttataaagtccaagccacaatgctgtccttccacaggaataaatatgagattctaaaactttctcttaaaatgaaccattttgagagctaaagtgactagatgttgacagccaccatttttcataagtgcatcccataagaaagatgtactatagattatttgtcttgaagaagagctttgatatgtttcaaaattcgacgttggctttggaaggaaactgtaaatttacagatctttgtccttccccacaaagagccttaatctcacaggttggattatgtggaactcactgctatttttcagttctcctttaagtgactaaggaacatccagatacttcca

SEQ ID NO: 16273 - DNA, 333 bp, Homo sapiens
ccatgcccttctctcttaatccatggtaacttgaaaaccaacagccctcttagtatctgtgaaaatcagcaacctagtagccactggaggagacagaatagatttggaggtcccccagatctccactactagagaactgcctctatttgtcttgtctggcaactcactgaaaagctccattttcaggacctatctttatttgacttaactcagagctcactctgaaaacagcccttcctgcagaataatcagtggcaactgattaaccctgtggctgcctgaggcagcgttaccaggtggagctaacaaaaggctgaccaagaaacttaaaag

SEQ ID NO: 16274 - DNA, 278 bp, Homo sapiens
agaaaaatgatagtagttgaattaaacgtggaacatactgtaatgttaggatctctgtttcccatgtaatagccttcgtgattcagtcatgtgatggtaaatggatgaataggattttctttgccattttgtgctgacagacctttttttagttaattgctttttaaaataatttatagtgaatacaccaacaattctatttacaggttggtagttaaagcctcttaacagtcactgataactatattttgaaggtaaagaatatagctagttaaaac

SEQ ID NO: 16275 - DNA, 301 bp, Homo sapiens
tccctccccgggctgtgcgggagctcttgggcgccgcgtctgcgccggggccgactccgcccaggcttgtagccagaggtcgcgctatctcgccgggctggcccggcgctctctggggttgttccctcgggcggtgcatggggcccacaggcgtcggggcttgagggaagaggggccggggcctgaagggcggggaccacaacgaggcgcggggaggtcagtggagcggagagccggcgcaggccggcggcggcgcggccggaggagaaagagggcgctgtcttcctggcaaaggagtttt

SEQ ID NO: 16276 - DNA, 275 bp, Homo sapiens
gtcatgactaaatgaatgaaccacatgggctaccaaaatcaaattctctactgcatcactaatgtaatactaaataggatgctccatcaaaagagacctagaatttacataatttcccataaacttatcagaggaacaaatgtaagacaatgggaagaaaatcaagataagctcactgttgttgctggtttgtgtattcctgtctttctcaactcctcccacagctgatagaacattgtagttaagagagctggtagaaactacttcactaaaat

SEQ ID NO: 16277 - DNA, 257 bp, Homo sapiens
ttgtacatgctgttccctctaccaaaactacttttttgttgagcaatttctactcattttttaaactcactgagatgttactctcaaaaataatataacttcacaatctctagtaagtctcctctttttcttcctttgtgacttgttatttttcctcattgcatttatcacatttgtaatcatacatttatttaggtagatattaaacaattccctaaataaatgtatgattacaaatgtgacaaatgcaatgaggg

SEQ ID NO: 16278 - DNA, 602 bp, Homo sapiens
acagcagccgagttcgcgccgccggtaggtgctgccatgccagggggcgggatcgtggagcgcctcgcagaaccgcacgaaagcaaaaacaaagccatctctccggagcagaaatagaacagacgtggccggggaaagccaaatatttcctgccgtcctggtgaacacaatcgagcaaggcagtgaagcaaacatcattaggtggctggactcagacacatcacgctccagtttgggttccaaggtgcttctctctggattttcacctgccttgccaaaaatgattgattacgctgggccaactgggtgtccggcaatacccaacaaatgactttggcccctaacagcaggtcttggccagacagaaatcaatatttcaccattaaaatctatcaaagaagagttaaggcaccatctgtccctgccgcctctctatggtgtgtgaacattaaatccgacacttgtactacatgggtaatcaatatatagtggttcacagatcatttgtggttcccttttagcagtgatggatgtctggaatcgttgtgattcattttgtcagaccattaaacaagattctgtccagttccttcctgatttca

SEQ ID NO: 16279 - DNA, 521 bp, Homo sapiens
tgattggaaaggtctctctcccggataacaacaattcaatgtgccttgacattttaatagcctgccgcctgccgtcctggtgaacacaatcgagcaaggcagtgaagcaaacatcattaggtggctggactcagacacatcacgctccagtttgggttccaaggtgcttctctctggattttcacctgccttgccaaaaatgattgattacgctgggccaactgggtgtccggcaatacccaacaaatgactttggcccctaacagcaggtcttggccagacagaaatcaatatttcaccattaaaatctatcaaagaagagttaaggcaccatctgtccctgccgcctctctatggtgtgtgaacattaaatccgacacttgtactacatgggtaatcaatatatagtggttcacagatcatttgtggttcccttttagcagtgatggatgtctggaatcgttgtgattcattttgtcagaccattaaacaagattctgtccagttccttcctgatttca

SEQ ID NO: 16280 - DNA, 772 bp, Homo sapiens
acagcagccgagttcgcgccgccggtaggtgctgccatgccagggggcgggatcgtggagcgcctcgcagaaccgcacgaaagcaaaaacaaagccatctctccggagcagaaatagaacagacgtggccggggaaagccaaatatttgtggctggactcagacacatcacgctccagtttgggttccaaggtgcttctctctggattttcacctgccttgccaaaaatgattgattacgctgggccaactgggtgtccggcaatacccaacaaatgactttggcccctaacagcaggtcttggccagacagaaatcaatatttcaccattaaaatctatcaaagaagagttaaggcaccatctgtccctgccgcctctctatgcttgtggccttgaacaactgccttaacattgctgaaactcaatatcttcatttgaacaaacagagtggtgatttccaccccacagtggtgttgttcagaatgaacatgaaaataaagcagcgagcatgtagtcggctctcattaaaatcctggatatggagtccgagatatggaaggccaattggctgccaaagaaatgggagagacaacacgtgcggtggcttcaaaggaggagggagagttgagtttaaactaatgaagtaaaggcagggatgggagactgaaaggaaggaagacgctgacacttcttcagtgtgattgtatgccatacactgtgctgggtgctgttaatacaacaacgcttctggctatgtactgtttaacccca

SEQ ID NO: 16281 - DNA, 573 bp, Homo sapiens
gatttctgtggtatccgcacttgcgtggtgatctggggtataccgttttagtcttgggggtagagtgactgcttgcgaaccagttcagcagtgcctcaggtaagaggacttagttctcccgctgcagcgaagtaaaagaggaaggaggtctgtaccgcgagccgctcccagctcctggtgcggtgcgctgcgtgccgtagaaatttagtaaacgtggttagatgtagagaaggccgagctgctgccggggccacgggagtctttgtgcggtcagcagagggacttgaaagacaggtgaaaggacattggagacaagcccctcaggtctatgttgcttaggaaccttggaccgcctcatcgcactccgctctatcaaaccgttccaaattaagattgctggtgtctcccgaccagataaaagcagtgatctctcagtctcgacgagtccttaaatgcgtttgcaagaggtgttttacataactggagcccagttaattgtaaaacaaacaaacaaaaaacactagatcaatggctagtgagtatctactaataaaattttataatagttgctgc

SEQ ID NO: 16282 - DNA, 713 bp, Homo sapiens
gatttctgtggtatccgcacttgcgtggtgatctggggtataccgttttagtcttgggggtagagtgactgcttgcgaaccagttcagcagtgcctcagagacagggtctcactctgttgcccaggttggcctcaaactcctggactcaagcaatcctcccaccttggcctcccaagtagctgggactacagatgatagcttgctgtcttgcctaagctggtcttgaactcttggactcaagtgatcctcctgccttagcctcccaagtagctgggactatagctgtgtgctgctgagcctggctaactactaaagaaattaagacataacacttctaagtagccgacaaagaagaaatcaaaagggaaatcagaaaatattttgaatgaaataataaaaatacatatcaaaattgtgagacgcaggggcccagttctagaaaagatggagtaagcatcctccaccctgtctctcccactgagtgaagatgcacggaactgatatttgaggactctagaaagtaaatagtagcaggtggattggggaagaagtccagaattcaacataccaccgaactggtggtgagcttcacattttttcttctggtatgcactggcctgaactcaaggcaacctcaaatccagaaatgggcaattgcacagacagacagaactacagaagaaaccccctaggtctggctcaaggagaggga

SEQ ID NO: 16283 - DNA, 632 bp, Homo sapiens
gatttctgtggtatccgcacttgcgtggtgatctggggtataccgttttagtcttgggggtagagtgactgcttgcgaaccagttcagcagtgcctcagggacagagtcaggctggaggggaatctggatctgggcagctcctggaccaagagaatggagcaggggaatcagcgctggtctccgtctatgtacatctggactttccagataagacctggccccctgaactctccaggacactgactctccctgctgcctcagcttcctcttccccaaggcctcttctcactggcctcagactcacaacagagtgtaatgtcaaccacaaggggaatttctattgtgcttgcctctctggctaccagtggaacaccagcatctgcctccattaccctccttgtcaaagcctccacaaccaccagccttgtggctgccttgtcttcagccatcccgaacccgggtactgccagttgctgccacctgggtcccctgtcacctgcctccctgcagtccccgggatcctcaacctgaactcccagctgcagatgcctggtgacacgctgagcctgactctccatctgagccaggaggccaccaacctgagctggttcctgaggcacccagggagccc

SEQ ID NO: 16284 - DNA, 413 bp, Homo sapiens
tcccctctgctcctgtagaatcagcgctggtctccgtctatgtacatctggactttccagataagacctggccccctgaactctccaggacactgactctccctgctgcctcagcttcctcttccccaaggcctcttctcactggcctcagactcacaacagagtgtaatgtcaaccacaaggggaatttctattgtgcttgcctctctggctaccagtggaacaccagcatctgcctccattaccctccttgtcaaagcctccacaaccaccagccttgtggctgccttgtcttcagccatcccgaacccgggtactgccagttgctgccacctggtgaggaaggttgggaacttggaaaccaatggccttaagtgaaataaatgttctcagtggttttctcctctctgaac

SEQ ID NO: 16285 - DNA, 555 bp, Homo sapiens
gatttctgtggtatccgcacttgcgtggtgatctggggtataccgttttagtcttgggggtagagtgactgcttgcgaaccagttcagcagtgcctcagggacagagtcaggctggaggggaatctggatctgggcagctcctggaccaagagaatggagcaggggtaagtcctaactttcaatgtgtacccaaatacttgtatttatgcttttgataaaatgtattttcagcattaatacacatccgattatgccttatttatatatgaagaataaagttaccatgttatactgttatgtcctaaaattcaaatcactatttgagaaaccctcaaattggtgctttcattatataatgatacatttagacaaaaccccaaactaagccatttgaaacaagattctctccattgcagtttgtagcaatgttatttctgtgtatgtcatgagaaggctaaatatcagtgttaatttcttgtttgaatccgtgaaatcatgcctgtaaagcccaaacatttgtaacaaactccctaataaatttagagaaagtcaaa

SEQ ID NO: 16286 - DNA, 419 bp, Homo sapiens
gcattgcaaaacatccttcgaggatctgaattaattttgcaataatgagatcatatcagactatatatctgatattttagataacactggccagtgcttttggttatgttgtcatttttggctagatagtaacatgtattagcaaggccaaaatgtgaatacatttcacaaaaacacacattcttagccctgctcctctaacttggaataattttcatctcagtgagatattggctaggactttgattccaaaacaagtaaaattgaagcctatttctcttttcccctctgttctttattttttttctttgctggaaaatctgtttacatcttttttttcttttttgaaacacttttcccaagagatctcaattactactaagaaattttaactcagtttcagagctgaagaaactgtc

SEQ ID NO: 16287 - DNA, 1009 bp, Homo sapiens
gtgaaggggtgtagtctgacatttggaagcttaagaaccaagtctgctgccgtccaattcttttttaaagccttccatcatgtgtgtactttgcttgaatgattattttaaagtacatgtcctatttttgccaatctgacagctgtttccatagaaactagagaagaaatagtcattttcagcaagagttgttaaaactgtcttccaggcttcagctgtgagtgccagtgagtgctgcacttgctcattcggagatggtacttaaagaattaaggatctgaaatgttcgtagaggctaacaatccaaattgtttaattttctcacatcattaattttgttatcctagaagtctgccagctatgtttgttgacctgccacagctctttgaagagaatatgtcagccctgattttttttttttttatgtgctctgtagtctagtgattggctccttgaaaatgcatgaatagatttcttccctcattctttaccctttcttcaggataaaccgggtattacaaaatatcaggcactgtttctattcaaaacgacacttggttgtcagtgatagaaatgataatggttttaattatatatgcgtagtgttggggcttttgcttataccttctgtgtcaataggattcttttaaaatttttacacaagtcatgagaaatgagaaggagtttgcttgtcatgtgcagagctaagcagtgtgaatagatgtgcatagacatagagatgagagctttctttttctgtggggtgtaagtaaatcagggagtttggaatttaggaatgggtgaaggagggttggggaaggtgcctggagaagtagtaggagggcctggttcgccatatgaaggagtttgtggaagccatggaaaaccaacgaaagtccaggcgtggtggctcatgactgtaatcccaacacttcgcagtgcagtatgatcagttgagcccaggagttaaaaaccagcctgggcaacatagtgacacaccgtgtctaca

SEQ ID NO: 16288 - DNA, 157 bp, Homo sapiens
gagcagctgatacacccccaggtcaacagagtgactatgagcccatgctcaggacctgagaaacagccttgcaggccccatccaccacagacatgctcctggcctgcccaggagccctctgcctttgataagggcctgagaaacagtcccacaggct

SEQ ID NO: 16289 - DNA, 322 bp, Homo sapiens
aaatttcaacctgccacagagctgtgtctaagcagtgcaaatttcaaaacctcaagatgaaagtagacttgccattggtatccactcatcagctcagttcatatttgcctctccatttatcagtggtatggagtacaggaaataaaacaaatctggctgggttcgctttcttcctccacttccttttatagctctcaaatagtcctctatctctactattgaaaaatacatgtgtatgtttgcactaggacatatttatctgaccccaatggcctttctgaatatgtatttccatacaaataaatgcttgttggaaatactg

SEQ ID NO: 16290 - DNA, 515 bp, Homo sapiens
ttaatgtgaatgattgtatgctgaaataatctatggatgacaagtcaacctcccagaataaggcagtattttccaatagagtttcacaatatcctacccaaattaacttcaattaaattccattgctacaaatgccatgagtgtgaagttggccaaataaaatttattaatcaatgctacctagagaagtcctctattaatgacaagttttttaaaaaggacatctttggccaggcagtggctcacaactataatcccagcactttgggaggccaaggtgggtggatcacctgaggtcaagatttcaagaccagcctggcaaacatgatgaaaccccatttctattaagaaaaataaaactgcaaaaattagccaggcgtggcggtgcatgcccgtaatcccagctactcaggaagctgaggcaggaaaatagatctaacacaggaggcagatgttgcaatgaggtgagatcaggccactgcactccagcctgggtggcagagtgagattccgtc

SEQ ID NO: 16291 - DNA, 507 bp, Homo sapiens
tgaagctcacacggcaggaccagaacccaggtcagccccaccccgccctgccctgccactggaggtcaatggcgacaggagcctgggttcttgccaaactgcagacctcactccccacagtgagttccttcctgttttcacaaggatcggtctcactctcgggtaacagcgagattttcctagtgccccccaccccccactccaaccctgggcggacccttggcctcaggcaacatcacagggcagctgccgggggtgcctggcattcaagccttgctgagaacatgaaactgctgctctggggactcgcactggtgaccccaatgtggcagccgctctttcggctcttcaataatttagagaatgcatacaattcagcgggcagtttcatctctgggttcagaaacacaatgccctggggattgcttccagcgaagagtgaaattccacttgtcacagtgacagaggatgtgagcctgttcctggaaggggctctggtctctgggt

SEQ ID NO: 16292 - DNA, 492 bp, Homo sapiens
cactgctatctgcctcactcaagaaagtgattggcccaacttgttgtttgatatcagtctggcaacatcatagaggctggctgcccttgggttcaactagctggggctgaaaatatcaatagagtcctatgtgtactgagggtggggaggaggcttagaacaggaaagtacagccaggtgcaggggcatttccacctaacaaagggttgtgggcgtatttagccttagctgttgctatggtctgaagatgtcctccaaaattcatgtgttggaaacttaatcccccatgcaacagtgttggacgatggagctttatgggaaaaaccttcatgaccggactgatgccgccacagaaaggactttcaagagggggttcacccctttcttgtgaggatgcaccaagaaagcccttgccagatgccagtagcttgatcttagactttccagcctccagaactatgagaaataaacttctgttctttatacattacc

SEQ ID NO: 16293 - DNA, 427 bp, Homo sapiens
cagactcatctcagttccctaagaatttgaaaatcagtgtgtgtgtattggggagggaggtaggttttctctctggggagggccccacaaaagacctcaattttaaaatctgagcccagcaaacaattcctggccctgccactgatgaattttcttctgctctatcctcttcagacgcaattagacaattagcactcctgcccgcagcccccacaactttcatcagatgaaataacatcctaactggagtggaactattttcatgactccaaataaaaaatgcagtcttccaaatacacctttagtgaatccgtccttcctgaagtaggacttttttctttgtcttctgtttctaagctccccattttgctttctatctcaatctaaaataatgaaataaaacaaaatgtttggtcggccactaatc

SEQ ID NO: 16294 - DNA, 494 bp, Homo sapiens
ggggcgtgtttctgtatagaggtggggctagaggagggggccctggttctgtatagaggttggggtggaggtgattaagatgataagctcttggctcttttgcatgtctgagttctgtgactcaccagtccctctgtgaccttgggaaggtcactttcctctcagtttttccatctgtaatttcatggttcccaaaaatcaatgcatgtgctgctctctggggcaaagattgtttttaaaaatcactctgtagtgaaatgagggaaaaaaatgaccctgaagtaaggttttcataaaagaaaacttaatacactctaaaaactgtctctcattctgtgacttgtcctttttctgggttaaacttcgcttttgttatgaaatgatgatgaataagagactaaaagctagtcgttgggtttttgttctgttttgtttttgttgagacagtcttactctgttgcccaggctggagtgcagtggcacgatctaggctc

SEQ ID NO: 16295 - DNA, 354 bp, Homo sapiens
caatggacactgcctcgctggatcacaagtgcagcagatccacccctgccagatccagagggttggaagtcagctgcgggtctgcaatgacggcaaacagtggtggacggcgagtgaaagctcagctcgagccataaaaaacacagaccagaagagtgtgcagttgcaagatttaatagagtgaaaacagagctcccataaaatgggaggggacacaaagggggttgcccttcattctgtttttcataaggactgtactaatttacactcccaccaacagtgaataagggttccattttttgcacgtccttgccaacacatcttatcttctgtgtttttgatagtagtcattct

SEQ ID NO: 16296 - DNA, 480 bp, Homo sapiens
actttcaagatcatataatctacccccctccctggttattggacactcagattgatacttgccttttgcaaggttgcacattctgtttagagaagagtagcggctcgattccaggagtcctgattatcagcattgtaccctttctactacgccatgggggtaataaattggaaatgtacccgaattaaggaatagaaagagcttggcatgagaaatgtgccctcagtctaacgagcagctttgggaaatggttcagatggagtggactgactaaatcattgaactccaaggaggcatgtcgggtggaccaaagaggtaggagagaagtgaaaggccactaagatccacgcaggctgagattcacatcccctctgcaccacatgctgactaggtgacctcgggccattcttgaaatgtctagtaccttaatgttagaagctaacaaatgcagaagttctttcctttctcgtcttgtgagat

SEQ ID NO: 16297 - DNA, 403 bp, Homo sapiens
tagagacggggtttcaccatgttggtcaggttggtctcgaactcttgacctcaagtgatcctcccacctcggcctcccaaagtgctgggattacaggcgcgagccactgcgcctggccccaagtaaactaattgaaaatactctggggtagtttctgtaatctgtaacttgagtcaactctttcagattgtattatttaaattatcctcttccatctttgaatctactataaatcttgtttttccaagcatctattcactgagactatagtttccaaatgtttcagttcagttcacttgagcttgttagatgcccagcactatgggggagtatgacatagaccactatagcagtctcagtcctcatcttaaaagaactcatggaaccttaaacattgcagcca

SEQ ID NO: 16298 - DNA, 455 bp, Homo sapiens
aaggtagtgaggggctgttgaagcggtgtcaggagagagtttagttagttttcatggctttaggtaactgaagtttagtagccatgtggtttaaaactggagggtacttggctgggcacggtgtctcatgcctgtaatcccagcactttgggaggccaaggcgggcagatcacctgaggtcaggagttcgagaccagcctgaccaacatggagaaaccccgtctttactaaaaatacaaaaattagccgggcgtggtggtgcatgcctataatcccagctactcaggaggatgaggcaggagaatcacttgaagctgggaggcagaggttgcggtaagccaagatttgcgccattgcactccagcctgggcaacaagagcgaaactccatctcgaacaaaacaaaaaaaactggagggtactaggccgggcacagtggctcacgcctataatccc

SEQ ID NO: 16299 - DNA, 1300 bp, Homo sapiens
aggcatgagccaaccgcgcctggcctggccatgctaattctttcatgtattgtctataactgctttcatactataacagccgagttgtgtagttacgacagaggctatatggcttgcaaagcttaaactatttacgatctgttcctttaccaaaaagtttgctgactactgctgcatatggtatgctgaattgggtttaaatggcttgtaatagccctgaaaatttaagttggctctcctgtcccctgccgttgaggctggactgcatgagattattgtatctgttggctgtagctgtgactatgagctgagtgccatgtcccattggatagcatgtacttggtgacccctgacccacatacagctgactctttaaggcagttccctgccacacagtcaaggacaggaagatctggtgtgatttcccagatggggagttgtgcctattactagcatcccccagaagtagtgagagatagcattagctaatgggtaaataactggcttaaaagtgtaaactcctaggttttcacactccagtttttatgtggtcctggatatgtgattcttttctgccttggcattcctgtctaaaacactgatctagcaatcccaagccaccctttcctttttgcggcccttgttctgaataaaacagtgatttcatgtctcttctcactttcttccagaaggcagctagccagcacatactcactgaccagttgctgcctgcacagcagtgttttcactgctgtgttggagaaacccgaagtcttaaagggccataaggtattatttaaagagatcagtgtcatagtttaactgtcttcacagttccaggctgtaggaggtacagtttctgaggacaggggcaatgtatgtgggtttggtgatcatttctaaggcctttttcgatgacccctttgtcctttctgacacattagaattgctctttgctgctgcctgaaaaatgatgtcctcatgctggacagccccagctgaaaactcaggctgctgccttgacctatttcccttctccctgctggcattaaaagggaggatgcccccggggagctcattctgcaggctgcagtggccagggcagagtcctgggtttcctctctctcccttactccctgctttaaaaaaaaaaaaaaggtacagaaaaacattataagcaactgttgccattggggaaaaaaaagtatttacgtttcaggggaatgtggcctcagccatgaatattggtgtgtatttatgaaggggtgtatgtctgggaaataaaacttagaatacaaga

SEQ ID NO: 16300 - DNA, 424 bp, Homo sapiens
tattaagtaagttctcctgtttttattagctgtgatctgccttgaggcgcccaagtggattcccttccgaatgggtgctcctgtttagtaggtggtactcctgcctcttctgttagccatggacactgggcacttcccctgtgcccagcctgcccccctgcccctatactcacaggtacttgtaaggcccactgtacgtgttccctagcctcatgaccacggtggagccaatggctctgggaacaggctcaccaggatggcggtttaaatgcccaaatgccctgtgcatgcacattctccatccttggtaaggtgctccctcctactggtttgcttgctggggagagaggacttgtttttttttttgagatggtgtctgactctgtggcccagactggagtgcggtggcacaatctcagctcac

SEQ ID NO: 16301 - DNA, 583 bp, Homo sapiens
actaatggagcacatgaatggatagattttaaagaaatgcctaggctgggcgcagcagctcacgcctgtaatcccagcactttgggaggccaaggcaggcggatcacctgaggtcgggagtttgagaccagcctgatcaatatggagaaacgccgtctctactaaaaatgcaaaattagccgggtgtggtggcacatgtctgtaatctcagctacttgggaggctgaggcaggagaattgcttgaacccaggaggtggaggttgcagtgagctgagaatgcaccattgcactccagcctgggcaacaagagcgaaactccatttcaaaaaaaaaaaaaaaaaaacatggccagttgtttcactgctctctgacagaatcctgacagaatctcttgctctaggtagaacaaccaattttttattttaggctactcatctgtgaccttgataatatggagttagaattccttcctcctttctatttctttccgcactccctgtctccttctttctctttcctcccttctcccttcctccctctcttccttcttctgtctttccttctccttttccctccattccg

SEQ ID NO: 16302 - DNA, 553 bp, Homo sapiens
aactgggtgtcttttaaaatttatttattttttttgagatggagtctcactctgtcacccagggtggagtacatgagccgaggttgcagtgagccgagatcgcgccactgcactccaatctgggaaatgagcaaaactctgtctcaaaaaaaaaaaaaagtaagtgtcccttcagccctgaccactgcccaggggaaacctaggttcagttgcctgatctaggcagtgtctgtggggacacacattggctaccaagggtggagaaactgggctctaacgtgaagggctggctcgtcactgtcaggtcagaaccattttagataaaatttccagaaacattttatattgaattttatgtcttacctctcatatttattcaggtaaaccttccagaaagaggaaagcagagcatgaagaggaagaagatgatataaagccctaaaatgtgcactcattgtattcaatagtttgttttaaaacaattatgaaatgacttgttttaactgaagttgagttgcttttgcataatcctagttgtgaataaaaagttttc

SEQ ID NO: 16303 - DNA, 370 bp, Homo sapiens
taatttattcagcatctcggtgctttgtggtgagggacttttcacattatttacttggtaaactttctatgtaagtacagtttttttttttctggtactcaccatggctggaatgctcacattttcaacatataccccagtatcctgagaacttctagagtactaatttcatctctggggaagagggatagaaattttggtgaaagcaatacaaaaaagtactattgattgaattctggcactgaaccaggactatgtgtatgttacctctagttcttataacaaccctgaaaaaataggtggtattattacaattttagggaaggaaaaaaagtttcagaaagtcctattgcagtaccctgcacctagt

SEQ ID NO: 16304 - DNA, 770 bp, Homo sapiens
gcttacttgctggtgtcctgtcacattgcattgcttgaactgtgtcagatcgcattgagtaactttgcttaatccggcgctgacgtgacccgctgctttgcaacacttaagacaagtgtgtaggagcttttctcctcagtccattttgtgtgtgtgtgagtgcagtttaccagatgaggcatatgtaaatactattcgaattgaaaacacatctatttaagctagaatttattaaggggcctgtaggagtgaaggcacaagaaacatttactcacagaccccgacaggcttctacagaagactcactcctttgccccagaaaataccacgtttactaaattctgatattcacagtttcctatgtggaaacttctgaaaagtttagggcacactatggctgacagccggaaggtaaacttggctatgattttctgttgggccaactccccatgcccctgagaaacacattcttcacaaaaaataattgtaataggccgggcgcggtggctcacgcctttaatcccagcactttgggaggccgaggtgggcggatcacaaggtcagaagatcgagaccatcctggctaacacagtgaaaccccgtctctactaaaaatacaaaaattagccgggcatggtggcgggcacctgtagtcccagctactcgggaggctgaggcaggagaatggcgtgaacacgggaggaagagcttgcagtgagccaagatcgtgccactgcactccagcctgggcaacagagcaagactccgtc

SEQ ID NO: 16305 - DNA, 380 bp, Homo sapiens
gtaaatgatgaaaaatagaatattatgaactctcatatagcaattaatggctaagcttatgtcatctgtacctccaccttacccctctctcctctctctttttttagtttctatatagagatggggtcttgctatgttgcccaggctggtctcaaactcctaggctcacgtgatcttcccgctttggcttcccaaagtgctgggattacaagcatgaaccactgaacctggcctcacatgttaatttttttttttttaaactttattctgggctgtgcacagtggctcatgcctgtaatccctacactatgggagaccaaggcaggtgaatctcttgaactcaggagttcaagaacagcctaggaaacatggcgaaactc

SEQ ID NO: 16306 - DNA, 366 bp, Homo sapiens
ttcaaagccaggactacagcatctacaaatctctgactctcctgcctctctcttaaagggactgttgaaattaccctgggcttaaccaagaattatctccctgtctcaagaaacttaacttgattacatgttcatggattccagggagcaggacatgggtatctttggggaccattattctgtctaccacatggacaaagccaatactcagctcagatttccaattccaagtccagtgggtttctgcttgggactgcactgagagcaagaccatacgcacaggattgcacagaagagctggcattttggcttttatgggagaggtcttctcaatggtcctccttaaacgactccaataagaatcag

SEQ ID NO: 16307 - DNA, 757 bp, Homo sapiens
ctttggcgggaaagagtctcggaggcggggccaaagggggacggcccgggcggttgctccggaaacccgggtatcttcgtagggtgcgtctaatcccagagctgagttgcgggtgattgaacggaagagctggggcgttggtttgtcttcccgcccctgctgcgaatagaccgtggctgcttagacagatgtgtctaatttagcgaaaccgatttagattccttaatcctcttcattaagtaccgttccgccttctcgtcagaactttgcatagctcgggtcagcactcctagtgctagtcgcagtgggtccgtatcccgaccggcaacgtggtacccgccaaccagaaggggtaacaccgtaccgcctatgggacccacacctttttatctcttgttagtcgcctgtccgtgggactagcgcagaatgcctgcagaatgaatcgtttctgttgtttcctttcaaagaacgagaaggaagaaagggtgcgtgtgtgcagtccttttttcaaaagttttccctaaaagttactgatacaccaggttttgaaaataccggtcctcccaaagtgctgggattacaggcgtgagccacagcgcccggctggctgttgcttcttaacacctttattacttttgtaatcatgggtatgagttgattttctggtcagaaatttcagtagagctaatttcatttaaatgtgtgagatgtggtaaagttttgacaataaatacaaattttgacaaagcaaaaaaaa

SEQ ID NO: 16308 - DNA, 452 bp, Homo sapiens
aatggacttaaatcccttaaacccagacatcttctgggacctgacccccaataattggttaccagtgtgtcaggcaatctggactttgccctcaaaagagcagtggttcctgtttctaggttgtggatcttcagataaattctgtcattttcctttcacttcctgaaagccagggtcggttcatgaaaagctatgaaacagcatgctaaatgtgaaatgtcaaccctcactaaactttgccggttcagagcatcagatgaagacttcattgggttttacagtggctttctgatttttggtagtccattgaagaagggagtttgaaagttgttgtatactgttaacgattgtctgcccatgtcctgcccaaaataccatgattctttatggaaattatctttaataaagctggatacagtttggcttgggaaaaaaaaaagaaatgcacaaag

SEQ ID NO: 16309 - DNA, 393 bp, Homo sapiens
cattccatctcccaatctccttctctgtgtctactgtgagccatggtgaggcttacataatgtaatacttacatgaaatactctattaaaaatataaaccagaaatgaggggccaggcgcagtggctcacgtataatcctggcactttgggaggcgaggcaggccaaacatttgaggccaggagtttgagactagcctgaccaacatggtgaaaccccgtctctacaaaacaaacaaacaaaaattagccaggcatggtggtgcatgcctgtaatcccagctactcaggaggctgaggtacgagaatcacttgaacccaggaggcggaggttgcagtgagccaggattgtgccactgcactccagcctgggcaacagagtgaaaccctgactc

SEQ ID NO: 16310 - DNA, 357 bp, Homo sapiens
aatggtttttttattataatccaaaggactcctagggagacaaaagaagttggagatttttccaaactcctaatcagaagagagtccacaagccaaaactagcccacatgcattttcgggtttggcctggaaatattttgtaacactttaaaggatttgttccaacatttaaaatagaagactttgcatggcaattccaatgtcaggcatccctagaaaaatcagaagagttggcaacctgggactcaccctcctgcactccaacaattggctggggtagagtagcagtagcctgccccttaatttggcctgccacgttctcttatatactatggacctatcagctccacttcactc

SEQ ID NO: 16311 - DNA, 424 bp, Homo sapiens
atgtactcttgaaaaagggagcatgagcatcctttctctaggtagatgtggttggcggcattataaggtgaaggcgtgaagagctggtgccatggtgtggtgataaggcgactacagcgggcatctgggggtctggattccagtcaattctgctggccactagcttgctgtgaggcacagaaaactttacctctctagacaggggtgttggtaaaatggccaacaccaattggtaaaatggccaattgctatctatgaatgtctgtgatactaaggtggaaaatccataaatgtcaacaacaataaagaaggataaattaggcagttacaagaaaaataagtgctaaaataatgatttttttttcacagagcttacatcaaatgattatttagatatagctcagcctcttggaatctggtaaaa

SEQ ID NO: 16312 - DNA, 366 bp, Homo sapiens
atgtactcttgaaaaagggagcatgagcatcctttctctaggtagatgtggttggcggcattataaggtgaaggcgtgaagagctggtgccatggtgtggtgataaggcgactacagcgggcatctgggggtctggattccagtcaattctgctggccactagcttgctgtgaggcacagaaaactttacctctctagacaggggtgttggtaaaatggccaacaccaattggtaaaatggccaattgctatctatgaatgtctgtgatactaaggtggaaaatccataaatgtcaacaacaatatcacagagcttacatcaaatgattatttagatatagctcagcctcttggaatctggtaaaa

SEQ ID NO: 16313 - DNA, 553 bp, Homo sapiens
aaatcccgggagggacctgaagtgccttgtgggcggctccaggactgggccataggaatatctgctccccgcagggcgagaccccagctggtttgcattgtggaagctgcctaggcgttccccaccaggactgggggtgctgccaggaacactggggcccagcaggctgctttttggcagctgaagggggaggcattcattggcctccgttttctgcccacagaccgtcttgagcagcgtgggaaggaggtgagctccctggctcttaggagtattcaagagcaggttatgtgtcgttttcttgggtttctttctttctttttttgagacagagtctcgctctgtcacccaagctgtagtacagtggccccatctcggctcactgcaacctctgtctcccgggttcaagcgattctgacctcaggtaagccactgcacctggcccaggttttgtttttgatgaatacaaaggattgttaagtcagtgatttctccagccacagcagcatttcaaatgagcaggttttacttaaataatacaaatcatatccta

SEQ ID NO: 16314 - DNA, 2523 bp, Homo sapiens
agacaattaacagggtaccggtcttttactgtagtgccccagttgacagaatcatgcatcagaagcttttatgtgaaagtggaatctttgttctggagaaaatcaaagtgtgactgtatttgaaagccagctcgttgaaggattccttcttctaatgagctgcgccagtagtaactgaggtgtggtgattagcgaaaggtcactcctgccgtgccaccttccgtgccgatttccctacctaacacggggccagggaaggcagcgagcgcaataaatcagaacacaggtgcccattaacctgccgtgaggaacggtcagagagccttttccttgtttcattccaaaaaggtggggggagagagcaaggagaacaggtttttggcatattagaaccaagcacggtttgtgttaatcaaggacaccctgaatcagtgcaatgaaacctacatgtacagaatgaagcgttttttctttgtcatcatgaaaactcctttttttctacctttctgtttctttttttaaatatgtatccttggggtttgtttattttttttttcttgtttcacttcaaatgaatctggaaaaactttccagggggcttctccctgggtgtggtgtgtgatcggcagccccgccgttgtggcccgaggctcctggaagctcatcagctgatggtcttccttggcctgtagtaaaaatactgctgaattcctcgttgggctttaaatccattggcactgccacctggttccgttgtaacatagcttttggattattagaaataggaataacttgatagttaaatcattcagcagcatctttacgaatatggtttgggaagctggccttggagctaagaatcacattgaatggttaatttatttttaattctatgaaaggagctggagagagagaagtaaaatattcaggggattttctgtgttttaaaagagaaaacctcctgattgcaagctctaaaataaatgctaagatttgtcacactttcagcccacgggagatttgcttttctcgcatagtatggactcaccaggatctgaaattaggggctttccttagaggtggcctcaggctttcctacccccacagttggattatgcagagaaggtcactgggtcctgaggctgctgccgagcgtgctgtcccgggtggacagcgtgccctgtcatctttcattaggatgtgtgtgcctgtgccgcaccagccacaggtcaggatgccagcccctgcacgccctgcgtgctcatttgaaaactgagggtatctgggaagtcaccttacaaggtgccgaggagcagatggctaatttaaaggcaatctgtatgtgctctgagcctcccaaattatccatttcttgaatcctcaatgtgtgaaattcagcacactaagtcctcacaggctaggaaatcaaatgctggacaggccattccctaccatcatctggagtattcagagtatttggaatattcacagtcttcaaggtgtagctgtcgggctctgtgaaggataccttgcatttatagggatcgtcaggtctcctcttcctacgtatttgaagtattatggcttggagtactttctccaccaatgaagaaaagtttatatggcctctcctacgctcttgtcttgtcccaaaagtagggcttaactctgtccttgccatcaatctgtgcacatgttatggagtgaccatggtgaatgggcgatagaggttccttcctaggagaaactttcccagcttccccaaatgtgagaggggcgcctctctcccgaattccccagagccctttcctcccttccctctgccctcacctccctggatgcttcaggatactctgtggatactcttccgtgctccaggagagcatggccccgtggctgatagactcagctctcacccctctaagagctgctcatgagtatcctcgagtggatgagtgaacagatttctaactcaacagacataaatccccagtggagcttaagttaaatgcctggtttttaaattaagaaatatgacttcagcaatatgtataaaccaaaggaacattaaactaatgatagtatctttacaaatgagttgttgaggatttggagatagtttgtataacataaaacataacaaatacagtagaaagcatatggtagtgggattgaagaaacccgagaggttatttatcccaaacaccacctgatgttacagtgcttattgagtgattgatactgtgtcctacgtagagggggcacataaacaattcacatgtaatttttctgtattacattgacagatatatataaaatgatctctgcatctaaaattcaagcagtccagcctggaatactatcaccaaaaagtgaaaactgattttagaaacgaataatattttgttgtgaacaactctgaaaacatactggtcgatgaggtttatagctagagtctaaaatgccacatttatatgggtgaaacattttcagcttcaggagaaaataaaaccaaaaaaaaaa

SEQ ID NO: 16315 - DNA, 485 bp, Homo sapiens
agacaattaacagggtaccggtcttttactgtagtgccccagttgacagaatcatgcatcagaagcttttatgtgaaagtggaatctttgttctggagaaaatcaaagtgtgactgtatttgaaagccagctcgttgaaggattccttcttctaatgagctgcgccagtagtaactgaggtgtggtgattagcgaaaggtcactcctgccgtgccaccttccgtgccgatttccctacctaacacggggccagggaaggcagcgagcgcaataaatcagaacacaggtgcccattaacctgccgtgaggaacggtcagagagccttttccttgtttcattccaaaaaggtggggggagagagcaaggagaacaggtttttggcatattagaaccaagcacggtttgtgttaatcaaggacaccctgaatcagtgcaatgaaacctacatgtacagtaaaagccggtaccgagctcgattcgtatc

SEQ ID NO: 16316 - DNA, 388 bp, Homo sapiens
gatgcaaggtgttctggcccagtatccctgtgacattctgtatttccttatctaattggctgcttagctttttgtccatcacgtatctttactgtgtatcacctatttatctctctgtaattccatcatcataattcccatccccatcaatgttgcctttccaactagaagtccatgcagagttccacagttcttaaccacacataatgtctcacacaaaataactggtttagtaaatatttctttttagttgttgttttgtggaaattctttaatttttgttcatttgaaaagaaaagaacatcaagcaacccaaaaagtgcaaaggaaaaaaaattcattcaaattttattattcagaaataaacgttacctttgtgactatcact

SEQ ID NO: 16317 - DNA, 590 bp, Homo sapiens
agacagtgaactatagttcataaaaagaaacataatatcatatataatgatagctgaacataatagagttcttcttgttaatatacacagtagttctaatcctcttcttattatacctcctctaagctaagagacagcaggcctgatttctagtcctgaaattcactaaccagagctatcacctctgtagttaaatctcactatagagataatcgcctcctgttttaaaattgtgttccagtgttgatacttagggttggaacttattctagaatcatgtaattcttaataggaaaaaaaaatagagttgtacaaagatcttgtagaaatatttaaaataatgaatttccattttgtttttggatcagctacatttatagagcagggatttcttcagcgatctctatcttaataatggggtggagtgagcagggcatgaatcaaggccaaatattcctctgggattaaatgaggggtgtcttctcttccagtcacaagcatgtgtacttagttataaaaataaaatagaatatacaaattaatgaaaatttttcagcacatctgggaaggattttcagatgatgagttgc

SEQ ID NO: 16318 - DNA, 536 bp, Homo sapiens
agacagtgaactatagttcataaaaagaaacataatatcatatataatgatagctgaacataatagagttcttcttgttaatatacacagtagttctaatcctcttcttattatacctcctctaagctaagagacagcaggcctgatttctagtcctgaaattcactaaccaaaaattgtgttccagtgttgatacttagggttggaacttattctagaatcatgtaattcttaataggaaaaaaaaatagagttgtacaaagatcttgtagaaatatttaaaataatgaatttccattttgtttttggatcagctacatttatagagcagggatttcttcagcgatctctatcttaataatggggtggagtgagcagggcatgaatcaaggccaaatattcctctgggattaaatgaggggtgtcttctcttccagtcacaagcatgtgtacttagttataaaaataaaatagaatatacaaattaatgaaaatttttcagcacatctgggaaggattttcagatgatgagttgc

SEQ ID NO: 16319 - DNA, 278 bp, Homo sapiens
atgcggtcagagaggttcacagaatgaaaggcagtctgatgagtgagtgagatacacccgcctgtagagcacaatagaaaaatcaatagtaaggggaggtgaaagagtttcagctgggttttattgagcacaaagaagacaaactggcttttgctgtgacttcaactgtatgttaatagtgctttttaaaaactacagtacaggatttggggaaaaaaaatcacacggtaaaagttgccagccagtatatgtaagtgcacacacacacagagatgagg

SEQ ID NO: 16320 - DNA, 509 bp, Homo sapiens
ctttagaacactagttcactatcttctcagtttgctggctctctgtttaaaacctgctttccctcccaccaaacttggcctcttgtgtttggctttcgagcagcaaatagccaaacctgggtctggttacataagtaggtctgggatcttgataatggaccatctgcaatgtttgtatcttctcatttgactcagtattcagtaattagagaataattaacagctattttttatcaaaaaaaattctgcacttctttccttaccttgtttatttccctttagtttatgatttataatggtccattgttttgtttagaaaacagcaagtctcgaagtaatgcatttgctgaaaaaaatggacttcagaaatatgaatatgttttacatccaagaactacaggctttacttttgtggtagaccgtctaagagaaggtaagcacccatttcaaaatgtactttttaataaaagtggcaaaaattgctaagctttatatatagccctttagag

SEQ ID NO: 16321 - DNA, 235 bp, Homo sapiens
ggtgtgcacctgtaattccagctactcaggaggttgaggcaggagaattgcctgaacccgggaggtggaggttgcagtgagccgagatcgcaccactgcattccagcctgggcaacagagcaagactctgtctcaaaaaaattaaaataaaatacagttataaattatctcatctatgacggcttttctgaccgttattccccttcactacaattgataacttccttctttgtgc

SEQ ID NO: 16322 - DNA, 420 bp, Homo sapiens
attgggaaataagcatacttaggtccttttatgaatggacataacagcaaaataaccttttacacaaatagttttaaaaagtctactcacagagctaaaatcacacttaatggagaaagaatgaacgctttaccttaactagcctcaggagcgacacaagagtgtctgctctcaccacccccattcaactttgtagtggaggttctagccagcgtagttagaaaatgaaataaaaggtatccagattgtaaaggaagaagtaaaacgatctctatttgcagatgagatgatcctgtagagagaaaatcctaaggaatcacctagataactattccatttaataaatgagttcatcaagactgcaagatccaagatcagtatacaaaaatgaattatatgtgtatatgctagcaaggaaaa

SEQ ID NO: 16323 - DNA, 558 bp, Homo sapiens
ttcaagtgattctcctgcctcagcctcctgagcagctgggactacagatgtgtaccaccatgcccgactaatttttgtatttttagtagagatggggtttcaccatgttggtcaggctggcctggaactcctggccttaagtgatccacctgtctcggcctcccatagtgctgggattataggtgtgtgccaccctgctgggccgagaatgtgcttttgactgagggtggaaagtcagcagctgcagcccaagaagttagagccaggggcagtgcctttgatgggaagcttgggggtctaaagaaatcagaaaggggagaaaataatcctgcgtgtgctcagccctcactcagatcaacagcccctcgggtcccagctagatgtactttgtagaaggctttttttctccccctcaccctcaaaactccaggattaatgtgctattcccttttttctactgttctctgtctccccccaacccatcagcagtctgagaaatgctatggtggaaaaaaaaaaacaacagccctataaccagtacaaacaaaaagccaagac

SEQ ID NO: 16324 - DNA, 454 bp, Homo sapiens
tgatctgttattgcagtgttcactctcactgtaggcgaggtacatcctaaaagggtaggttcatgggacttgggaactcaggctgtgtttgcaattctgattcccacaagtctttggggctacaatttaactaatgtatcacattacctgccacctgcagagcttatctaacaagctaattactttgatgagaataccgctgtaatatcctccaaaatggcaaaaacaagtagtgccaaagagatctcaaaacatctagtacatctggaaagaaaaataatagaagcattccattcattaacaaaatgacagacatataaacacctgatttgcaaattaactttatggacaaaaaagtgctcccatctccagtactgactcccttgcaacagatgacatgagttgctggtatccacactagtgcaattagaaaaggcatggtttgacatgagga

SEQ ID NO: 16325 - DNA, 312 bp, Homo sapiens
aggcaggagaattgcttgaacccaggaggtggaggttacagtgagccgagatcatgccattgcactccagcctgggcgacagagcaagactctgtcttcaaaacaaaacagaaggggcagggtgtggccacaagcccagattcctggtcaagtcaggccccagaagtgtagcatttcagggtgtatgggaaaggtgacagagcccaccaccagcccttaactgctgggctgaccctaccccatggccagtgtatggttgatgaacagagctcccacttatcccattggtcagtgaacaacctatacaacagg

SEQ ID NO: 16326 - DNA, 780 bp, Homo sapiens
ttctttcaactaagtctcagagaaaagtagttatttaccatataacctacctgctttcatacctggatgaggagggctttctcacatccaggatttatccttactcttagaaaatataacttatacaacttatcattttaaagggatatgttaatagaaaggtttaatcttcgtcgagactggcacacttttaatagaaatgacaagacagcaaatagtttaggctatgtgggccatacaatctttgttgcaactgcccagttctgccattgtagcatgaaaacagccacagacaatgtgtaattgaatggatatgtatatgctccaataaaactttatctacaaaaacagatggtgggccaaatttgacctgcaggtcaggcttaccaacccctaatctaaatcattgcacacaattcctgaaaaatgaaatatacagtgggttctatcaatgtagaaagacttttaccttattagtaccattgttccataggcaaagattcgtgccaaccgtttgtttttaaattgttctaatttttatctcttagcaaaatctggtattgaataaactcgtgctatacccagttttttttaatcataagtacttttgcttaaacatgccacatcttaatgctaaaactaggcatttaatcatgctctgtgctgactctttttaataggaagcttcattatttaaaatacctgctatgcatcaagcatatactggagatacagattcagaaatccttagctcataagtagaaatgaaaagtaagaagg

SEQ ID NO: 16327 - DNA, 306 bp, Homo sapiens
ccaggagttgggggtgaagaggttgaatacatagagcagagactatttttagagcagggaaaatactctgcatggtaccttaatggtggcacatatcattataaatttttccaacttatgtaatgtacagcagtgagggtaaaccctaatgtaaactatggagtttggtgattatgatatgtcaatgtaggttcatcatttgtaacaactgtcccatgctggtaggggatattgataatgaaaggctctgcatgtgagggggcagaggacttatgggaaatccctgttacatcctttcagttttgc

SEQ ID NO: 16328 - DNA, 523 bp, Homo sapiens
agataatcccagacatcgtatcatttccttcataaacatttcactaagtaacctttataaaaacataaccatgtagcatacctaaaaaaatccagtaattccttaatatcagcaaatatttagtcaatatccaaacttccctgattatcttataattttttaattgatacataatgttttatatatttatgaggtacatgtgatattttgttacatgcatggactgtgtgattctcaagttggtatttggggtattcatcaccttgagtattatttttgtgtgttggaaacattttaggtcctttcttctagtgactatgaaaaatatatcacacattattgctaactatactcaccctactctgctattgaatattagaatgtaatccttctatctaattgtatgtttatacccatcggccaaagtctcttcatcctccctcctactcacacacttttctcagcctctggtatctaacattcttctctctacctccatgagaacttttttaggtctcacatg

SEQ ID NO: 16329 - DNA, 310 bp, Homo sapiens
gagactcttgtctcaaaaaaaaaaaaaaaagaaagaaagaaaagaagaaaatatagctgtgtgggcaatagtcagatgaactattcccctaactttgccccaattcggtgtatgactatgtacaaatcttaactctttcagatctcaaagaaaagctctgtgtcttagtttcctcctctgtagaatgagaacagtaacagtatccttctcttatcgtgaggatctaatgcaaccacgagagtaaaatacacagaaaggagcctggtactgcatgggctaagtgcctaatgaacatcagcttactactatc

SEQ ID NO: 16330 - DNA, 188 bp, Homo sapiens
aaatactgagaaatgtgatttttacagccaaaagtaacagcagtgaagtcaagagtagttaagttgtactgtgatcatatttaggaagcagctacacacaaaatcaaccaaagatctccatgcacatgttatacaactgtatgctgtgtgtgttgtaggaaacacccagaatctcaacctaaaggaaa

SEQ ID NO: 16331 - DNA, 644 bp, Homo sapiens
ccttaggagacagagtcttgctctgtggcccagggtctctctagatctctatttcctgttctgttaaaatgaagataataaatggacaggtccacattcctctatcctcatttccaaaacctaaaaagtgctgaaaatgttaagtgtgttttttatgtttgaaacaaactaatatggtagtaaaacctgaaccgatgaagcatcttataatcttcatttaactgttaatgtgattatttgcattctgctgcagaaacactagtggttttaactctgggatgctattagagtcttaaataatgtataatgttcagcatactacactaactttttagtatttaaaaaatactgaattctgaaacacacatggcccttaagggttttggatataggattctggatctattagagggcagtggcacaatcatagcttaccgtaatctagaactcctggactcagtcttagcctctcaaatatttgggactacaggtgtgagccacaatgcctggctaatttttttttttattttttgtagagacagggtcttgctgtgttgcccaggaggtcaaggctggagtgagccgtgattgtgccactgcactttaccctgggtgacagtgtgagaccctgtttccggaaaaaa

SEQ ID NO: 16332 - DNA, 466 bp, Homo sapiens
tgctattgagaaacaaatttaaataatcttcagggcaactaaggtgaaaaacaatacacatttgattgtattgtccttatgttgaaagaaaggaggtataacaatttattgggaaaaatacagttctttccaggcactgacttttcaaggtaatttatcactcagatatttatttaaagaacattaagggtgggtatggtggctcacacctgtaatcccagcactgtgggaggccatggtaggaggcttgcttaaacccaggagttcgagaccagcctgggcatcacagcaaggctcccactacaaaaaattaaacattatttgggggtgcttgcatgtgcctgtagtcccagctatgtgggggctggggcaggaggatgacttgagcccaggagttcgagtttgcaatgagctatgatagtgccactgcactccagcctgagtgacagagccaaatcctgtctgt

SEQ ID NO: 16333 - DNA, 439 bp, Homo sapiens
ctgatcctcgtgccaggcttctggttcactggggccaggggcccctcatggttgcctgggtgccagcaggggctgggcagagagatccacaggcccaggctgatctcttccctgctcagaggtctttccagtccagatcgtccaagctgcgtccagtggctcctggaggagtcagtgggtactgtggcctggcgcctggtagctggccgtttggtgccaagtgaccttgtccttgctgtgggcgtggctgccccagcagcctttccaacacggttgggagccgagcctgtggcaaagaggcccatgccccttggttgcctgagggtccgtgctctaccgctctgcccaaatgggtgcagtcagatgaaggagacagaaggccagggccgatgtcaggtggaccagtcctttcttaggtcagcaattaccatgaaatggg

SEQ ID NO: 16334 - DNA, 653 bp, Homo sapiens
ctcggaggccggcgtcggctgttgcagcctgctgcgcgcccaggggtcccgcgggttttcgggcgcagggtggcgcccgcggcaggcggcggccatgaacttctccgaggtattcaagctctccagcttactctgcaagttctccccggacggcaagtacctggcttcctgtgtccagtaccggttagtggtccgggatgtgaacacccttcagatccttcagctgtacacgtgcctagaccagatccagcacatcgagtggtcggcagactcgctcttcatcctgtgcgccatgtacaagcgagggctggtgcaggtgtgtgctgccgtgtcgcttagaatctggacaccttctgagggcccctgggaaggaggggttttgttctgtgcctttctagtttgaaaaaaaaagtcccgtgcagctcaaagccagttttcttttgaaattataacgttctctaaagtttaagaacatttaaactaaggaaactccaacgtagtcttaatttctaagcaatatagttgagaaacggaggtgttgacagcaatctagccacgcggatgtggtgtgtttcaggaagtcctaagaagtcgtgttttcttctgtgtccaaagcttaactaaatgaggtcttaggaatgacaatgtgaata

SEQ ID NO: 16335 - DNA, 2033 bp, Homo sapiens
ctcggaggccggcgtcggctgttgcagcctgctgcgcgcccaggggtcccgcgggttttcgggcgcagggtggcgcccgcggcaggcggcggccatgaacttctccgaggtattcaagctctccagcttactctgcaagttctccccggacggcaagtacctggcttcctgtgtccagtaccggttagtggtccgggatgtgaacacccttcagatccttcagctgtacacgtgcctagaccagatccagcacatcgagtggtcggcagactcgctcttcatcctgtgcgccatgtacaagcgagggctggtgcaggtctggtctttagagcagcccgaatggcactgcaaaatagacgagggctcagccgggctggtggcctcgtgctggagcccggacgggcgccacattctcaacaccacggaattccatctgcggataaccgtctggtccttgtgcacaaaatccgtgtcttacatcaaatacccgaaagcttgtctgcagggaatcaccttcaccagggacggccgctacatggcgctggcagaacggcgcgactgcaaagattacgtgagcatcttcgtctgcagtgattggcagctcctgcggcattttgatacggacacccaggatctcacagggattgagtgggccccaaacggctgtgtgctggcagtgtgggacacctgcttggagtacaagattctgctgtactcattggatggccggttgttgtccacgtacagcgcttacgagtggtccctgggcatcaagtctgtggcctggagccccagcagtcagttcctggcagttgggagctatgatggaaaggtgcgcatccttaatcacgtgacttggaaaatgatcacggagtttgggcatcctgcagccattaatgatcccaagatagtggtgtataaggaggccgagaagagcccacagctgggactgggctgcctctccttcccgccgccccgggccggggccggccctctcccgagctcagagagtaaatatgagatcgcctctgtcccagtctccttacagacactgaaacctgttaccgacagagcaaacccgaaaatcggcataggaatgctggcatttagtcctgacagctacttcctggcgacaaggaacgacaacattcccaatgccgtctgggtctgggacattcagaagctgaggctgttcgcggtgctcgagcagctgtccccagtgcgcgcgtttcagtgggacccgcagcagccgcggctggccatctgcacgggaggcagcaggctctacctgtggtccccagcgggctgcatgtcggtgcaggtgcctggggaaggtaagcacatccccgaggccacggacgtggcagccttgctgtgtgcagtctggcatcacacgggctgaactgttgaagcccagctgctgtctccggcagcactccagggaaactgccctcagagtctttgcgtaaacctcaagacggacacacaggggacccgctgccctcagctttatgggctagaagcagcctctccctgacttgaggcagctctggggctccaccctggctctgcctatgtgggtcactccaggcactgtgctggcctgcaggacaagggggtgcccatcccccagaatctgggcctcccctgctgtaatcctctggccacctgtctctctctaggcgactttgcagtgctctctctgtgctggcatttaagcggagactcgatggccctcctcagcaaggatcacttctgcctctgcttcctggagacagaggcagtggtcggcacagcctgcagacagctgggcggccacacgtagcagcggtgcactaacgtgtgcagaaacagggctactctgtgtttccagtgtgggaaaaaacacagcttcaccaggaggttctccactgtggtggtctggattcagtgattgattctatttttctatagcaaagcatttttgtaaatatgtatggtataaaactgtagttttattatttaaaataaatacttgctgatttatacaacta

SEQ ID NO: 16336 - DNA, 477 bp, Homo sapiens
gggtgacaatggcgtgttcttcctgttggtgttctagatgagatcgcctctgtcccagtctccttacagacactgaaacctgttaccgacagagcaaacccgaaaatcggcataggaatgctggcatttagtcctgacagctacttcctggcgacaaggaacggtcagttgtgctgacgcaggtgctgtctcaccctttactgtgtcctgtggccccaggtgtagaagcgactggaaaagaaaatgaagttgggggtttccgacacgtcacctcctttcacgtttctgcagtagccgaggtgctcacagaagctccttggaggcgctgggcctttgtcctgcagcagccgcaggtccgcgcatgagtcaggaggcctccaccctgctcacttgctccactctgctgagtagaaagcagggctgggcacactgcagcccgccttttgttaagggtttctccatttgtaaagggctaaa

SEQ ID NO: 16337 - DNA, 3276 bp, Homo sapiens
ctcggaggccggcgtcggctgttgcagcctgctgcgcgcccaggggtcccgcgggttttcgggcgcagggtggcgcccgcggcaggcggcggccatgaacttctccgaggtattcaagctctccagcttactctgcaagttctccccggacggcaagtacctggcttcctgtgtccagtaccggttagtggtccgggatgtgaacacccttcagatccttcagctgtacacgtgcctagaccagatccagcacatcgagtggtcggcagactcgctcttcatcctgtgcgccatgtacaagcgagggctggtgcaggtctggtctttagagcagcccgaatggcactgcaaaatagacgagggctcagccgggctggtggcctcgtgctggagcccggacgggcgccacattctcaacaccacggaattccatctgcggataaccgtctggtccttgtgcacaaaatccgtgtcttacatcaaatacccgaaagcttgtctgcagggaatcaccttcaccagggacggccgctacatggcgctggcagaacggcgcgactgcaaagattacgtgagcatcttcgtctgcagtgattggcagctcctgcggcattttgatacggacacccaggatctcacagggattgagtgggccccaaacggctgtgtgctggcagtgtgggacacctgcttggagtacaagattctgctgtactcattggatggccggttgttgtccacgtacagcgcttacgagtggtccctgggcatcaagtctgtggcctggagccccagcagtcagttcctggcagttgggagctatgatggaaaggtgcgcatccttaatcacgtgacttggaaaatgatcacggagtttgggcatcctgcagccattaatgatcccaagatagtggtgtataaggaggccgagaagagcccacagctgggactgggctgcctctccttcccgccgccccgggccggggccggccctctcccgagctcagagagtaaatatgagatcgcctctgtcccagtctccttacagacactgaaacctgttaccgacagagcaaacccgaaaatcggcataggaatgctggcatttagtcctgacagctacttcctggcgacaaggaacgacaacattcccaatgccgtctgggtctgggacattcagaagctgaggctgttcgcggtgctcgagcagctgtccccagtgcgcgcgtttcagtgggacccgcagcagccgcggctggccatctgcacgggaggcagcaggctctacctgtggtccccagcgggctgcatgtcggtgcaggtgcctggggaaggcgactttgcagtgctctctctgtgctggcatttaagcggagactcgatggccctcctcagcaaggatcacttctgcctctgcttcctggagacagaggcagtggtcggcacagcctgcagacagctgggcggccacacgtagcagcggtgcactaacgtgtgcagaaacagggctactctgtgtttccagtgtgggaaaaaacacagcttcaccaggaggttctccactgtggtggtctggattcagtgattgattctatttttctatagcaaagcatttttgtaaatatgtatggtataaaactgtagttttattatttaaaataaatacttgctgatttatacaactaaaaaaaaaaaaaaaaaaaaaaaaatttggggggggccggggcccgggaaaagcgttttttagaccacttccgtgttggaggcgcgcgcgggcgcccccatgatggtatacggtgcagacacttgtggtgcactagagcgtggttctccccaagaggagactcccgtggccaacgagcactagaggtcgcttgggatgttcccccacaatatttaaaaacacgccccgggggggaacccgaggaggcgtgctttgggaaaacaaaatcccccgagaggtggaagctccgagagagggccactaaacgagcgggggatctctcaccaacagccggcggagttcccaagagggagacgccgatatattaacaattggcccccgcagcgctgggaggtacacaggagacacggacagacgatgagcagaacgagaagtagaaatagacgaaccagaagacgaagcaagagcacgaagacaacaacacacaagcgcaagaacaggacgacaagagaaggcaaggaagaagaagggacaggagagagagacggggaggaggggagggaggggggcgcgggaggagagggagagaggaaagcaagggggcgacagaggagagaagagaacgaacgaggggagagggggggagcgaggacggcgaggggacggacgggagggaggacgagagagcaatagacgactgcacgagaaggaaagagaggagcgcgcgcgaaggacaaggacagaggggaggagaaggagaacggaaggagagacaggaagcacgggggagcgaagacggatgcgagacaacaggaccaggaggcgggaggacgcgagcccggcaccagagaccagaacggggacgagagaggaggaaggggaaggggggagcgacgagggagggcagaagagaagagaggaggagcgaagggagagcggagaggaaagaggagaaggaggggggagcggagggggggggggggagcagcggggaggagagggaggaggaagaggggcagcgagccgggagaggggagaaggagaggcagagggcgaggaggggggaggacgaggaggagagagacaagagaggcagaacgagcggggagagagagcaggaggagagaggaggagaggaaagaagagaagaagcgggggagggagaggaggagaacgaaggaggggagaaggaggagaagaggaacaggagcaaaggcgagcgagcgaggagagaatcaagccgagagcgcgagaggtgtagggaggaagcgaagagggcgagaagagacagagcggagcaggggacaagggaggataggaagagaacggaaaggagagggcgaggaggagaagagccagaagggacaggaagagacagggagtaaagagacgcaggaaagacgaaagcgagggagaaacgaggaacacgagaagaaagaggagagagcaggaagaaagggagacaacgggacggaggacagaaggcagaggaacacacaggggaaacgcaacagcaggaagaggagagaacagaagaacacacagaagcaagaaagcgaaggggagatagcagcgaagaaaacagcggccag

SEQ ID NO: 16338 - DNA, 1339 bp, Homo sapiens
ctcggaggccggcgtcggctgttgcagcctgctgcgcgcccaggggtcccgcgggttttcgggcgcagggtggcgcccgcggcaggcggcggccatgaacttctccgaggtattcaagctctccagcttactctgcaagttctccccggacggcaagtacctggcttcctgtgtccagtaccggttagtggtccgggatgtgaacacccttcagatccttcagctgtacacgtgcctagaccagatccagcacatcgagtggtcggcagactcgctcttcatcctgtgcgccatgtacaagcgagggctggtgcaggtctggtctttagagcagcccgaatggcactgcaaaatagacgagggctcagccgggctggtggcctcgtgctggagcccggacgggcgccacattctcaacaccacggaattccatctgcggataaccgtctggtccttgtgcacaaaatccgtgtcttacatcaaatacccgaaagcttgtctgcagggaatcaccttcaccagggacggccgctacatggcgctggcagaacggcgcgactgcaaagattacgtgagcatcttcgtctgcagtgattggcagctcctgcggcattttgatacggacacccaggatctcacagggattgagtgggccccaaacggctgtgtgctggcagtgtgggacacctgcttggagtacaagattctgctgtactcattggatggccggttgttgtccacgtacagcgcttacgagtggtccctgggcatcaagtctgtggcctggagccccagcagtcagttcctggcagttgggagctatgatggaaaggtgcgcatccttaatcacgtgacttggaaaatgatcacggagtttgggcatcctgcagccattaatgatcccaagatagtggtgtataaggaggccgagaagagcccacagctgggactgggctgcctctccttcccgccgccccgggccggggccggccctctcccgagctcagagagtaaatgtaagtagcacatgtgatgtcatttgttttccttttttaatgcaagattcctcgttgtccagataaacttcggatgttccttatgtttaaaaaaaaaaactttttttcccttccatgcttccagccagtgtgcccctcagcctgttggctggaggttgactagggtctgaattgcgcagtgggccgtgaaggtgcggcttctgttactgaatatgagccctggagacccggatctgacagcgggagctccgaggggatgtttttccggagctccgagaatgatgtttttcaaagaaacacttttccgtgggtggcgctcagag

SEQ ID NO: 16339 - DNA, 1022 bp, Homo sapiens
ctcggaggccggcgtcggctgttgcagcctgctgcgcgcccaggggtcccgcgggttttcgggcgcagggtggcgcccgcggcaggcggcggccatgaacttctccgaggtattcaagctctccagcttactctgcaagttctccccggacggcaagtacctggcttcctgtgtccagtaccggttagtggtccgggatgtgaacacccttcagatccttcagctgtacacgtgcctagaccagatccagcacatcgagtggtcggcagactcgctcttcatcctgtgcgccatgtacaagcgagggctggtgcaggtctggtctttagagcagcccgaatggcactgcaaaatagacgagggctcagccgggctggtggcctcgtgctggagcccggacgggcgccacattctcaacaccacggaattccatctgcggataaccgtctggtccttgtgcacaaaatccgtgtcttacatcaaatacccgaaagcttgtctgcagggaatcaccttcaccagggacggccgctacatggcgctggcagaacggcgcgactgcaaagattacgtgagcatcttcgtctgcagtgattggcagctcctgcggcattttgatacggacacccaggatctcacagggattgagtgggccccaaacggctgtgtgctggcagtgtgggacacctgcttggagtacaagattctgctgtactcattggatggccggttgttgtccacgtacagcgcttacgagtggtccctgggcatcaagtctgtggcctggagccccagcagtcagttcctggcagttgggagctatgatggaaaggtgcgcatccttaatcacgtgacttggaaaatgatcacggagtttgggcatcctgcagccattaatgatcccaagatagtaagtctggaacacgtgtttctgcctgagcaggctgttggggagggcggtgggaaactgctccttcactttgctttcttgattgtggtttattatttaaccgggcacttcc

SEQ ID NO: 16340 - DNA, 1685 bp, Homo sapiens
ctcggaggccggcgtcggctgttgcagcctgctgcgcgcccaggggtcccgcgggttttcgggcgcagggtggcgcccgcggcaggcggcggccatgaacttctccgaggtattcaagctctccagcttactctgcaagttctccccggacggcaagtacctggcttcctgtgtccagtaccggttagtggtccgggatgtgaacacccttcagatccttcagctgtacacgtgcctagaccagatccagcacatcgagtggtcggcagactcgctcttcatcctgtgcgccatgtacaagcgagggctggtgcaggtctggtctttagagcagcccgaatggcactgcaaaatagacgagggctcagccgggctggtggcctcgtgctggagcccggacgggcgccacattctcaacaccacggaattccatctgcggataaccgtctggtccttgtgcacaaaatccgtgtcttacatcaaatacccgaaagcttgtctgcagggaatcaccttcaccagggacggccgctacatggcgctggcagaacggcgcgactgcaaagattacgtgagcatcttcgtctgcagtgattggcagctcctgcggcattttgatacggacacccaggatctcacagggattgagtgggccccaaacggctgtgtgctggcagtgtgggacacctgcttggagtacaagattctgctgtactcattggatggccggttgttgtccacgtacagcgcttacgagtggtccctgggcatcaagtctgtggcctggagccccagcagtcagttcctggcagttgggagctatgatggaaaggtgcgcatccttaatcacgtgacttggaaaatgatcacggagtttgggcatcctgcagccattaatgatcccaagatagtggtgtataaggaggccgagaagagcccacagctgggactgggctgcctctccttcccgccgccccgggccggggccggccctctcccgagctcagagagtaaatatgagatcgcctctgtcccagtctccttacagacactgaaacctgttaccgacagagcaaacccgaaaatcggcataggaatgctggcatttagtcctgacagctacttcctggcgacaaggaacgacaacattcccaatgccgtctgggtctgggacattcagaagctgaggctgttcgcggtgctcgagcagctgtccccagtgcgcgcgtttcagtgggacccgcagcagccgcggctggccatctgcacgggaggcagcaggctctacctgtggtccccagcgggctgcatgtcggtgcaggtgcctggggaaggcgactttgcagtgctctctctgtgctggcatttaagcggagactcgatggccctcctcagcaaggatcacttctgcctctgcttcctggagacagaggcagtggtcggcacagcctgcagacagctgggcggccacacgtagcagcggtgcactaacgtgtgcagaaacagggctactctgtgtttccagtgtgggaaaaaacacagcttcaccaggaggttctccactgtggtggtctggattcagtgattgattctatttttctatagcaaagcatttttgtaaatatgtatggtataaaactgtagttttattatttaaaataaatacttgctgatttatacaacta

SEQ ID NO: 16341 - DNA, 802 bp, Homo sapiens
tctcagtactagctggcagttccagcttttccacggccacgcggacagtcctgccagctttgtgctatctgcaccaatgtcactctgcagcacccgcgtctgtggtgtgttcctggcgacgggggtgtattcattattaactgaaatgtctcatctgcagtacaagattctgctgtactcattggatggccggttgttgtccacgtacagcgcttacgagtggtccctgggcatcaagtctgtggcctggagccccagcagtcagttcctggcagttgggagctatgatggaaaggtgcgcatccttaatcacgtgacttggaaaatgatcacggagtttgggcatcctgcagccattaatgatcccaagatagtggtgtataaggaggccgagaagagcccacagctgggactgggctgcctctccttcccgccgccccgggccggggccggccctctcccgagctcagagagtaaatgtaagtagcacatgtgatgtcatttgttttccttttttaatgcaagattcctcgttgtccagataaacttcggatgttccttatgtttaaaaaaaaaaactttttttcccttccatgcttccagccagtgtgcccctcagcctgttggctggaggttgactagggtctgaattgcgcagtgggccgtgaaggtgcggcttctgttactgaatatgagccctggagacccggatctgacagcgggagctccgaggggatgtttttccggagctccgagaatgatgtttttcaaagaaacacttttccgtgggtggcgctcagag

SEQ ID NO: 16342 - DNA, 1456 bp, Homo sapiens
ctcggaggccggcgtcggctgttgcagcctgctgcgcgcccaggggtcccgcgggttttcgggcgcagggtggcgcccgcggcaggcggcggccatgaacttctccgaggtattcaagctctccagcttactctgcaagttctccccggacggcaagtacctggcttcctgtgtccagtaccggttagtggtccgggatgtgaacacccttcagatccttcagctgtacacgtgcctagaccagatccagcacatcgagtggtcggcagactcgctcttcatcctgtgcgccatgtacaagcgagggctggtgcaggtctggtctttagagcagcccgaatggcactgcaaaatagacgagggctcagccgggctggtggcctcgtgctggagcccggacgggcgccacattctcaacaccacggaattccatctgcggataaccgtctggtccttgtgcacaaaatccgtgtcttacatcaaatacccgaaagcttgtctgcagggaatcaccttcaccagggacggccgctacatggcgctggcagaacggcgcgactgcaaagattacgtgagcatcttcgtctgcagtgattggcagctcctgcggcattttgatacggacacccaggatctcacagggattgagtgggccccaaacggctgtgtgctggcagtgtgggacacctgcttggagtacaagattctgctgtactcattggatggccggttgttgtccacgtacagcgcttacgagtggtccctgggcatcaagtctgtggcctggagccccagcagtcagttcctggcagttgggagctatgatggaaaggtgcgcatccttaatcacgtgacttggaaaatgatcacggagtttgggcatcctgcagccattaatgatcccaagatagtggtgtataaggaggccgagaagagcccacagctgggactgggctgcctctccttcccgccgccccgggccggggccggccctctcccgagctcagagagtaaatatgagatcgcctctgtcccagtctccttacagacactgaaacctgttaccgacagagcaaacccgaaaatcggcataggaatgctggcatttagtcctgacagctacttcctggcgacaaggaacggtcagttgtgctgacgcaggtgctgtctcaccctttactgtgtcctgtggccccaggtgtagaagcgactggaaaagaaaatgaagttgggggtttccgacacgtcacctcctttcacgtttctgcagtagccgaggtgctcacagaagctccttggaggcgctgggcctttgtcctgcagcagccgcaggtccgcgcatgagtcaggaggcctccaccctgctcacttgctccactctgctgagtagaaagcagggctgggcacactgcagcccgccttttgttaagggtttctccatttgtaaagggctaaa

SEQ ID NO: 16343 - DNA, 1550 bp, Homo sapiens
ctcggaggccggcgtcggctgttgcagcctgctgcgcgcccaggggtcccgcgggttttcgggcgcagggtggcgcccgcggcaggcggcggccatgaacttctccgaggtattcaagctctccagcttactctgcaagttctccccggacggcaagtacctggcttcctgtgtccagtaccggttagtggtccgggatgtgaacacccttcagatccttcagctgtacacgtgcctagaccagatccagcacatcgagtggtcggcagactcgctcttcatcctgtgcgccatgtacaagcgagggctggtgcaggtctggtctttagagcagcccgaatggcactgcaaaatagacgagggctcagccgggctggtggcctcgtgctggagcccggacgggcgccacattctcaacaccacggaattccatctgcggataaccgtctggtccttgtgcacaaaatccgtgtcttacatcaaatacccgaaagcttgtctgcagggaatcaccttcaccagggacggccgctacatggcgctggcagaacggcgcgactgcaaagattacgtgagcatcttcgtctgcagtgattggcagctcctgcggcattttgatacggacacccaggatctcacagggattgagtgggccccaaacggctgtgtgctggcagtgtgggacacctgcttggaggtgcgcatccttaatcacgtgacttggaaaatgatcacggagtttgggcatcctgcagccattaatgatcccaagatagtggtgtataaggaggccgagaagagcccacagctgggactgggctgcctctccttcccgccgccccgggccggggccggccctctcccgagctcagagagtaaatatgagatcgcctctgtcccagtctccttacagacactgaaacctgttaccgacagagcaaacccgaaaatcggcataggaatgctggcatttagtcctgacagctacttcctggcgacaaggaacgacaacattcccaatgccgtctgggtctgggacattcagaagctgaggctgttcgcggtgctcgagcagctgtccccagtgcgcgcgtttcagtgggacccgcagcagccgcggctggccatctgcacgggaggcagcaggctctacctgtggtccccagcgggctgcatgtcggtgcaggtgcctggggaaggcgactttgcagtgctctctctgtgctggcatttaagcggagactcgatggccctcctcagcaaggatcacttctgcctctgcttcctggagacagaggcagtggtcggcacagcctgcagacagctgggcggccacacgtagcagcggtgcactaacgtgtgcagaaacagggctactctgtgtttccagtgtgggaaaaaacacagcttcaccaggaggttctccactgtggtggtctggattcagtgattgattctatttttctatagcaaagcatttttgtaaatatgtatggtataaaactgtagttttattatttaaaataaatacttgctgatttatacaacta

SEQ ID NO: 16344 - DNA, 585 bp, Homo sapiens
ctcggaggccggcgtcggctgttgcagcctgctgcgcgcccaggggtcccgcgggttttcgggcgcagggtggcgcccgcggcaggcggcggccatgaacttctccgaggtattcaagctctccagcttactctgcaagttctccccggacggcaagtacctggcttcctgtgtccagtaccggttagtggtccgggatgtgaacacccttcagatccttcagctgtacacgtgcctagaccagatccagcacatcgagtggtcggcagactcgctcttcatcctgtgcgccatgtacaagcgagggctggtgcaggtctggtctttagagcagcccgaatggcactgcaaaatagacgagggctcagccgggctggtggcctcgtgctggagcccggacgggcgccacattctcaacaccacggaattccatctgcggataaccgtctggtccttgtgcacaaaatccgtgtcttacatcaaatacccgaaagcttgtctgcagggaatcaccttcaccagggacgggcgccacattctcaacaccacggaattccatctgcggataaccgtctggtcctcgtg

SEQ ID NO: 16345 - DNA, 436 bp, Homo sapiens
tcctgtatagaggtctgctgtgcatttaatatttccagtgaggcaaagaaagctagaacaggaagagaatactttcaactaagtcatgtctctcaggatcccatatacttcaattgcttagtggagacaagccagagcatttggttgctcatgagcaattctaatcactccaagcaccctgtggtaatctggacacatacttggagcttttccagagagctgttctcaatcaggcaattgtctcgataatagaacaattgcatactcagccctatttaaagcattcaccctgctatgaccactaaaccttttgttaaaatatacaggattctcctttattctctgtgttaacacatacaaggagaaatgatagcccatagtgaggaaatggcaggtgtgctttcttgctttcccagtgtagttaatattttaagaa

SEQ ID NO: 16346 - DNA, 1668 bp, Homo sapiens
cctgaagagtcaggtcatctagggatcatagcagtgacaatgaagtctcaatataaaggaaagacttgattgttctctgagttgtgagtcttctcctttgtcctgacagagtttggatgtttcactctctctcttgcttcctgtctccttatatttgtcatgtttcagaaattcccagaataattttcacccatgattagaaataggttggatcattctttctgtacccattctgaaggccaggataataggttgaagttctttatattttggaaaatggattttgtggtaaggtaggaactaacgggtgtgtgcatataaaggttaatgctgttgtatttggatgctgatctgtgctgttttcatgacctctctcccacactatttgaatcagtctgttcagaactgtgtgtttcacctgcagtgctctgtcccagtcccatgcccattcccatcacttcactgtgatggaaatagagtttatgttcaacagtggggcatgacctctgcaatttgcttgggaaagtcttccaagcaagatggacatgatgaatacaaataagatctactcaaagtacttcaaacaaaaaataaataattcattggctcatgtatcttggccacccagggaaggtctgacattgttagttagatccagagtttcaaatgtcatcaccatggatgtgtctttttctctctctcatttcccctccccatatcttgtcttttatttattataggtttgtctcattccctggcaggctctctccctgtgataggaaagagagtccccagcagccccagggtgacatagttgttatagttcattatggaatagaagagagaagagcattctcaataacccggcaaagttcccagggatgactctgatatgtctatgtctcaggtcacatttccatctatgaaccaatcatattcagaggtggaatgctaattggccaggcctgggtcatatatacaagtctagggaagaaatgagcttcatccctgtccaattgacatggactgattaggggtattaatggaagaggtgtgccaccacaaaagaatgtaccctgggcagatcaaagaacatattctgtatgtcaggcttggcacaaaagaatgacacaagtaatatgctgtagatcagaacctctctgctaatattgcctttttagcatggttaagatagctaagatctagtactgtcactccagtatgtcccaattctacctacgtttattgaagggtcaacagttctgatctcagcattgggtaaagggtgggacattcagatttacggtccttgataaaaacaatttacaacgttccgttgtgtaataaatgtaagtgtacatatgcctgggacatcagctggaaaagggacagactatcagagagttgcactgttgcggtatgggccaaatccaacataatacccgctgtacctctagagaactaaaaccttaatttctcagatcttttctgcactaatggtctttacatacagcctacattttaactaactcttgcatgggcttgtttcacagcaggaaactatattcatcatatccttattatgatagagaatgacaacattcaaaagggtgtggtgcttctgaaaatatacacaataaatggcatgatttgacctctgtcaaattc

SEQ ID NO: 16347 - DNA, 210 bp, Homo sapiens
gttttacagataaggaaacagactcagattaaatagcttccaaaaaagtcacacagagactgacctgtgactggaattttgggctgtttggttacacagcctgtacattggctgatctactgtgttccctctctaagttcaatttattcatttcttcaggtaatacaaacttgggaaacattcttactctccctcaccttctgtttgttc

SEQ ID NO: 16348 - DNA, 1171 bp, Homo sapiens
aggagcgtttttggagaaagctgcactctgttgagctccaggcgcagtggagggagggagtgaaggagctctctgtacccaaggaaagtgcagctgagactcagacaagattacaatgaaccaactcagcttcctgctgtttctcatagcgaccaccagaggatggagtacagatgaggctaatacttacttcaaggaatggacctgttcttcgtctccatctctgcccagaagctgcaaggaaatcaaagacgaatgtcctagtgcatttgatggcctgtattttctccgcactgagaatggtgttatctaccagaccttctgtgacatgacctctgggggtggcggctggaccctggtggccagcgtgcacgagaatgacatgcgtgggaagtgcacggtgggtgatcgctggtccagtcagcagggcaacaaagcagactacccagagggggatggcaactgggccaactacaacacctttggatctgcagaggcggccacgagcgatgactacaagaaccctggctactacgacatccaggccaaggacctgggcatctggcatgtgcccaacaagtcccccatgcagcattggagaaacagcgccctgctgaggtaccgcaccaacactggcttcctccagagactgggacataatctgtttggcatctaccagaaatacccagtgaaatacagatcagggaaatgttggaatgacaatggcccagccatacctgtggtctatgactttggtgatgctaagaagactgcatcttattactcaccgtatggtcaacgggaatttgttgcaggattcgttcagttccgggtgtttaataacgagagagcagccaacgccctttgtgctgggataaaagttactggctgtaacactgagcatcactgcatcggtggaggagggttcttcccacagggcaaaccccgtcagtgtggggacttctccgcctttgactgggatggatatggaactcacgttaagagcagctgcagtcgggagataacggaggcggctgtactcttgttctatagatgagacagagctctgcggtgtcagggcgagaacccatcttccaaccccggctatttggagacggaaaaactggaattctaacaaggaggagaggagactaaatcacatcaatttgca

SEQ ID NO: 16349 - DNA, 952 bp, Homo sapiens
gggtgaggtgtggagtgtggctggccaccagcctgcaggagggagggctggaaggtggggatatggggaagggctggagaagaagagagaaatacaggacttgaatcacaacttcctctcaacaaggctgttagggccctgggtggtggtgggatcatcagctgggagtggggtgtctgagcgtggctggccatctgcctactgatcccagagctctcagcccagctgaggctgcacatgtggaccttctgcctcctggtacctcctggcccagtcaggctcagtgtctgttgctttccagaaccctggctactacgacatccaggccaaggacctgggcatctggcatgtgcccaacaagtcccccatgcagcattggagaaacagcgccctgctgaggtaccgcaccaacactggcttcctccagagactgggacataatctgtttggcatctaccagaaatacccagtgaaatacagatcagggaaatgttggaatgacaatggcccagccatacctgtggtctatgactttggtgatgctaagaagactgcatcttattactcaccgtatggtcaacgggaatttgttgcaggattcgttcagttccgggtgtttaataacgagagagcagccaacgccctttgtgctgggataaaagttactggctgtaacactgagcatcactgcatcggtggaggagggttcttcccacagggcaaaccccgtcagtgtggggacttctccgcctttgactgggatggatatggaactcacgttaagagcagctgcagtcgggagataacggaggcggctgtactcttgttctatagatgagacagagctctgcggtgtcagggcgagaacccatcttccaaccccggctatttggagacggaaaaactggaattctaacaaggaggagaggagactaaatcacatcaatttgca

SEQ ID NO: 16350 - DNA, 1084 bp, Homo sapiens
caagacagtcagtgcctctgctcataggtgagcagaacacaagatgcatggagcatcgtcttccagcaagtatgtgttggagtcttctgagtgtgcttttgacttcctagggcttttctattcacggagctgagatgaaccctgagctctcagacagggaggctctgggctggttctctctacagatggcctgtattttctccgcactgagaatggtgttatctaccagaccttctgtgacatgacctctgggggtggcggctggaccctggtggccagcgtgcacgagaatgacatgcgtgggaagtgcacggtgggtgatcgctggtccagtcagcagggcaacaaagcagactacccagagggggatggcaactgggccaactacaacacctttggatctgcagaggcggccacgagcgatgactacaagaaccctggctactacgacatccaggccaaggacctgggcatctggcatgtgcccaacaagtcccccatgcagcattggagaaacagcgccctgctgaggtaccgcaccaacactggcttcctccagagactgggacataatctgtttggcatctaccagaaatacccagtgaaatacagatcagggaaatgttggaatgacaatggcccagccatacctgtggtctatgactttggtgatgctaagaagactgcatcttattactcaccgtatggtcaacgggaatttgttgcaggattcgttcagttccgggtgtttaataacgagagagcagccaacgccctttgtgctgggataaaagttactggctgtaacactgagcatcactgcatcggtggaggagggttcttcccacagggcaaaccccgtcagtgtggggacttctccgcctttgactgggatggatatggaactcacgttaagagcagctgcagtcgggagataacggaggcggctgtactcttgttctatagatgagacagagctctgcggtgtcagggcgagaacccatcttccaaccccggctatttggagacggaaaaactggaattctaacaaggaggagaggagactaaatcacatcaatttgca

SEQ ID NO: 16351 - DNA, 686 bp, Homo sapiens
aattttttaatagaagcaaaatttaaaatcttttttaagaagtaataaaatcactctgaatggattatttttggctttatcaatttgataaatcaatccaggctgaaatatcatttataacctctagagtgagtgcccctgctcttgtctcaaatatgagagtgattatcaaccaaagttagataccccagccctggcagtcaaactcaaaagcaagcttgcacgccgtctctcaagtctctcagcattctccccaaacaagaaatcaagtgccagagcttatacacttaatatttgagaccaaaaaagaaaactccaaacgagagatttactcaaatgtgcttgtctcccagttactttataagaagtaaatccatgtcagaagaaaagatgcccatgtcttgttctgcatgggaaataagtgccatgtactaaaagaagcctaaaaatggtggcacaagtttctttaaatggctaaaatccctcaaaatactgaacatctcatcagaccatcaagagttatgttttttgtcacacattatgaaattctagatatcccagcctgggcaatatggaaaacctcgtctctacaaaaaatgaaaaactatccaggtatggtgccccatgcctatagtcccagctacttggtaggctgaggtgggaggattgtttgagcctgagaggca

SEQ ID NO: 16352 - DNA, 449 bp, Homo sapiens
catctcccacaagaggcatgatatgaggtcccgttgcctcccatccccatgactgctgcctaggaggctacatgtttgtcctccctgaaaccacgggtagctgagccatatgcttttgcagggtacttgggttctcttcctttaagttccgtgcttaaaagagcaggatagttggtgttggtgccacacgtggtactgccacttctctagttatttagaactcactgcagtttgaccatcagggatgctgtagtcaccagatttgagtgcatctcctccttaaaatgtcctcatgttccaacctccagtattattatccccaagcaggcaagtttattcctctgcttccaactttgtatacccatcttgcaactttaaaagacctgtgtacattactgccttggacgccatagacttctgtcaaattataagcacactctctatcctgc

SEQ ID NO: 16353 - DNA, 410 bp, Homo sapiens
tgcaacctctgctcttgggctcaggtgattctcttgcctcagcctcccgagtagctgggactacaagtgggtgtgtgccaccatgcctgtctaagttttgtattttttgtagagattgggtttctctatgttgcccaagctggtcttgaactcctggtctcaagtgatccaactgccttagcctcccaaagtgctgggattataggcatgagcaaccgcacccggccatgtttattcatttctttgtgaagatttaggtggttattaggaagcttcagatgcaccctgtagaagtaggttaagtaatgtagtggaaaaaatatggaattgggagtctgaggccctggcttcttctcatctgggttctgcacctatttgccagtgtgtcctaggtaaatttcttcacctga

SEQ ID NO: 16354 - DNA, 493 bp, Homo sapiens
taggaccaggattagagcggatggagggccacagagtgaggagggtagaggaggggcccggccaagcgcaggggtgggggacagagggctcactatctctcttcagaggccaaccacatttgcagggagcaacctggggctgtggcccttgaggccctgagggtggcaggtgctctgatatggggctggccagcagactggcttctgtggcaggtggcgcttgggatgggaagcccctgagaccattcacagtgacagccgggacagtcggggggacagagggcttggggcagcccaggctgcactctaagtgcctgcctcttctgggggcacggggagagccctgtgctcaaagcttgtcccagactccaggaggacccagggggcgtgagggtggccccctcaggtggctgagcctctgggattctgtaagctgggacggctgtctcccctgggagaaggaagcttgatctcatgactcgatttctcagca

SEQ ID NO: 16355 - DNA, 626 bp, Homo sapiens
ctatttttggaagggatggggtttcaccatgttggccaggctgctctcgaactgcaacctcaggtgatccatccgccttagcctcccaaagtgcggggattacaggcgtgagccaccgcgctcagccagcagtgtttcttaaattcaagctcacatatgtattttgcaggttctgcgaaaattttcttgattttaaagaggatttgaacaattctaactaagaacactgacgtagagaattttgaagaattacgcagaaatttgatttccaaggaagacgaaaacaaacctttcctattctgactttagacaagactgtttaaatccttgagtgtcagatttataaccattaaaatatacgtaccaatgtatataatcgtatagattcctttgggctctaagaatcactggttctgaactttgtccttacacatgggaatattcaaactgtcacaaaaaaactcttgtccttaattaaacatcctcaggaatgtattctctgtaacttcctaaacaggttcattaaatttttggtaattatgataataaagatagctttctaaagtatttcttctttaaagtcattttctcttgatatttattctttacatgtttcaacaccacag

SEQ ID NO: 16356 - DNA, 2262 bp, Homo sapiens
actttgtggttgctcgtagtgagttgcgctcgctatgtctggacgtggcaagcagggaggcaaagcccgcgctaaggccaagactcgctcttctagggccggtctccagttccccgtgggccgagtgcaccgcctgctccgcaaaggcaactatgccgagcgggtcggggccggcgcgccggtgtatctggcagcggtgctggagtacctgaccgccgagatcctggaactggcgggcaacgcggcccgcgacaacaagaagacccgcatcatcccgcgtcatctccaactggccatccgcaacgacgaggagctcaacaagctgctgggcaaagtcaccatcgcacagggcggtgtcctgcccaacattcaggccgtgctactgcccaaaaagactgagagccaccacaaggcgaagggcaagtaactatctgtactagtttgtggcagctcaagtaaaatcgagtccaaaccaacggctcttttcagggccacccacgtcttctctaaaagaacttaacatttattccatgtgaaagaaagtgagacatggacaagactctagtcataaattacccatctttttgaaaacagtgtagcgaacaccgcagatttaaaagaaaaactagagggaaggtggtccagattttaccacgcttaaaagttaagatgtgaacaaatctcttaggccattacttaattttaaacttaatcagtgtgtgtccacagagcaccagtggcttcgtgagttcttgaagcactttggcccaaaagagttatcgcccgggctagaatttagcagacagctgttccacgcgggccagggcggcatgaagaagtcccgccgctacgtgcccggcacagtggccctgcgcgacgttcggcgctaccagaactccgagctgctgatcagcaagctgccgctcctgcgagagctcggcggtgacgccgctgcacgagagcgaggctgaagaactttgtgacacaatagtccacctccctgcaaggctctgtcagagactcacatctttcctgatggatagctgtgaagcattctcttacccaccctactgcatgttgcaaagtattcctttaaaatgaagtgagtaaaatactgggatgacgttatctggagcccaagaaagatggctcatttggaaaggcctaatatcccaagttgcttacctagaagaacttgacaggatagttaataataaaccttaaaacccatgaagaaatctgaggtaaagtgttagcacacagactgttaaaatgtctgcctcacagataggagggaaaatatatagaggattataatatggttcaacaaatgttgatgagtattagaaatgtacattagaaatattagaaatgtttatgactattagaaaagtacagggtattgggcgttcctgacacaaactgaggcctcctagcaagactggcagttttctgtaaaggagggttatttactacggtagtgcaaataacttttggtgttgtagctaaataaggaatactcatgccaagatcatcgaattgtgcctcctccctctgttcactgaactctgatgtaattttttttttttttttttgagacggagtctcgctctgtcgcccaggctggagtgcagtgggcgctatctcggctcactgcaagctccgcctcccgggttcacgccattctcctgcctcagcctcctgagtagctggggctacaggcgtctgccaccatgcccagctacttttttgtatttttagtagatacggggtttcaccgtgttagccaggatggtcttgatgtcctgacctcgtgatccaccggcctcggcctcccaaagtgctgggattaccggcgtaagccaccacgcccggcccactctgaagtaatcttaagaagacgttaactcatttttcttgtgtattgtagacacttttggctgtctggtaacatggaaaatctcagaatgatgttttaagtatataaaatgccaaacaaagttaaattacagttatcaaagtatttttaaaacttcatagtgataaatgagactatatagttatattgttaatatagttaacacattacatgatttggtgagcctaattgctgttactaattagaggagtaaaaatgtttcacgataactcagcaattgtaatgagaaatgaaacatctaatgtcttttgggttacaaagtaacaggtactgagatttgtggcctaaattcataataaagtgaaatgttcaagttcagtcaa

SEQ ID NO: 16357 - DNA, 366 bp, Homo sapiens
ctgtagggatagtgccataactaagctgttgaactctcacccctataaggcacttatctctctctgctccagctccatgaccttgcccatggggctaccaggacttctcttggttgtctcaatgcacctcatatattagccactatatgctctttcagagtgaaagaccatcacccaaaacttggcccaactcttctatgtgtcatcatctgagggcagcaataaagaactaggccagatgcatccactagaagaaaccatggtctgaaacatctgcatttcaaatccagctctagatgaataataaatcgagatgtctctgacttaaattggaaaagaggtcccatgactaatcatgcctcttag

SEQ ID NO: 16358 - DNA, 439 bp, Homo sapiens
actctgcagggcatagtcctttacacatagaaggcgcttgatgaatatgggttgaattgaaatgcaagggagctatcactaaacacagcattgaaatgttgcaggataaattgacagttccttactctctccacttcgggtcattctcctcagtttgggagaaagaattaagatttaccagatggtttgcaactgagtaggaaaaataaataggaagtgagtcttcatttcagtgaaaccagtgccctcaaggttctgaagcaggaatcacacttcctgggtatctttagagattctcaccattccattaagctcctccatatacactctaaggaagtttgggggtgaagaagcttcagggagtggttagctgcattctcttgactgttaagtggaattgggttttgctagttgtgggtaatggaagtactcaacatag

SEQ ID NO: 16359 - DNA, 2794 bp, Homo sapiens
  misc_feature (2794)..(2794): n is a, c, g, or t
tcgcccacgcgtccgacttgttgcagttgctgtaggattctaaatccaggtgattgtttcaaactgagcatcaacaacaaaaacatttgtatgatatctatatttcaatcatggaccaaaatcaacatttgaataaaacagcagaggcacaaccttcagagaataagaaaacaagatactgcaatggattgaagatgttcttggcagctctgtcactcagctttattgctaagacactaggtgcaattattatgaaaagttccatcattcatatagaacggagatttgagatatcctcttctcttgttggttttattgacggaagctttgaaattggaaatttgcttgtgattgtatttgtgagttactttggatccaaactacatagaccaaagttaattggaatcggttgtttcattatgggaattggaggtgttttgactgctttgccacatttcttcatgggatattacaggtattctaaagaaactaatatcaattcatcagaaaattcaacatcgaccttatccacttgtttaattaatcaaattttatcactcaatagagcatcacctgagatagtgggaaaaggttgtttaaaggaatctgggtcatacatgtggatatatgtgttcatgggtaatatgcttcgtggaataggggagactcccatagtaccactggggctttcttacattgatgatttcgctaaagaaggacattcttctttgtatttaggtatattgaatgcaatagcaatgattggtccaatcattggctttaccctgggatctctgttttctaaaatgtacgtggatattggatatgtagatctaagcactatcaggataactcctactgattctcgatgggttggagcttggtggcttaatttccttgtgtctggactattctccattatttcttccataccattctttttcttgccccaaactccaaataaaccacaaaaagaaagaaaagcttcactgtctttgcatgtgctggaaacaaatgatgaaaaggatcaaacagctaatttgaccaatcaaggaaaaaatattaccaaaaatgtgactggttttttccagtcttttaaaagcatccttactaatcccctgtatgttatgtttgtgcttttgacgttgttacaagtaagcagctatattggtgcttttacttatgtcttcaaatacgtagagcaacagtatggtcagccttcatctaaggctaacatcttattgggagtcataaccatacctatttttgcaagtggaatgtttttaggaggatatatcattaaaaaattcaaactgaacaccgttggaattgccaaattctcatgttttactgctgtgatgtcattgtccttttacctattatattttttcatactctgtgaaaacaaatcagttgccggactaaccatgacctatgatggaaataatccagtgacatctcatagagatgtaccactttcttattgcaactcagactgcaattgtgatgaaagtcaatgggaaccagtctgtggaaacaatggaataacttacatctcaccctgtctagcaggttgcaaatcttcaagtggcaataaaaagcctatagtgttttacaactgcagttgtttggaagtaactggtctccagaacagaaattactcagcccatttgggtgaatgcccaagagatgatgcttgtacaaggaaattttacttttttgttgcaatacaagtcttgaatttatttttctctgcacttggaggcacctcacatgtcatgctgattgttaaaattgttcaacctgaattgaaatcacttgcactgggtttccactcaatggttatacgagcactaggaggaattctagctccaatatattttggggctctgattgatacaacgtgtataaagtggtccaccaacaactgtggcacacgtgggtcatgtaggacatataattccacatcattttcaagggtctacttgggcttgtcttcaatgttaagagtctcatcacttgttttatatattatattaatttatgccatgaagaaaaaatatcaagagaaagatatcaatgcatcagaaaatggaagtgtcatggatgaagcaaacttagaatccttaaataaaaataaacattttgtcccttctgctggggcagatagtgaaacacattgttaaggggagaaaaaaagccacttctgcttctgtgtttccaaacagcattgcattgattcagtaagatgttatttttgaggagttcctggtcctttcactaagaatttccacatcttttatggtggaagtataaataagcctatgaacttataataaaacaaactgtaggtagaaaaaatgagagtactcattgttacattatagctacatatttgtggttaaggttagactatatgatccatacaaattaaagtgagagacatggttactgtgtaataaaagaaaaaatacttgttcaggtaattctaattcttaataaaacaaatgagtatcatacaggtagaggttaaaaaggaggagctagattcatatcctaagtaaagagaaatgcctagtgtctattttattaaacaaacaaacacagagtttgaactataatactaaggcctgaagtctagcttggatatatgctacaataatatctgttactcacataaaattatatatttcacagactttatcaatgtataattaacaattatcttgtttaagtaaatttagaatacatttaagtattgtggaagaaataaagacattccaatatttgcaan

SEQ ID NO: 16360 - DNA, 2740 bp, Homo sapiens
  misc_feature (2740)..(2740): n is a, c, g, or t
tcgcccacgcgtccgacttgttgcagttgctgtaggattctaaatccaggtgattgtttcaaactgagcatcaacaacaaaaacatttgtatgatatctatatttcaatcatggaccaaaatcaacatttgaataaaacagcagaggcacaaccttcagagaataagaaaacaagatactgcaatggattgaagatgttcttggcagctctgtcactcagctttattgctaagacactaggtgcaattattatgaaaagttccatcattcatatagaacggagatttgagatatcctcttctcttgttggttttattgacggaagctttgaaattggaaatttgcttgtgattgtatttgtgagttactttggatccaaactacatagaccaaagttaattggaatcggttgtttcattatgggaattggaggtgttttgactgctttgccacatttcttcatgggatattacaggtattctaaagaaactaatatcaattcatcagaaaattcaacatcgaccttatccacttgtttaattaatcaaattttatcactcaatagagcatcacctgagatagtgggaaaaggttgtttaaaggaatctgggtcatacatgtggatatatgtgttcatgggtaatatgcttcgtggaataggggagactcccatagtaccactggggctttcttacattgatgatttcgctaaagaaggacattcttctttgtatttaggtatattgaatgcaatagcaatgattggtccaatcattggctttaccctgggatctctgttttctaaaatgtacgtggatattggatatgtagatctaagcactatcaggataactcctactgattctcgatgggttggagcttggtggcttaatttccttgtgtctggactattctccattatttcttccataccattctttttcttgccccaaactccaaataaaccacaaaaagaaagaaaagcttcactgtctttgcatgtgctggaaacaaatgatgaaaaggatcaaacagctaatttgaccaatcaaggaaaaaatattaccaaaaatgtgactggttttttccagtcttttaaaagcatccttactaatcccctgtatgttatgtttgtgcttttgacgttgttacaagtaagcagctatattggtgcttttacttatgtcttcaaatacgtagagcaacagtatggtcagccttcatctaaggctaacatcttattgggagtcataaccatacctatttttgcaagtggaatgtttttaggaggatatatcattaaaaaattcaaactgaacaccgttggaattgccaaattctcatgttttactgctgtgatgtcattgtccttttacctattatattttttcatactctgtgaaaacaaatcagttgccggactaaccatgacctatgatggaaataatccagtgacatctcatagagatgtaccactttcttattgcaactcagactgcaattgtgatgaaagtcaatgggaaccagtctgtggaaacaatggaataacttacatctcaccctgtctagcaggttgcaaatcttcaagtggcaataaaaagcctatagtgttttacaactgcagttgtttggaagtaactggtctccagaacagaaattactcagcccatttgggtgaatgcccaagagatgatgcttgtacaaggaaattttacttttttgttgcaatacaagtcttgaatttatttttctctgcacttggaggcacctcacatgtcatgctgattgttaaaattgttcaacctgaattgaaatcacttgcactgggtttccactcaatggttatacgagcactaggaggaattctagctccaatatattttggggctctgattgatacaacgtgtataaagtggtccaccaacaactgtggcacacgtgggtcatgtaggacatataattccacatcattttcaagggtctacttgggcttgtcttcaatgttaagagtctcatcacttgttttatatattatattaatttatgccatgaagaaaaaatatcaagagaaagatatcaatgcatcagaaaatggaagtgtcatggatgaagcaaacttagaatccttaaataaaaataaacattttgtcccttctgctggggcagatagtgaaacacattgttaaggggagaaaaaaagccacttctgcttctgtgtttccaaacagcattgcattgattcagtaagatgttatttttgaggagttcctggtcctttcactaagaatttccacatcttttatggtggaagtataaataagcctatgaacttataataaaacaaactgtaggtagaaactatatgatccatacaaattaaagtgagagacatggttactgtgtaataaaagaaaaaatacttgttcaggtaattctaattcttaataaaacaaatgagtatcatacaggtagaggttaaaaaggaggagctagattcatatcctaagtaaagagaaatgcctagtgtctattttattaaacaaacaaacacagagtttgaactataatactaaggcctgaagtctagcttggatatatgctacaataatatctgttactcacataaaattatatatttcacagactttatcaatgtataattaacaattatcttgtttaagtaaatttagaatacatttaagtattgtggaagaaataaagacattccaatatttgcaan

SEQ ID NO: 16361 - DNA, 813 bp, Homo sapiens
tattgctaagacactaggtgcaattattatgaaaagttccatcattcatatagaacggagatttgagatatcctcttctcttgttggttttattgacggaagctttgaaattggtaacatttattttctattttaataaccaaacttgcaaagttaaaaaatatatatgctttacaccactggttatcaactggggtaaatttatctctcacaggcaatttggcaataactaaaaacatttgtggttgtcataactgcacaggggttgggggcaatggaagtgctactggtatctaaaggtagaggtcaggggtactgctaaatattctataatgcacaaagaatgatgtaactgaaaatgttgatagtgaggatgttcagaaaccctgattctacacaaattcattttttgcaaactaacgccatgtcatactttacctcccctctctcaagatgaagaaactttgggagaggactgttattcttaaggagaaaggaatcttttcagagcaacctacgttagacctctattgtttcactgagcacacaaaaatctttcctttgaaatactgaagatattttgttgtcttcattttatgttggatttctccaataacagctcagggaaaacattttctggttcatatttgtgtttttccctattagtaatttttttctagataatttataagatgaatattaaattttctgggaatttttctctttaaatttttttcttctaaatttccattgtttttctttatgtttcattaatctttgatgccatcatccatcttaccatattaagttcta

SEQ ID NO: 16362 - DNA, 435 bp, Homo sapiens
gtagttctaaaggttttatattcgtttgatctcttgtatttacagataatgtttgaatcatgttaaactgctccttacatatttagatcttatagtctcctttacttcagagaagatttgtcttgggtctctccttccttaacccgtggttgaaaaacagtttctccttttataaaatgagcttctctcagcttaacttaccttttctctcctccccccctgggattttagaactgtccccattgggagtagggatttctccctgccagttgcctgcttctatttattcagatgctttggggtcaacattgctacttgatgctgtaaaaactgataggatgttatgagctgtttaaaagaggcctgtggcccacctgctaacctcattgctgatgttgtgagcttataaatgacaacagatttataagattgttg

SEQ ID NO: 16363 - DNA, 521 bp, Homo sapiens
tcctttcttaagtttttaaaaaatagagacagggttttgctgtgttctcaaattcctgggctcaaataatctgcccacctcagctgcccaaaatgttaggattactggcatgagctaccacacccggctgagctacattttaatatgtgtggttcgataatgctctcataacacacctagaaagtaaaaccatctaagcctgcccctcctcctatggagccacctcctcagtcttaaagcctcagctgctcgtgaggaaaccctctatcctcacaatacacccactgctacatgttctcatagacgcctctccccgtccttatcgtagtactcactgcaccctgtcgttgcttaattttcctctctcttcacctatggtggtaggggccatcttttaagatctggtgtgtccatgatcttaaagtttttaagtttctattaaaaatcaattatattatttgtgagagaagttttttttttttctttttgaaatacgtaaaataaagctggctggcttcttg

SEQ ID NO: 16364 - DNA, 365 bp, Homo sapiens
aattcatgcttcagattggttcataataccatttccagaaatgtattccatggggattacaaagaatctaggtgtgtgttggggggcacctacagtcaaacaaattcagaaaattgtggattaaataaagcaaaatagtattctgtaggactactgaatactatggtatattgggactctccattgggaggtaattttatacagcatctcctcaacttatatgacaaaataactcactttctgaagcatcttaacagacatttcagtgaataacacattggaaaatggtgatcttttgtgctttctgtcaggttttgatatcatggttatgctggcctcaggaatgatgaaactattagaaatct

SEQ ID NO: 16365 - DNA, 307 bp, Homo sapiens
catacaaagcaacttgtttatgaggagttctgtacagaatattatttctaaaatataaagtggaggctggtcaaggagggaatgagtccatagaatgccaggggcaggccctgaacagcattataggccagcttgaagtgtttgagctatctcttagaggcagtagatcatattaatatgatcatattaatatttcagaaaaataaccctgtgcaatggtttcagtgtcaccaccaaaactcatattgaaattgaattcccattgtgacggtattaagaggtgatcctagaaggtgcagctgcttta

SEQ ID NO: 16366 - DNA, 367 bp, Homo sapiens
gtcccagtttcaacttcaaaatcttgcaggttttgcattcatcttcataatgtggctataaagttattgtttaacagtgaaggtgcagctgggcgtggtggctcacacctgtaatccaagcactttggtaggctgaggcgggtggggcaccggaggttgggagtttgagaccagcctgaccaacatggagaaaccctgtctctactaaaaacagaaaattagccaggcatggtggcacatgcctgtaatcccaactacttgggaggctgaggcaggagaatcacttgaatccaggtggctgaggttgcagtgagccaagatcatgccactgcactccagcctgggcgacacagcgagactccgtctc

SEQ ID NO: 16367 - DNA, 251 bp, Homo sapiens
ccctgagggcggtcggggcccaggggtgggttctaggctggaaagatgtgtcggaacgtggctgtagccacagggtggacaggaggtcccggaagcaggaggggtgtgtctggagtgggggtgcctggaatgccgccctctggttcccttggggtggagttgggggctctggcctagaacaggctgacactgccctgtggaccctgagacccctcaactgggacaggtcggccccttggtggggtggggct

SEQ ID NO: 16368 - DNA, 369 bp, Homo sapiens
gccctctgttagaagattgagaattttcatgtcaattataagctaaatttgaggatttcaatgagcccaacaagaaaaccatcctcaaccacaatggaaaaataaaaaaactcaaacaggcaaggtattttgttttctttaaaatgtctatggtttcttatcctttacaaaactcttcatagctcatccactttttttctaactttttattttgaagaatttatagactcacaggaagttacaaaataaatgtacagtgatgtcctgtttaccttttactaagtttctcccaattgttatattttaagtaattatagtacactatcaaagccaggacattgatgttgatctaattcagttttaaattcg

SEQ ID NO: 16369 - DNA, 411 bp, Homo sapiens
gcttaaacaacagctggcaaaaatgaagtgacatgaacacagaatgagtaaaagcatccatcccagccttgggtttcacatttgcagtcccaaaataagcgaacagccagttattttggggctcttaaaaatctttgaagttgccaactatcccaaattttgtaattggtttaaggaggaaagctggggattcccctaattttgaatctggaaaggatggcagcaatgaattctagtttcagggcagtagctccttatacagacaccctgagtattgccaatgttttgaccatcggtgcagagctctcctttaataacatttgcttaatgctttaatttattaacacttaaccttctctttcccttttcaaccctttttctcttccctttgctatattcccacgtaacttt

SEQ ID NO: 16370 - DNA, 455 bp, Homo sapiens
  misc_feature (22)..(22): n is a, c, g, or t
gacccaagtcttcttctggcgnggcctctcgtctccttcctggtttgggcggaagctttgaatccctacttttgatttttttttggatatatacctagaaatggaattgctgggtcataaagtagttctatgtttaacctgtagagaaactggcaaactgtttttcactctaagctctgacttttaagtcaaaagtctcaattagatcacagctacatgaaatcctcaatagcattttccaggaaaatattgtttgtgaatatcatctgttgtcctacacaatgtctcctacatataatcccaaagagaaaatacttttgagaattaggtactggggccaggtgcagtggctcacacctgtaatctcagcactttgggaggctgaggtgggcggatcacttgagaccaggatttcaagaccagcctgatcaacatggtgtagccctctctctact

SEQ ID NO: 16371 - DNA, 533 bp, Homo sapiens
taccaaatgaatgctacataaatgagagaggattcactgtatgaatacctaaagatggcttgtcatggtgataaagacattgtgcttagggtaaggcaatcccagtttgtatcatggctctgccatttactaggttatgacaataactaagtcagttaacctctcaaatctctgttaattcatttctaaaatagagattgtaatagcacccacatcataggagtgttgacctggcacatagtgaacactttaactagtattatttctgaaacaatttttatttcgaatgtaatttctaaacagttcagtggatttcatttctcttaaaagaaagccgaagaagtacagagtgccaataaactccttataataaaatgttgtatactagagtagtacaaaagttatcagtctccagggctgggcgtgatggctcaagcctgtaatcccagcactttgggaggccgaggtgggcagatcacgaggtcaggagatcgtgaccatcctggctaacacagtgaaaccccatctctact

SEQ ID NO: 16372 - DNA, 340 bp, Homo sapiens
gaattggtgattatgatagagtagtgctataattatttgaccaggaaattatacttttcaagatatatgaaaatttaaaataatttgtctcatttttaatttgtaccttaaagaactgaaaatcaggatgactgagtttcttttcttttctttttttcagctgtaggcaatttactcaggtactttaatggattgtttaacctcattatgcctcagtttccttacctataaatgagaggagtgaactacataatgttcttaaagcaaaaaattacttatttttaacaaaaaagctatagtagaaggtagaagaaaagtagaaagttgagaaactatagat

SEQ ID NO: 16373 - DNA, 432 bp, Homo sapiens
cagtgcttgctcccctcactgcagcaggaagcctaacttgcgaactgcaggtgtgctccaggtggtcactggatgcaagaaatggtgcgagaactttggatgtggaacgtggaggaggaggaacacgaagtggggatctgcacttggggtggtcagcactgcggatgcccagcaaagtcactgcctggtccacatcccggaggggtctctgcgcctcagtcggcatcgcagctgatggtgaaacttttggtgtggcagaagagtgtccacaaacttcggaagttgctagagaaaactgaaaactactagttttgaaagcctcacttctgccaatggaagcacattccagcatgtcgccaacgcaatccactttccaccactttcacaaaaaacgttactgcacaattatactatcctacccttatataaatt

SEQ ID NO: 16374 - DNA, 730 bp, Homo sapiens
cagtgcttgctcccctcactgcagcaggaagcctaacttgcgaactgcaggtgtgctccaggtggtcactggatgcaagaaatggtgcgagaactttggatgtggaacgtggaggaggaggaacacgaagtggggatctgcacttggggtggtcagcactgcggatgcccagcaaagtcactgcctggtccacatcccggaggggtctctgcgcctcagtcggcatcgcagctgatggtgaaacttttggtgtggcagaagagtgtccacaaacttcggaagggccgcggcggcaaggtccttgctcccatggcgtgactccagggtgcaggagcctgggctgagcaggtggagtagggtgagctccgccaagaacccagcgagagtggcgccccagggcggcacaggaggccgcatttaacatgtcaatcatctgaaagattttatggcatcttttttttgacatcttataatatctataatgtttattatatcttgtgatataattattaacaccacttcagtgtgattattatgattatttttataccaacacatcttcaattattaatattcccagttgctagagaaaactgaaaactactagttttgaaagcctcacttctgccaatggaagcacattccagcatgtcgccaacgcaatccactttccaccactttcacaaaaaacgttactgcacaattatactatcctacccttatataaatt

SEQ ID NO: 16375 - DNA, 421 bp, Homo sapiens
tgcgcctcagtcggcatcgcagctgatggtgaaacttttggtgtggcagaagagtgtccacaaacttcggaaggtatccgctacatcctccatagccgtgtatccctgcccagggcaatcttctgggggagcggaaagtcctgctcccgggccagggctggctggctggagccacttgtgcggcgcagccctggcggaggttcaggcggccccggtgtcgcaagcggctgtgagtgatgcctccctggggccggagtggtcccaggaaggctgcagaccagggctgaccagcgggcagcatggtggccgcgatggaaggtgacggggttcgcagcgccaggggacccagcagagcccgagcccgggcatcccgcatctccagcagcatcgcaggtaggcctggtgctggtgaagtggcggc

SEQ ID NO: 16376 - DNA, 566 bp, Homo sapiens
cccagcccgagatacttgcataaagccgcatttcccccagcaacagtctctggtccctgtctgtccattagctgactccagtcctgaccagcctgttctcagtcctcctgccaggacacattctaaagaccgtgggagactcagctcagcctcactcctccccagagccagattacaaccttttgaggctctaagcattgactatggtgatgcccccagtcactgtcccagcccctcactgttcaattcacaacaaaacagtattttgcagaatgacacaaaactgatattgatactggaattcaaatagccttattctgaattttcagattgcaaaatcctgtataagtttgtcaagaatgagcgcctctctgtctcttcgggtgtgtgttcttgtgtgagtgtgtgcctggatgtgggtgtgggtgactctggtgtgagtctggatgcaggggtgtgagtatgtgtgtttcctggctttttattttttggtgggcagagtctcgttctatcacccaggctggagtgtagtggcatgatctcagctcactgcaaattcctcctcc

SEQ ID NO: 16377 - DNA, 888 bp, Homo sapiens
agcggactgtccattccacaggtaacaatgattggtccagaatagggcaaatactacattcagaacaagaagatcaaaagaaagctctcctgtagcttctgaaaaagaaaacttttcactgtttggaatgcgtaggatgagtttaggaggttgggactgctacagctaattggttacatgaagagaggcagcttgatgatgaaaccgacactcagaggaaagggccctgagacatggatctcagtgacctcatttgagccttcgcagcaactaaagccagacctactcatgttctttttaggtctatcaagcaacaaatttcgttttagttcaagccattttgaggtaggatttctgccaattacaagcaaaaggacccttaatgatgcaagtactgaactgggaataataaacaccaatagttgagtcaatgttcttgccattaaccaactgcacatgggagcaaatcacccctatagttgagaaagctgtctccaaaaaaggagaagtctttccttcctacttcaaaaatgtattcagagcctcagtagagaagatgtacacaaaaatgctttttaagtagtaaattgctgaacaatgataagagagtattattgaaacctcagggatgtagagtagaatgagcattattttttccctcttactactaaaaaaactgagtcacaaaaattagatggtagaaagttaaattaagatatttaaatttactatccaatatgtcagccatcccatgctgcttattttattttaatttttatatatgtcaacagaatagttctcactcgctggtaaagtgtggaataatattgaaaattgtgttttattagtgacagtaatttctgattagttttgtacacactttccctc

SEQ ID NO: 16378 - DNA, 286 bp, Homo sapiens
tccaatgtatgagctcccctagcttgaactgtcaacccatagttctattactagcaaaaatatccttcagtaatgaagtgatgaaataaagacatcctcagatgaaggaaaactaagaggagttgtttttagtaagcttgcactaaaagaattgctaaaggaaattcaccatatagtagggaaatgataccaaaaggaaacttggagcattaggaataaaggaagagcaacagaaatggcaaataccaagataagtataatattcttctcctctttagttctttaa

SEQ ID NO: 16379 - DNA, 489 bp, Homo sapiens
agaaaccaagcactttacttctcactaaaaatgagattattgatctaccataaccattaactcttcgattaagtatagaaggttatcaaaggcttataaaatacagaattacaggcatagctgataatagtataaataaatcattttaatgcatcgtattcaattttgtgctcttaagtatattgatttctggactgttttgttaacagctctgtaaaactgccaccagtatttccatttagtaaaatacaattgggccaggcatggtggttcatgcctgtaatcccaccattttgggaggctgaggcaggcagatcgcttgggcccagaagttcaagaccagcctgggcgacacggcaaaacctgtctctgcagaaaaaaaaataataataataataataatacaaaaagaatcagcagggcatggtggtgcacacctgtagtcccagctacttgaggggctgaggtggcaggatcacttgagtccag

SEQ ID NO: 16380 - DNA, 687 bp, Homo sapiens
atggagaagagacggattctctaaaacgagttgcagatcataaaagggctttaccacctggtggaagagtggggactctctcctaagggccacaacatgagggtggaatatgtcaagatcagtctcccttcacctcctggagaacagtcttccttgtggcatcagctcaaacagatgggacctctctaggcagccttccaagcttcccgttcctcccctacctcagaagctggccacttgtctgatcaagtcctgggatcaaagggcagcctctcccaggctcacaggcctagtgggtggggtatgagccatctttttcaccgtaggccctccttgagccaggaggagtgcccacatccttcctagtctccatcttcatgcctattctgccactacctgctctcccagtctcaccaggagtgagtcatactgcaggccctccagggcacaaacacttcttggttccttctcatcttcttttcagtcccattctctaatgattggtcaaccctgaaagcttgggaacagatgggcctgtctctgctccctaacagctctccagaatgaatggaaaagacaggctgtaagctggcagttccgagagggtgctgacgtgaatgggaactagaagacttggagtcagctgctgctctgccccctcctggatatgggatcctgaatgttctc

SEQ ID NO: 16381 - DNA, 1555 bp, Homo sapiens
gggttcaagccattcgtctgcctcagcctcccgagtagctgggataacaggcatgtgccaccacacccagctaattttttgtattttgagtagagacagggtttcaccatgttggccaggatggtctcaaactcctgacctcatgatccacctgcctcagcctcccaaagtgctgggattacaggcatgagccactgcacctggctctcttccactttagagtgagaagttgcttcaggaagtttgaaagcctgtttcatggcccactgagtctcttctgtgcaaaggggggtgccacaggcttttttcccccaagtgaaatggggcttccagtggatcgaagatctggtgtcctgtatgggggcctcaaggtcttggagcaagacagtctcaatgttgtatgggcttgggacctgcatctggccccaagcatctggaactgtgcacttaacctttcttcattacccagacttggatggccttgttggggttcaagggataggtcctctgtctcttcctttaaattattaactatttattacatccggaacctgtgagattcagcactcccaaccagaccctgggatgggtgagagaaaagcgggggtgtctctcccctccccactctgcccagctctcatcactgtcagacccaccagagctgagggcggagggattgggggctggggcagcctgggtccccatgcccctctctgtgcctcggtctccccccttccatggtgggcgggggggaagctccattcttaacctacctcgttttggggaggggtgggacgggggaccagagtgctgtacggtgctgtgggatctgcagatgaagcggtgggggctaaggaaaggtcccctggccgccacttcccagcagcgcctctcccaggtcccccagtcctgctccctgctgagacccacctctgatccatgattccccttcattgcccccaaatcaggggtacatggagggccgccctgggagccaggcagacctcagaccctggagcccccaggcccaatttcccagccgcttgcccctcagatcggatgcttggcccccagatttgggggaggcaccccaacatatatcttcctgatcttgtttctaagccagtctgtgacctcaatattgttagtgtcagtgcaggctgaagtggtgggggaggatgggggccaaagacccagccttgtcatcgggggagggggcacgagatctgctccaagaaatgtctgtgacaaagtctcagcctgtgttatttatttgcctctgtgcaccccacccactcaccttcctgaactgctaaaccagtctcctacttaaattctcccttctcccatcagaccctcaagctgagttttataagacactcaacaaatgcatttattgagcacctaattatgtgccaagccctgttgaaagcactggagataaagcagtgggcagaacagacaaaagtccctcctgcaaagagcttatgagctttatagtaggggagacaataagtaaatgacttaatatgttagaaatgatagaaagcagaaa

SEQ ID NO: 16382 - DNA, 699 bp, Homo sapiens
gcggaggcgcgcttgggctcccggcggcgacgactacgaccactaggagagcggacggaggcggcgcctgaagcggcggcggagcccatgccccgggacggcgggcggacccggagagacaaatccggggcccggggcatgtccccggggcccccgtgaggaggcggcggcggctatggagatcgcgccgcaggaggcgccgcccgtgccgggcgcggacggcgacattgaagaggccccagctgaggccgggtctcccagccccgcgtcgccccccgccgatgggcgcctcaaggctgcagccaagcgcgtcacattcccgtccgacgaggatatcgtgtctggagcagtggagcccaaagacccctggagacatgcccagaatgtgaccgtggacgaggtcatcggcgcctacaagcaggcctgccagaagctgaactgcaggcagatccccaagctcctcaggcagctgcaggaattcacagacctcgggcaccgcctcgactgtctggacctgaaaggtgagaagcttgactacaagacctgtgaggccctggaagaggtcttcaagaggctgcagttcaaggtcgtggacctggagcagacaaacctggatgaagatggtgcctcggccctcttcgacatgatcgagtactacgagtcggccacccacctcaacatctccttcaacaagcacat

SEQ ID NO: 16383 - DNA, 541 bp, Homo sapiens
aaatgccctgtgttggacggactgcagctggagcagtcactgagcacggaggccagaaacctgtttttacaaaagctccccaggtggttctgacaacctcgcttggctgtctgtgtgctttgctccgccatccatcactcagtcccaagcctgccttcagacctcagttcaggggtggctggcattgacctcaaagccttttttggagcaaattaacagcccagaatgtgaccgtggacgaggtcatcggcgcctacaagcaggcctgccagaagctgaactgcaggcagatccccaagctcctcaggcagctgcaggaattcacagacctcgggcaccgcctcgactgtctggacctgaaaggtgagaagcttgactacaagacctgtgaggccctggaagaggtcttcaagaggctgcagttcaaggtcgtggacctggagcagacaaacctggatgaagatggtgcctcggccctcttcgacatgatcgagtactacgagtcggccacccacctcaacatctccttcaacaagcacat

SEQ ID NO: 16384 - DNA, 555 bp, Homo sapiens
gcggaggcgcgcttgggctcccggcggcgacgactacgaccactaggagagcggacggaggcggcgcctgaagcggcggcggagcccatgccccgggacggcgggcggacccggagagacaaatccggggcccggggcatgtccccggggcccccgtgaggaggcggcggcggctatggagatcgcgccgcaggaggcgccgcccgtgccgggcgcggacggcgacattgaagaggccccagctgaggccgggtctcccagccccgcgtcgccccccgccgatgggcgcctcaaggctgcagccaagcgcgtcacattcccgtccgacgaggatatcgtgtctggagcagtggagcccaaagacccctggagacatggtgagaagcttgactacaagacctgtgaggccctggaagaggtcttcaagaggctgcagttcaaggtcgtggacctggagcagacaaacctggatgaagatggtgcctcggccctcttcgacatgatcgagtactacgagtcggccacccacctcaacatctccttcaacaagcacat

SEQ ID NO: 16385 - DNA, 609 bp, Homo sapiens
gcggaggcgcgcttgggctcccggcggcgacgactacgaccactaggagagcggacggaggcggcgcctgaagcggcggcggagcccatgccccgggacggcgggcggacccggagagacaaatccggggcccggggcatgtccccggggcccccgtgaggaggcggcggcggctatggagatcgcgccgcaggaggcgccgcccgtgccgggcgcggacggcgacattgaagaggccccagctgaggccgggtctcccagccccgcgtcgccccccgccgatgggcgcctcaaggctgcagccaagcgcgtcacattcccgtccgacgaggatatcgtgtctggagcagtggagcccaaagacccctggagacatggctggagtgcaatggcgcgatctcaggtcatcacaacttccgcctcccaggttcaagcgattctcctgccacagcctcccgagtagctgggattacaggcatgcaccaccacacccggctaattttgtatgttttgtagagacaggatttctccatgttggtcaggctggtctgtaactcccgacctcaggtgatccacgcgccttggcctcccaaagtctgggatgacagg

SEQ ID NO: 16386 - DNA, 754 bp, Homo sapiens
gcggaggcgcgcttgggctcccggcggcgacgactacgaccactaggagagcggacggaggcggcgcctgaagcggcggcggagcccatgccccgggacggcgggcggacccggagagacaaatccggggcccggggcatgtccccggggcccccgtgaggaggcggcggcggctatggagatcgcgccgcaggaggcgccgcccgtgccgggcgcggacggcgacattgaagaggccccagctgaggccgggtctcccagccccgcgtcgccccccgccgatgggcgcctcaaggctgcagccaagcgcgtcacattcccgtccgacgaggatatcgtgtctggagcagtggagcccaaagacccctggagacatgcccagaatgtgaccgtggacgaggtcatcggcgcctacaagcaggcctgccagaagctgaactgcaggcagatccccaagctcctcaggcagctgcaggaattcacagacctcgggcaccgcctcgactgtctggacctgaaaggtgagaagcttgactacaagacctgtgaggccctggaagaggtcttcaagaggctgcagttcaaggtcgtggacctggagcagacaaacctggatgaagatgtgagcggccctgccaccgcccacttggctccctgagctcccgggccccttcgagggtgcctcggccctcttcgacatgatcgagtactacgagtcggccacccacctcaacatctccttcaacaagcacat

SEQ ID NO: 16387 - DNA, 312 bp, Homo sapiens
gtgagcattgaaatactgcagaaattcaagctgagccggccacctgctgcagtagggcatgggggcaggtgggttaaattcttgccttctggctgaccttagtcatcaccagtcattgccttccatgtgcctgtaccaggcactggtctcagtgccttttgtgtattatcgcatttagatatcacagccaccccaggaggtaggtgccgtttgccccaatttgtagatgaggaaatggagcccatagaggtaaagtaattttcctgaggtcacacagtgggtaagtggtggagctgggattcaaatccaggc

SEQ ID NO: 16388 - DNA, 788 bp, Homo sapiens
atccttgcattctagaaagcttatttcattctcccatgtcataagtttgtcagctctgcactcagttgcctggggggatatggcaagtgctataacagaggctgtctttcatattttattttgaaccttttccactgttcaccatctctctctcgttttttaaggatcaagctagtttagtttacctaagaacataggcctatgggcatgactacaaacctctttctgttcctcttatgaaggccagtatgtcattttagagtgccctgttcaaatttaaatggggtgacaatacctcagacttgattgcctaggttgaattttttctcctgggttttctatgcagtgggtattttcaggtagaggctagaaagctttagcctttttcccaaggcttgctgaattgtaggagttttgtcttagaacgctttttctagacactttaagaactttaagaagattcaaacttattacccaaatttcctgtaggctttgttttgtcagtttttgcttctgtcttgcctggaggcctgacacctcctgtcttccaggtaaattgacttcccttgtacatcttaccagaaagatatttaccctaacttgttacacaaactattgccacagtacctgtggatttttaagttaactaacatgggtatttctctttaaaggttttgtgcacagaccaaacaaatcaccctcagtcttcccagcagtcagatgtggtaactgagactaggacggataatataggttgtgaggtggcaatcgcttagggtcctaagatt

SEQ ID NO: 16389 - DNA, 484 bp, Homo sapiens
aagcagtatgattttactgttgcagttggttactcttcaatcaaggttgccagataaagtcctctgtttttatttgctaagcctggcaaccctatctttggtacagtagggctaaatctctacagcgaaggagctcaaatctgaactggcatctattcttgtaggtaagggaagccattaaaggcagttgaccaaagggttatgtaaaaagaattgtgttttagcagaacaaaaatgataatggtgtgctaggatagatgatgaatgagatcttcctgatcatcaggataattcccatatctctggctttgagaagcagtggagaaaatttagaagataagcttacatttagaagacaagcaacttggtcggtgcggtggctcacgcctgtaatcccggcactttgggaggctgaggtgggtggatcacaaggtcaggagtttgaaaccagcctggccaccatagtgaaacctcgtctctacta

SEQ ID NO: 16390 - DNA, 385 bp, Homo sapiens
gataaatcctcaaatctgagagcacaacactgtgctccctaaccctaatctccctctcccagcagggagtgaatcctgcttcatttgctcagtgagcacaaggaaggcacgggccctggggtccatccctgccaggccactccttccagccctctctgtcattcccacagcagcagacaggcaacagcattccctcttcccagcatcgctgatgccaggctgggtaccacaacctctgcataccaacggactggtccctacatcctgatgccagaggaggtgggtaacattgagccatcacactcactcaattaccagacccctgggtcagcttaagaagggatggagtccgggcgcagtggctcacacctataaccccagcact

SEQ ID NO: 16391 - DNA, 226 bp, Homo sapiens
aaggcaggtaggtagataattttcatagtctttaaaaataaaaataacatgtaagagactgtaaaatcagttattataaatataaacttatctctacaaatgattttatattttgaatggtagctggttaatttaaagcctgatgctaaggttaacagaattgttcaaataattaacattaattagcaatatcactaaaatgattcagaggccttctagtgatggc

SEQ ID NO: 16392 - DNA, 3200 bp, Homo sapiens
  misc_feature (3188)..(3192): n is a, c, g, or t
  misc_feature (3194)..(3196): n is a, c, g, or t
  misc_feature (3200)..(3200): n is a, c, g, or t
gaattccgggtttgtgcatccactctggaaccgctcgtgtgtggcctgtcggaatgacatcgccctcatcagtctccgcacgcggttccgcaggtggcagcgatggcccagtcctgaactccccgccatggccggcgcccccggcccgctgcgccttgcgctgctgctgctcgggatggtgggcagggccggcccccgcccccagggtgccactgtgtccctctgggagacggtgcagaaatggcgagaataccgacgccagtgccagcgctccctgactgaggatccacctcctgccacagacttgttctgcaaccggaccttcgatgaatacgcctgctggccagatggggagccaggctcgttcgtgaatgtcagctgcccctggtacctgccctgggccagcagtgtgccgcagggccacgtgtaccggttctgcacagctgaaggcctctggctgcagaaggacaactccagcctgccctggagggacttgtcggagtgcgaggagtccaagcgaggggagagaagctccccggaggagcagctcctgttcctctacatcatctacacggtgggctacgcactctccttctctgctctggttatcgcctctgcgatcctcctcggcttcagacacctgcactgcaccaggaactacatccacctgaacctgtttgcatccttcatcctgcgagcattgtccgtcttcatcaaggacgcagccctgaagtggatgtatagcacagccgcccagcagcaccagtgggatgggctcctctcctaccaggactctctgagctgccgcctggtgtttctgctcatgcagtactgtgtggcggccaattactactggctcttggtggagggcgtgtacctgtacacactgctggccttctcggtcttatctgagcaatggatcttcaggctctacgtgagcataggctggggtgttcccctgctgtttgttgtcccctggggcattgtcaagtacctctatgaggacgagggctgctggaccaggaactccaacatgaactactggctcattatccggctgcccattctctttgccattggggtgaacttcctcatctttgttcgggtcatctgcatcgtggtatccaaactgaaggccaatctcatgtgcaagacagacatcaaatgcagacttgccaagtccacgctgacactcatccccctgctggggactcatgaggtcatctttgcctttgtgatggacgagcacgcccgggggaccctgcgcttcatcaagctgtttacagagctctccttcacctccttccaggggctgatggtggccatattatactgctttgtcaacaatgaggtccagctggaatttcggaagagctgggagcgctggcggcttgagcacttgcacatccagagggacagcagcatgaagcccctcaagtgtcccaccagcagcctgagcagtggagccacggcgggcagcagcatgtacacagccacttgccaggcctcctgcagctgagactccagcgcctgccctccctggggtccttgctgcaggccgggtggccaatccaggtgggagagacactcccagggacaagggaaggaagggacacacacacacacacacacacacacacacacacacatacatcctgctttccctccccaaacccatcagacaggtaaatgggcagtgcctcctgggaccatggacacattttctcctaggagaagcagcctcctaatttgatcacagtggcgagaggagaggaaaaacgatcgctgtgaaaatgaggaggattgcttcttgtgaaaccacaggcccttggggttcccccagacagagccgcaaatcaaccccagactcaaactcaaggtcaacggcttattagtgaaactggggcttgcaagaggaggtggttctgaaagtggctcttctaacctcagccaaacacagagcgggagtgacgggagcctcctctgcttgcatcacttggggtcaccaccctcccctgtcttctctcaaagggaagctgtttgtgtgtctgggttgcttatttccctcatcttgccccctcatctcactgcccagtttctttttgaggggctttgtttgggccactgccagcagctgtttctggaaatggctgtaggtggtgttgagaaagaatgagcattgagacggtgctcgcttctcctccaggtatttgagttgttttggtgcctgcctctgccatgcccagagaatcagggcaggcttgccaccggggaacccagccctggggtatgagctgccaagtctattttaaagacgctcaagaatcctctggggttcatctagggacacgttaggaatgtccagactgtgggtgtagattacctgccacttccaggagcccagagggccaagagagacattgcctccacctctccttggaaatactttatctgtgaccacacgctgtctcttgagaatttggatacactctctagctttaggggaccatgaagagactctcttagggaaaccaatagtccccatcagcaccatggaggcaggctccccctgcctttgaaattcccccacttgggagcttgtatatacttcactcacttttctttattgctgtgaatagtctgtgtgcacaatgggcaattctgacttctcccatctagtggaaatgagcgaaatcatggttgtagtgatgttgtttgggagagtgcagtagtaattgatttgacccactcacacttggagctaattaaggtttgccctgcctgcagcctcccccacaaataatgaacagcagaaagactggacggggaaacctatcaatcctgcccccagccatggtgaggaagccccaagccatggtgacacacagcagcactgcagatagccagacacatggctatcctagagaggctggcaaggagttcgtggctgcaaaagaagtttctggagcaagagagagctcgctcttgggagtcaggacctccggggagagcagagggttccgacggattcctttatgagtcagtctctctctcccttttaaatggtgggaaccctccccaaaacctttccccagacacattctcctgtgcccctcagagaggcatgtgatgtgcaaggaaaataataggatataaaacacatcaagtagaaaatttcttatacttcnnnnnannnaagn

SEQ ID NO: 16393 - DNA, 3044 bp, Homo sapiens
  misc_feature (3032)..(3036): n is a, c, g, or t
  misc_feature (3038)..(3040): n is a, c, g, or t
  misc_feature (3044)..(3044): n is a, c, g, or t
gaattccgggtttgtgcatccactctggaaccgctcgtgtgtggcctgtcggaatgacatcgccctcatcagtctccgcacgcggttccgcaggtggcagcgatggcccagtcctgaactccccgccatggccggcgcccccggcccgctgcgccttgcgctgctgctgctcgggatggtgggcagggccggcccccgcccccagggtgccactgtgtccctctgggagacggtgcagaaatggcgagaataccgacgccagtgccagcgctccctgactgaggatccacctcctgccacagacttgttctgcaaccggaccttcgatgaatacgcctgctggccagatggggagccaggctcgttcgtgaatgtcagctgcccctggtacctgccctgggccagcagtgtgccgcagggccacgtgtaccggttctgcacagctgaaggcctctggctgcagaaggacaactccagcctgccctggagggacttgtcggagtgcgaggagtccaagcgaggggagagaagctccccggaggagcagctcctgttcctctacatcatctacacggtgggctacgcactctccttctctgctctggttatcgcctctgcgatcctcctcggcttcagacacctgcactgcaccaggaactacatccacctgaacctgtttgcatccttcatcctgcgagcattgtccgtcttcatcaaggacgcagccctgaagtggatgtatagcacagccgcccagcagcaccagtgggatgggctcctctcctaccaggactctctgagctgccgcctggtgtttctgctcatgcagtactgtgtggcggccaattactactggctcttggtggagggcgtgtacctgtacacactgctggccttctcggtcttatctgagcaatggatcttcaggctctacgtgagcataggctggggtgttcccctgctgtttgttgtcccctggggcattgtcaagtacctctatgaggacgagggctgctggaccaggaactccaacatgaactactggctcattatccggctgcccattctctttgccattggggtgaacttcctcatctttgttcgggtcatctgcatcgtggtatccaaactgaaggccaatctcatgtgcaagacagacatcaaatgcagacttgccaagtccacgctgacactcatccccctgctggggactcatgaggtcatctttgcctttgtgatggacgagcacgcccgggggaccctgcgcttcatcaagctgtttacagagctctccttcacctccttccaggggctgatggtggccatattatactgctttgtcaacaatgaggtccagctggaatttcggaagagctgggagcgctggcggcttgagcacttgcacatccagagggacagcagcatgaagcccctcaagtgtcccaccagcagcctgagcagtggagccacggcgggcagcagcatgtacacagccacttgccaggcctcctgcagctgagactccagcgcctgccctccctggggtccttgctgcaggccgggtggccaatccaggagaagcagcctcctaatttgatcacagtggcgagaggagaggaaaaacgatcgctgtgaaaatgaggaggattgcttcttgtgaaaccacaggcccttggggttcccccagacagagccgcaaatcaaccccagactcaaactcaaggtcaacggcttattagtgaaactggggcttgcaagaggaggtggttctgaaagtggctcttctaacctcagccaaacacagagcgggagtgacgggagcctcctctgcttgcatcacttggggtcaccaccctcccctgtcttctctcaaagggaagctgtttgtgtgtctgggttgcttatttccctcatcttgccccctcatctcactgcccagtttctttttgaggggctttgtttgggccactgccagcagctgtttctggaaatggctgtaggtggtgttgagaaagaatgagcattgagacggtgctcgcttctcctccaggtatttgagttgttttggtgcctgcctctgccatgcccagagaatcagggcaggcttgccaccggggaacccagccctggggtatgagctgccaagtctattttaaagacgctcaagaatcctctggggttcatctagggacacgttaggaatgtccagactgtgggtgtagattacctgccacttccaggagcccagagggccaagagagacattgcctccacctctccttggaaatactttatctgtgaccacacgctgtctcttgagaatttggatacactctctagctttaggggaccatgaagagactctcttagggaaaccaatagtccccatcagcaccatggaggcaggctccccctgcctttgaaattcccccacttgggagcttgtatatacttcactcacttttctttattgctgtgaatagtctgtgtgcacaatgggcaattctgacttctcccatctagtggaaatgagcgaaatcatggttgtagtgatgttgtttgggagagtgcagtagtaattgatttgacccactcacacttggagctaattaaggtttgccctgcctgcagcctcccccacaaataatgaacagcagaaagactggacggggaaacctatcaatcctgcccccagccatggtgaggaagccccaagccatggtgacacacagcagcactgcagatagccagacacatggctatcctagagaggctggcaaggagttcgtggctgcaaaagaagtttctggagcaagagagagctcgctcttgggagtcaggacctccggggagagcagagggttccgacggattcctttatgagtcagtctctctctcccttttaaatggtgggaaccctccccaaaacctttccccagacacattctcctgtgcccctcagagaggcatgtgatgtgcaaggaaaataataggatataaaacacatcaagtagaaaatttcttatacttcnnnnnannnaagn

SEQ ID NO: 16394 - DNA, 1914 bp, Homo sapiens
  misc_feature (1902)..(1906): n is a, c, g, or t
  misc_feature (1908)..(1910): n is a, c, g, or t
  misc_feature (1914)..(1914): n is a, c, g, or t
gaattccgggtttgtgcatccactctggaaccgctcgtgtgtggcctgtcggaatgacatcgccctcatcagtctccgcacgcggttccgcaggtggcagcgatggcccagtcctgaactccccgccatggccggcgcccccggcccgctgcgccttgcgctgctgctgctcgggatggtgggcagggccggcccccgcccccagggtgccactgtgtccctctgggagacggtgcagaaatggcgagaataccgacgccagtgccagcgctccctgactgaggatccacctcctgccacagacttgttctgcaaccggaccttcgatgaatacgcctgctggccagatggggagccaggctcgttcgtgaatgtcagctgcccctggtacctgccctgggccagcagtgtgccgcagggccacgtgtaccggttctgcacagctgaaggcctctggctgcagaaggacaactccagcctgccctggagggacttgtcggagtgcgaggagtccaagcgaggggagagaagctccccggaggagcagctcctgttcctctacatcatctacacggtgggctacgcactctccttctctgctctggttatcgcctctgcgatcctcctcggcttcagacacctgcactgcaccaggaactacatccacctgaacctgtttgcatccttcatcctgcgagcattgtccgtcttcatcaaggacgcagccctgaagtggatgtatagcacagccgcccagcagcaccagtgggatgggctcctctcctaccaggactctctgagctgccgcctggtgtttctgctcatgcagtactgtgtggcggccaattactactggctcttggtggagggcgtgtacctgtacacactgctggccttctcggtcttatctgagcaatggatcttcaggctctacgtgagcataggctggggtgttcccctgctgtttgttgtcccctggggcattgtcaagtacctctatgaggacgagggctgctggaccaggaactccaacatgaactactggctcattatccggctgcccattctctttgccattggggtgaacttcctcatctttgttcgggtcatctgcatcgtggtatccaaactgaaggccaatctcatgtgcaagacagacatcaaatgcagacttgccaagtccacgctgacactcatccccctgctggggactcatgaggtcatctttgcctttgtgatggacgagcacgcccgggggaccctgcgcttcatcaagctgtttacagagctctccttcacctccttccaggggctgatggtggccatattatactgctttgtcaacaatgaggtccagctggaatttcggaagagctgggagcgctggcggcttgagcacttgcacatccagagggacagcagcatgaagcccctcaagtgtcccaccagcagcctgagcagtggagccacggcgggcagcagcatgtacacagccacttgccaggcctcctgcagctgagactccagcgcctgccctccctggggtccttgctgcaggccgggtggccaatccagcctcccccacaaataatgaacagcagaaagactggacggggaaacctatcaatcctgcccccagccatggtgaggaagccccaagccatggtgacacacagcagcactgcagatagccagacacatggctatcctagagaggctggcaaggagttcgtggctgcaaaagaagtttctggagcaagagagagctcgctcttgggagtcaggaccctccccaaaacctttccccagacacattctcctgtgcccctcagagaggcatgtgatgtgcaaggaaaataataggatataaaacacatcaagtagaaaatttcttatacttcnnnnnannnaagn

SEQ ID NO: 16395 - DNA, 2199 bp, Homo sapiens
  misc_feature (2187)..(2191): n is a, c, g, or t
  misc_feature (2193)..(2195): n is a, c, g, or t
  misc_feature (2199)..(2199): n is a, c, g, or t
cagagctgaatgtttcagaagcccagtgaaaggctctacgtgagcataggctggggtgttcccctgctgtttgttgtcccctggggcattgtcaagtacctctatgaggacgagggctgctggaccaggaactccaacatgaactactggctcattatccggctgcccattctctttgccattggggtgaacttcctcatctttgttcgggtcatctgcatcgtggtatccaaactgaaggccaatctcatgtgcaagacagacatcaaatgcagacttgccaagtccacgctgacactcatccccctgctggggactcatgaggtcatctttgcctttgtgatggacgagcacgcccgggggaccctgcgcttcatcaagctgtttacagagctctccttcacctccttccaggggctgatggtggccatattatactgctttgtcaacaatgaggtccagctggaatttcggaagagctgggagcgctggcggcttgagcacttgcacatccagagggacagcagcatgaagcccctcaagtgtcccaccagcagcctgagcagtggagccacggcgggcagcagcatgtacacagccacttgccaggcctcctgcagctgagactccagcgcctgccctccctggggtccttgctgcaggccgggtggccaatccagacaggtaaatgggcagtgcctcctgggaccatggacacattttctcctaggagaagcagcctcctaatttgatcacagtggcgagaggagaggaaaaacgatcgctgtgaaaatgaggaggattgcttcttgtgaaaccacaggcccttggggttcccccagacagagccgcaaatcaaccccagactcaaactcaaggtcaacggcttattagtgaaactggggcttgcaagaggaggtggttctgaaagtggctcttctaacctcagccaaacacagagcgggagtgacgggagcctcctctgcttgcatcacttggggtcaccaccctcccctgtcttctctcaaagggaagctgtttgtgtgtctgggttgcttatttccctcatcttgccccctcatctcactgcccagtttctttttgaggggctttgtttgggccactgccagcagctgtttctggaaatggctgtaggtggtgttgagaaagaatgagcattgagacggtgctcgcttctcctccaggtatttgagttgttttggtgcctgcctctgccatgcccagagaatcagggcaggcttgccaccggggaacccagccctggggtatgagctgccaagtctattttaaagacgctcaagaatcctctggggttcatctagggacacgttaggaatgtccagactgtgggtgtagattacctgccacttccaggagcccagagggccaagagagacattgcctccacctctccttggaaatactttatctgtgaccacacgctgtctcttgagaatttggatacactctctagctttaggggaccatgaagagactctcttagggaaaccaatagtccccatcagcaccatggaggcaggctccccctgcctttgaaattcccccacttgggagcttgtatatacttcactcacttttctttattgctgtgaatagtctgtgtgcacaatgggcaattctgacttctcccatctagtggaaatgagcgaaatcatggttgtagtgatgttgtttgggagagtgcagtagtaattgatttgacccactcacacttggagctaattaaggtttgccctgcctgcagcctcccccacaaataatgaacagcagaaagactggacggggaaacctatcaatcctgcccccagccatggtgaggaagccccaagccatggtgacacacagcagcactgcagatagccagacacatggctatcctagagaggctggcaaggagttcgtggctgcaaaagaagtttctggagcaagagagagctcgctcttgggagtcaggacctccggggagagcagagggttccgacggattcctttatgagtcagtctctctctcccttttaaatggtgggaaccctccccaaaacctttccccagacacattctcctgtgcccctcagagaggcatgtgatgtgcaaggaaaataataggatataaaacacatcaagtagaaaatttcttatacttcnnnnnannnaagn

SEQ ID NO: 16396 - DNA, 492 bp, Homo sapiens
cctgccaggcccctcccgcgggcagggcggcccctcgccggctcctcccccaccgcccgccaccagcccgggatcagtctccgcacgcggttccgcaggtggcagcgatggcccagtcctgaactccccgccatggccggcgcccccggcccgctgcgccttgcgctgctgctgctcgggatggtgggcagggccggcccccgcccccaggtgagatccagggaccccgacgacaccgggggaggcgggtggctctgcgggctgcaggcgcagtgtcctggtggagggccccgggacttgaacgaaactccgagaccgctggcgggggcatccgaaagcctcggggggagtagggactggagacttggtgcccctgggctggaaggcccaggtgagggcttggactacagaggattccccccaaccccagcgaggcgccctcttcctcgccacccgggtccctctgcccgggcacccgctgccccgcggccg

SEQ ID NO: 16397 - DNA, 3746 bp, Homo sapiens
acagaggctgtggctggaaggagctgggcatccggcctgaggcgcagcggtcgcgttagttcggcccaatggcggcaccgctgcttcacacgcgtttgccgggagatgcggccgcttcgtcctctgcagttaagaagctgggcgcgtcgaggactgggatttcaaatatgcgtgcattagagaatgactttttcaattctcccccaagaaaaactgttcggtttggtggaactgtgacagaagtcttgctgaagtacaaaaagggtgaaacaaatgactttgagttgttgaagaaccagctgttagatccagacataaaggatgaccagatcatcaactggctgctagaattccgttcttctatcatgtacttgacaaaagactttgagcaacttatcagtattatattaagattgccttggttgaatagaagtcaaacagtagtggaagagtatttggcttttcttggtaatcttgtatcagcacagactgttttcctcagaccgtgtctcagcatgattgcttcccattttgtgcctccccgagtgatcattaaggaaggcgatgtagatgtttcagattctgatgatgaagatgataatcttcctgcaaattttgacacatgtcacagagccttgcaaataatagcaagatatgtaccatcgacaccgtggtttctcatgccaatactggtggaaaaatttccatttgttcgaaaatcagagagaacactggaatgttacgttcataacttactaaggattagtgtatattttccaaccttgaggcatgaaattctggagcttattattgaaaaactactcaagttggatgtgaatgcatcccggcagggtattgaagatgctgaagaaacagcaactcaaacttgtggtgggacagattccacggaaggattgtttaatatggatgaagatgaagaaactgaacatgaaacaaaggctggtcctgaacggctcgaccagatggtgcatcctgtagccgagcgcctggacatcctgatgtctttggttttgtcctacatgaaggatgtctgctatgtagatggtaaggttgataacggcaaaacaaaggatctatatcgcgacctgataaacatctttgacaaactcctgttgcccacccatgcctcctgccatgtacagtttttcatgttttacctctgtagtttcaaattgggattcgcagaggcatttttggaacatctctggaaaaaattgcaggacccaagtaatcctgccatcatcaggcaggctgctggaaattatattggaagctttttggcaagagctaaatttattcctcttattactgtaaaatcatgcctagatcttttggttaactggctgcacatataccttaataaccaggattcgggaacaaaggcattctgcgatgttgctctccatggaccattttactcagcctgccaagctgtgttctacacctttgtttttagacacaagcagcttttgagcggaaacctgaaagaaggtttgcagtatcttcagagtctgaattttgagcggatagtgatgagccagctaaatcccctgaagatttgcctgccctcagtggttaacttttttgctgcaatcacaaataagtaccagctcgtcttctgctacaccatcattgagaggaacaatcgccagatgctgccagtcattaggagtaccgctggaggagactcagtgcagatctgcacaaacccgctggacaccttcttcccctttgatccctgtgtgctgaagaggtcaaagaaattcattgatcctatttatcaggtgtgggaagacatgagtgctgaagagctacaggagttcaagaaacccatgaaaaaggacatagtggaagatgaagatgatgactttctgaaaggcgaagtgccccagaatgataccgtgattgggatcacaccaagctcctttgacacgcatttccgaagtccttcaagtagtgtgggctccccacccgtgttgtacatgcaacccagtcccctctgacggcagaaatttgtgactgagatgtgacatttgggattccccatcacttgtcatgccctcagcacccagcttgtgccattgggcattgatggcattgaactagagcgagtgcctgcctcggctgtggcacttccaggttcgactgaatcaagcatctgaagactgggtttttttgttgttgttgttccccttacagacaaaatgaagactatcatgtgcaatcttttacagtggggttgatgatacatttggaaggatttgcttgtttaatatgtacattttttgtgttaacagctttttgacacaattactgggtaatttctaatataggcagcagactgttttacgggttgctgttttaacatgggtttttgtcagatccatggtcttaggacttgactgatgagctttcagtgaagaatcctctaagataaaacttctatttaaagactttaactagaaagtgtttattttggctacattgttcaccttctgctgtattggtatttgtctgttgggatttcaagggagtgtagagaagacagaaggaaagctgagagctggcccgacatggtctgggacacagagttggagctggcactgaagatctccagggacttcagagaccaataaaagcccatagggaagagagagaggatatagggaaacagaatcagatgtgtaatatacttggcacagcgaaaaaatggatttaaaagacaaaaatggaggtccaggtagatgtaattcacacagactgaaagtgagttcgggcttgtgtaaaacacatgagattggatttgaccccttggctctcaagtgtccccttagatctagaactgctccttggtggccattagatcgagtcagttttgatctgcatcacttagttattgggaatttctttgttggaaacaggaaaatttttttagattatttggtgtacggttttgctcacaacaataggtggaagttgctagtgcagtcttggtctgatggctgtgtgcatcgcacattcggcttggtgaaatccttctctaaagcctctttttgtatttttataactaaacagaggaagtcttcagaagacctcgctttaaaacaaatttgtgcaaacactgctagagtcattttgaagctcaagcattttcactttgtttcttacatgtgtacttttttgtttacttgtgaaaatggccatctttaagcatatttattttctgccactttatttaaaggcaagcaatattttcttgatcataaatattttgtaatgaaatacttcctcttttccagggctttgtatgcacttgtataattacattgatggcaatgtagagtttgaatttcagtctgtaaatacttttttggaaaatagaaatttttattgctttaaagttttggatatgggtggttttcttttccgggtttggtggaaagtaatttgagaactttaaggttgtctttttaactgctggcaaaatgttgattttttaatattagataaaacgagtaaacgaaattccccagaaattagtagtaagtggggtctttgtgggttgggaagtagttttaatgtagaaagacatttacatataagtctgtttaatttcaaaggagtttgtgaaaaaaaatccatggtgaaaatgaaacaatgacatggttaatctggaacttacgttcttataccaataaaaggtacctcaatacatgttctttcaa

SEQ ID NO: 16398 - DNA, 581 bp, Homo sapiens
acagaggctgtggctggaaggagctgggcatccggcctgaggcgcagcggtcgcgttagttcggcccaatggcggcaccgctgcttcacacgcgtttgccgggagatgcggccgcttcgtcctctgcagttaagaagctgggcgcgtcgaggactgggatttcaaatatgcgtgcattagagaatgactttttcaattctcccccaagaaaaactgttcggtttggtggaactgtgacagaagtcttgctgaagtacaaaaagctccaccctcatgcagatgataatagtcaagacacctgccgagcgtctgcagggggccgcaattccacccgtcagcggatgataagactcaagacacacttccgagcgatcagctcacatccccattccacccatcagactccaccactcacgcagcatgataaatatcaagaacaccttgcacgagacgatctgcgagagggccgcattccacccgtcagacgggatgagtaatcgtacaagacaccattccgaggcgtcagcatcgacagtcccgcatgtcgcacacatcagcatccacaccatcagaaagaatga

SEQ ID NO: 16399 - DNA, 271 bp, Homo sapiens
caatcagctcggtacctgatttggattctgaagatgatgtgaatgcatcccggcagggtattgaagatgctgaagaaacagcaactcaaacttgtggtgggacagattccacggaaggattgtttaatatggatgaagatgaagaaactgaacatgaaacaaaggctggtcctgaacggctcgaccagatggtgcatcctgtagccgagccgttcaggaccagcctttgtgtcatgttcagtcttcaccttcatcttcagaatccaaatca

SEQ ID NO: 16400 - DNA, 4041 bp, Homo sapiens
acagaggctgtggctggaaggagctgggcatccggcctgaggcgcagcggtcgcgttagttcggcccaatggcggcaccgctgcttcacacgcgtttgccgggagatgcggccgcttcgtcctctgcagttaagaagctgggcgcgtcgaggactgggatttcaaatatgcgtgcattagagaatgactttttcaattctcccccaagaaaaactgttcggtttggtggaactgtgacagaagtcttgctgaagtacaaaaagggtgaaacaaatgactttgagttgttgaagaaccagctgttagatccagacataaaggatgaccagatcatcaactggctgctagaattccgttcttctatcatgtacttgacaaaagactttgagcaacttatcagtattatattaagattgccttggttgaatagaagtcaaacagtagtggaagagtatttggcttttcttggtaatcttgtatcagcacagactgttttcctcagaccgtgtctcagcatgattgcttcccattttgtgcctccccgagtgatcattaaggaaggcgatgtagatgtttcagattctgatgatgaagatgataatcttcctgcaaattttgacacatgtcacagagccttgcaaataatagcaagatatgtaccatcgacaccgtggtttctcatgccaatactggtggaaaaatttccatttgttcgaaaatcagagagaacactggaatgttacgttcataacttactaaggattagtgtatattttccaaccttgaggcatgaaattctggagcttattattgaaaaactactcaagttggatgtgaatgcatcccggcagggtattgaagatgctgaagaaacagcaactcaaacttgtggtgggacagattccacggaaggattgtttaatatggatgaagatgaagaaactgaacatgaaacaaaggctggtcctgaacggctcgaccagatggtgcatcctgtagccgagcgcctggacatcctgatgtctttggttttgtcctacatgaaggatgtctgctatgtagatggtaaggttgataacggcaaaacaaaggatctatatcgcgacctgataaacatctttgacaaactcctgttgcccacccatgcctcctgccatgtacagtttttcatgttttacctctgtagtttcaaattgggattcgcagaggcatttttggaacatctctggaaaaaattgcaggacccaagtaatcctgccatcatcaggcaggctgctggaaattatattggaagctttttggcaagagctaaatttattcctcttattactgtaaaatcatgcctagatcttttggttaactggctgcacatataccttaataaccaggattcgggaacaaaggcattctgcgatgttgctctccatggaccattttactcagcctgccaagctgtgttctacacctttgtttttagacacaagcagcttttgagcggaaacctgaaagaaggtttgcagtatcttcagagtctgaattttgagcggatagtgatgagccagctaaatcccctgaagatttgcctgccctcagtggttaacttttttgctgcaatcacaaataagtaccagctcgtcttctgctacaccatcattgagaggaacaatcgccagatgctgccagtcattaggagtaccgctggaggagactcagtgcagatctgcacaaacccgctggacaccttcttcccctttgatccctgtgtgctgaagaggtcaaagaaattcattgatcctatttatcaggtgtgggaagacatgagtgctgaagagctacaggagttcaagaaacccatgaaaaaggacatagtggaagatgaagatgatgactttctgaaaggcgaagtgccccagaatgataccgtgattgggatcacaccaagctcctttgacacgcatttccgaagtccttcaagtagtgtgggctccccacccgtgttgtacatgcaacccagtcccctctgacggcagaaatttgtgactgagatgtgacatttgggattccccatcacttgtcatgccctcagcacccagcttgtgccattgggcattgatggcattgaactagagcgagtgcctgcctcggctgtggcacttccaggttcgactgaatcaagcatctgaagactgggtttttttgttgttgttgttccccttacagacaaaatgaagactatcatgtgcaatcttttacagtggggttgatgatacatttggaaggatttgcttgtttaatatgtacattttttgtgttaacagctttttgacacaattactgggtaatttctaatataggcagcagactgttttacgggttgctgttttaacatgggtttttgtcagatccatggtcttaggacttgactgatgagctttcagtgaagaatcctctaagataaaacttctatttaaagactttaactagaaagtgtttattttggctacattgttcaccttctgctgtattggtatttgtctgttgggatttcaagggagtgtagagaagacagaaggaaagctgagagctggcccgacatggtctgggacacagagttggagctggcactgaagatctccagggacttcagagaccaataaaagcccatagggaagagagagaggatatagggaaacagaatcagatgtgtaatatacttggcacagcgaaaaaatggatttaaaagacaaaaatggaggtccaggtagatgtaattcacacagactgaaagtgagttcgggcttgtgtaaaacacatgagattggatttgaccccttggctctcaagtgtccccttagatctagaactgctccttggtggccattagatcgagtcagttttgatctgcatcacttagttattgggaatttctttgttggaaacaggaaaatttttttagattatttggtgtacggttttgctcacaacaataggtggaagttgctagtgcagtcttggtctgatggctgtgtgcatcgcacattcggcttggtgaaatccttctctaaagcctctttttgtatttttataactaaacagaggaagtcttcagaagacctcgctttaaaacaaatttgtgcaaacactgctagagtcattttgaagctcaagcattttcactttgtttcttacatgtgtacttttttgtttacttgtgaaaatggccatctttaagcatatttattttctgccactttatttaaaggcaagcaatattttcttgatcataaatattttgtaatgaaatacttcctcttttccagggctttgtatgcacttgtataattacattgatggcaatgtagagtttgaatttcagtctgtaaatacttttttggaaaatagaaatttttattgctttaaagttttggatatgggtggttttcttttccgggtttggtggaaagtaatttgagaactttaaggttgtctttttaactgctggcaaaatgttgattttttaatattagataaaacgagtaaacgaaattccccagaaattagtagtaagtggggtctttgtgggttgggaagtagttttaatgtagaaagacatttacatataagtctgtttaatttcaaaggagtttgtgaaaaaaaatccatggtgaaaatgaaacaatgacatggttaatctggaacttacgttcttataccaataaaaggtacctcaatacatgttctttcaaaaaaaaaaaaaaaaaaaaaaaaaaaaaaaaaaaaaaaaaaaaaaaaaaaaaaaaaaaacaaacaaaagcaaacgaaggaaaaaaccaagaaaacggaacaagcaccatacaaaggaaacaagacgaggtcagccatgataataaagaaagacggacagatcgaacaacaacggaccagcgaacaacgtaagacgacagacggagcaggcgggctcatccagaacgatcgcactaaggaagacacgacaggggaataagtacacctaacaagcgagagaacaaacagagagtaatc

SEQ ID NO: 16401 - DNA, 3685 bp, Homo sapiens
acagaggctgtggctggaaggagctgggcatccggcctgaggcgcagcggtcgcgttagttcggcccaatggcggcaccgctgcttcacacgcgtttgccgggagatgcggccgcttcgtcctctgcagttaagaagctgggcgcgtcgaggactgggatttcaaatatgcgtgcattagagaatgactttttcaattctcccccaagaaaaactgttcggtttggtggaactgtgacagaagtcttgctgaagtacaaaaagggtgaaacaaatgactttgagttgttgaagaaccagctgttagatccagacataaaggatgaccagatcatcaactggctgctagaattccgttcttctatcatgtacttgacaaaagactttgagcaacttatcagtattatattaagattgccttggttgaatagaagtcaaacagtagtggaagagtatttggcttttcttggtaatcttgtatcagcacagactgttttcctcagaccgtgtctcagcatgattgcttcccattttgtgcctccccgagtgatcattaaggaaggcgatgtagatgtttcagattctgatgatgaagatgataatcttcctgcaaattttgacacatgtcacagagccttgcaaataatagcaagatatgtaccatcgacaccgtggtttctcatgccaatactggtggaaaaatttccatttgttcgaaaatcagagagaacactggaatgttacgttcataacttactaaggattagtgtatattttccaaccttgaggcatgaaattctggagcttattattgaaaaactactcaagttggatgtgaatgcatcccggcagggtattgaagatgctgaagaaacagcaactcaaacttgtggtgggacagattccacggaaggattgtttaatatggatgaagatgaagaaactgaacatgaaacaaaggctggtcctgaacggctcgaccagatggtgcatcctgtagccgagcgcctggacatcctgatgtctttggttttgtcctacatgaaggatgtctgctatgtagatggtaaggttgataacggcaaaacaaaggatctatatcgcgacctgataaacatctttgacaaactcctgttgcccacccatgcctcctgccatgtacagtttttcatgttttacctctgtagtttcaaattgggattcgcagaggcatttttggaacatctctggaaaaaattgcaggacccaagtaatcctgccatcatcaggcaggctgctggaaattatattggaagctttttggcaagagctaaatttattcctcttatgattcgggaacaaaggcattctgcgatgttgctctccatggaccattttactcagcctgccaagctgtgttctacacctttgtttttagacacaagcagcttttgagcggaaacctgaaagaaggtttgcagtatcttcagagtctgaattttgagcggatagtgatgagccagctaaatcccctgaagatttgcctgccctcagtggttaacttttttgctgcaatcacaaataagtaccagctcgtcttctgctacaccatcattgagaggaacaatcgccagatgctgccagtcattaggagtaccgctggaggagactcagtgcagatctgcacaaacccgctggacaccttcttcccctttgatccctgtgtgctgaagaggtcaaagaaattcattgatcctatttatcaggtgtgggaagacatgagtgctgaagagctacaggagttcaagaaacccatgaaaaaggacatagtggaagatgaagatgatgactttctgaaaggcgaagtgccccagaatgataccgtgattgggatcacaccaagctcctttgacacgcatttccgaagtccttcaagtagtgtgggctccccacccgtgttgtacatgcaacccagtcccctctgacggcagaaatttgtgactgagatgtgacatttgggattccccatcacttgtcatgccctcagcacccagcttgtgccattgggcattgatggcattgaactagagcgagtgcctgcctcggctgtggcacttccaggttcgactgaatcaagcatctgaagactgggtttttttgttgttgttgttccccttacagacaaaatgaagactatcatgtgcaatcttttacagtggggttgatgatacatttggaaggatttgcttgtttaatatgtacattttttgtgttaacagctttttgacacaattactgggtaatttctaatataggcagcagactgttttacgggttgctgttttaacatgggtttttgtcagatccatggtcttaggacttgactgatgagctttcagtgaagaatcctctaagataaaacttctatttaaagactttaactagaaagtgtttattttggctacattgttcaccttctgctgtattggtatttgtctgttgggatttcaagggagtgtagagaagacagaaggaaagctgagagctggcccgacatggtctgggacacagagttggagctggcactgaagatctccagggacttcagagaccaataaaagcccatagggaagagagagaggatatagggaaacagaatcagatgtgtaatatacttggcacagcgaaaaaatggatttaaaagacaaaaatggaggtccaggtagatgtaattcacacagactgaaagtgagttcgggcttgtgtaaaacacatgagattggatttgaccccttggctctcaagtgtccccttagatctagaactgctccttggtggccattagatcgagtcagttttgatctgcatcacttagttattgggaatttctttgttggaaacaggaaaatttttttagattatttggtgtacggttttgctcacaacaataggtggaagttgctagtgcagtcttggtctgatggctgtgtgcatcgcacattcggcttggtgaaatccttctctaaagcctctttttgtatttttataactaaacagaggaagtcttcagaagacctcgctttaaaacaaatttgtgcaaacactgctagagtcattttgaagctcaagcattttcactttgtttcttacatgtgtacttttttgtttacttgtgaaaatggccatctttaagcatatttattttctgccactttatttaaaggcaagcaatattttcttgatcataaatattttgtaatgaaatacttcctcttttccagggctttgtatgcacttgtataattacattgatggcaatgtagagtttgaatttcagtctgtaaatacttttttggaaaatagaaatttttattgctttaaagttttggatatgggtggttttcttttccgggtttggtggaaagtaatttgagaactttaaggttgtctttttaactgctggcaaaatgttgattttttaatattagataaaacgagtaaacgaaattccccagaaattagtagtaagtggggtctttgtgggttgggaagtagttttaatgtagaaagacatttacatataagtctgtttaatttcaaaggagtttgtgaaaaaaaatccatggtgaaaatgaaacaatgacatggttaatctggaacttacgttcttataccaataaaaggtacctcaatacatgttctttcaa

SEQ ID NO: 16402 - DNA, 3695 bp, Homo sapiens
acagaggctgtggctggaaggagctgggcatccggcctgaggcgcagcggtcgcgttagttcggcccaatggcggcaccgctgcttcacacgcgtttgccgggagatgcggccgcttcgtcctctgcagttaagaagctgggcgcgtcgaggactgggatttcaaatatgcgtgcattagagaatgactttttcaattctcccccaagaaaaactgttcggtttggtggaactgtgacagaagtcttgctgaagtacaaaaagggtgaaacaaatgactttgagttgttgaagaaccagctgttagatccagacataaaggatgaccagatcatcaactggctgctagaattccgttcttctatcatgtacttgacaaaagactttgagcaacttatcagtattatattaagattgccttggttgaatagaagtcaaacagtagtggaagagtatttggcttttcttggtaatcttgtatcagcacagactgttttcctcagaccgtgtctcagcatgattgcttcccattttgtgcctccccgagtgatcattaaggaaggcgatgtagatgtttcagattctgatgatgaagatgataatcttcctgcaaattttgacacatgtcacagagccttgcaaataatagcaagatatgtaccatcgacaccgtggtttctcatgccaatactggtggaaaaatttccatttgttcgaaaatcagagagaacactggaatgttacgttcataacttactaaggattagtgtatattttccaaccttgaggcatgaaattctggagcttattattgaaaaactactcaagttggatgtgaatgcatcccggcagggtattgaagatgctgaagaaacagcaactcaaacttgtggtgggacagattccacggaaggattgtttaatatggatgaagatgaagaaactgaacatgaaacaaaggctggtcctgaacggctcgaccagatggtgcatcctgtagccgagcgcctggacatcctgatgtctttggttttgtcctacatgaaggatgtctgctatgtagatggtaaggttgataacggcaaaacaaaggatctatatcgcgacctgataaacatctttgacaaactcctgttgcccacccatgcctcctgccatgtacagtttttcatgttttacctctgtagtttcaaattgggattcgcagaggcatttttggaacatctctggaaaaaattgcaggacccaagtaatcctgccatcatcaggcaggctgctggaaattatattggaagctttttggcaagagctaaatttattcctcttattactgtaaaatcatgcctagatcttttggttaactggctgcacatataccttaataaccaggattcgggaacaaaggcattctgcgatgttgctctccatggaccattttactcagcctgccaagctgtgttctacacctttgtttttagacacaagcagcttttgagcggaaacctgaaagaaggtttgcagtatcttcagagtctgaattttgagcggatagtgatgagccagctaaatcccctgaagatttgcctgccctcagtggttaacttttttgctgcaatcacaaataagtaccagctcgtcttctgctacaccatcattgagaggaacaatcgccagatgctgccagtcattaggagtaccgctggaggagactcagtgcagatctgcacaaacccgctggacaccttcttcccctttgatccctgtgtgctgaagaggtcaaagaaattcattgatcctatttatcaggtgtgggaagacatgagtgctgaagagctacaggagttcaagaaacccatgaaaaagaatgataccgtgattgggatcacaccaagctcctttgacacgcatttccgaagtccttcaagtagtgtgggctccccacccgtgttgtacatgcaacccagtcccctctgacggcagaaatttgtgactgagatgtgacatttgggattccccatcacttgtcatgccctcagcacccagcttgtgccattgggcattgatggcattgaactagagcgagtgcctgcctcggctgtggcacttccaggttcgactgaatcaagcatctgaagactgggtttttttgttgttgttgttccccttacagacaaaatgaagactatcatgtgcaatcttttacagtggggttgatgatacatttggaaggatttgcttgtttaatatgtacattttttgtgttaacagctttttgacacaattactgggtaatttctaatataggcagcagactgttttacgggttgctgttttaacatgggtttttgtcagatccatggtcttaggacttgactgatgagctttcagtgaagaatcctctaagataaaacttctatttaaagactttaactagaaagtgtttattttggctacattgttcaccttctgctgtattggtatttgtctgttgggatttcaagggagtgtagagaagacagaaggaaagctgagagctggcccgacatggtctgggacacagagttggagctggcactgaagatctccagggacttcagagaccaataaaagcccatagggaagagagagaggatatagggaaacagaatcagatgtgtaatatacttggcacagcgaaaaaatggatttaaaagacaaaaatggaggtccaggtagatgtaattcacacagactgaaagtgagttcgggcttgtgtaaaacacatgagattggatttgaccccttggctctcaagtgtccccttagatctagaactgctccttggtggccattagatcgagtcagttttgatctgcatcacttagttattgggaatttctttgttggaaacaggaaaatttttttagattatttggtgtacggttttgctcacaacaataggtggaagttgctagtgcagtcttggtctgatggctgtgtgcatcgcacattcggcttggtgaaatccttctctaaagcctctttttgtatttttataactaaacagaggaagtcttcagaagacctcgctttaaaacaaatttgtgcaaacactgctagagtcattttgaagctcaagcattttcactttgtttcttacatgtgtacttttttgtttacttgtgaaaatggccatctttaagcatatttattttctgccactttatttaaaggcaagcaatattttcttgatcataaatattttgtaatgaaatacttcctcttttccagggctttgtatgcacttgtataattacattgatggcaatgtagagtttgaatttcagtctgtaaatacttttttggaaaatagaaatttttattgctttaaagttttggatatgggtggttttcttttccgggtttggtggaaagtaatttgagaactttaaggttgtctttttaactgctggcaaaatgttgattttttaatattagataaaacgagtaaacgaaattccccagaaattagtagtaagtggggtctttgtgggttgggaagtagttttaatgtagaaagacatttacatataagtctgtttaatttcaaaggagtttgtgaaaaaaaatccatggtgaaaatgaaacaatgacatggttaatctggaacttacgttcttataccaataaaaggtacctcaatacatgttctttcaa

SEQ ID NO: 16403 - DNA, 3656 bp, Homo sapiens
acagaggctgtggctggaaggagctgggcatccggcctgaggcgcagcggtcgcgttagttcggcccaatggcggcaccgctgcttcacacgcgtttgccgggagatgcggccgcttcgtcctctgcagttaagaagctgggcgcgtcgaggactgggatttcaaatatgcgtgcattagagaatgactttttcaattctcccccaagaaaaactgttcggtttggtggaactgtgacagaagtcttgctgaagtacaaaaagggtgaaacaaatgactttgagttgttgaagaaccagctgttagatccagacataaagagattgccttggttgaatagaagtcaaacagtagtggaagagtatttggcttttcttggtaatcttgtatcagcacagactgttttcctcagaccgtgtctcagcatgattgcttcccattttgtgcctccccgagtgatcattaaggaaggcgatgtagatgtttcagattctgatgatgaagatgataatcttcctgcaaattttgacacatgtcacagagccttgcaaataatagcaagatatgtaccatcgacaccgtggtttctcatgccaatactggtggaaaaatttccatttgttcgaaaatcagagagaacactggaatgttacgttcataacttactaaggattagtgtatattttccaaccttgaggcatgaaattctggagcttattattgaaaaactactcaagttggatgtgaatgcatcccggcagggtattgaagatgctgaagaaacagcaactcaaacttgtggtgggacagattccacggaaggattgtttaatatggatgaagatgaagaaactgaacatgaaacaaaggctggtcctgaacggctcgaccagatggtgcatcctgtagccgagcgcctggacatcctgatgtctttggttttgtcctacatgaaggatgtctgctatgtagatggtaaggttgataacggcaaaacaaaggatctatatcgcgacctgataaacatctttgacaaactcctgttgcccacccatgcctcctgccatgtacagtttttcatgttttacctctgtagtttcaaattgggattcgcagaggcatttttggaacatctctggaaaaaattgcaggacccaagtaatcctgccatcatcaggcaggctgctggaaattatattggaagctttttggcaagagctaaatttattcctcttattactgtaaaatcatgcctagatcttttggttaactggctgcacatataccttaataaccaggattcgggaacaaaggcattctgcgatgttgctctccatggaccattttactcagcctgccaagctgtgttctacacctttgtttttagacacaagcagcttttgagcggaaacctgaaagaaggtttgcagtatcttcagagtctgaattttgagcggatagtgatgagccagctaaatcccctgaagatttgcctgccctcagtggttaacttttttgctgcaatcacaaataagtaccagctcgtcttctgctacaccatcattgagaggaacaatcgccagatgctgccagtcattaggagtaccgctggaggagactcagtgcagatctgcacaaacccgctggacaccttcttcccctttgatccctgtgtgctgaagaggtcaaagaaattcattgatcctatttatcaggtgtgggaagacatgagtgctgaagagctacaggagttcaagaaacccatgaaaaaggacatagtggaagatgaagatgatgactttctgaaaggcgaagtgccccagaatgataccgtgattgggatcacaccaagctcctttgacacgcatttccgaagtccttcaagtagtgtgggctccccacccgtgttgtacatgcaacccagtcccctctgacggcagaaatttgtgactgagatgtgacatttgggattccccatcacttgtcatgccctcagcacccagcttgtgccattgggcattgatggcattgaactagagcgagtgcctgcctcggctgtggcacttccaggttcgactgaatcaagcatctgaagactgggtttttttgttgttgttgttccccttacagacaaaatgaagactatcatgtgcaatcttttacagtggggttgatgatacatttggaaggatttgcttgtttaatatgtacattttttgtgttaacagctttttgacacaattactgggtaatttctaatataggcagcagactgttttacgggttgctgttttaacatgggtttttgtcagatccatggtcttaggacttgactgatgagctttcagtgaagaatcctctaagataaaacttctatttaaagactttaactagaaagtgtttattttggctacattgttcaccttctgctgtattggtatttgtctgttgggatttcaagggagtgtagagaagacagaaggaaagctgagagctggcccgacatggtctgggacacagagttggagctggcactgaagatctccagggacttcagagaccaataaaagcccatagggaagagagagaggatatagggaaacagaatcagatgtgtaatatacttggcacagcgaaaaaatggatttaaaagacaaaaatggaggtccaggtagatgtaattcacacagactgaaagtgagttcgggcttgtgtaaaacacatgagattggatttgaccccttggctctcaagtgtccccttagatctagaactgctccttggtggccattagatcgagtcagttttgatctgcatcacttagttattgggaatttctttgttggaaacaggaaaatttttttagattatttggtgtacggttttgctcacaacaataggtggaagttgctagtgcagtcttggtctgatggctgtgtgcatcgcacattcggcttggtgaaatccttctctaaagcctctttttgtatttttataactaaacagaggaagtcttcagaagacctcgctttaaaacaaatttgtgcaaacactgctagagtcattttgaagctcaagcattttcactttgtttcttacatgtgtacttttttgtttacttgtgaaaatggccatctttaagcatatttattttctgccactttatttaaaggcaagcaatattttcttgatcataaatattttgtaatgaaatacttcctcttttccagggctttgtatgcacttgtataattacattgatggcaatgtagagtttgaatttcagtctgtaaatacttttttggaaaatagaaatttttattgctttaaagttttggatatgggtggttttcttttccgggtttggtggaaagtaatttgagaactttaaggttgtctttttaactgctggcaaaatgttgattttttaatattagataaaacgagtaaacgaaattccccagaaattagtagtaagtggggtctttgtgggttgggaagtagttttaatgtagaaagacatttacatataagtctgtttaatttcaaaggagtttgtgaaaaaaaatccatggtgaaaatgaaacaatgacatggttaatctggaacttacgttcttataccaataaaaggtacctcaatacatgttctttcaa

SEQ ID NO: 16404 - DNA, 3006 bp, Homo sapiens
acagaggctgtggctggaaggagctgggcatccggcctgaggcgcagcggtcgcgttagttcggcccaatggcggcaccgctgcttcacacgcgtttgccgggagatgcggccgcttcgtcctctgcagttaagaagctgggcgcgtcgaggactgggatttcaaatatgcgtgcattagagaatgactttttcaattctcccccaagaaaaactgttcggtttggtggaactgtgacagaagtcttgctgaagtacaaaaagggtgaaacaaatgactttgagttgttgaagaaccagctgttagatccagacataaaggatgaccagatcatcaactggctgctagaattccgttcttctatcatgtacttgacaaaagactttgagcaacttatcagtattatattaagattgccttggttgaatagaagtcaaacagtagtggaagagtatttggcttttcttggtaatcttgtatcagcacagactgttttcctcagaccgtgtctcagcatgattgcttcccattttgtgcctccccgagtgatcattaaggaaggcgatgtagatgtttcagattctgatgatgaagatgataatcttcctgcaaattttgacacatgtcacagagccttgcaaataatagcaagatatgtaccatcgacaccgtggtttctcatgccaatactggtggaaaaatttccatttgttcgaaaatcagagagaacactggaatgttacgttcataacttactaaggattagtgtatattttccaaccttgaggcatgaaattctggagcttattattgaaaaactactcaagttggatgtgaatgcatcccggcagggtattgaagatgctgaagaaacagcaactcaaacttgtggtgggacagattccacggaaggattgtttaatatggatgaagatgaagaaactgaacatgaaacaaaggctggtcctgaacggctcgaccagatggtgcatcctgtagccgagcgcctggacatcctgatgtctttggttttgtcctacatgaaggatgtctgctatgtagatggtgtgggaagacatgagtgctgaagagctacaggagttcaagaaacccatgaaaaaggacatagtggaagatgaagatgatgactttctgaaaggcgaagtgccccagaatgataccgtgattgggatcacaccaagctcctttgacacgcatttccgaagtccttcaagtagtgtgggctccccacccgtgttgtacatgcaacccagtcccctctgacggcagaaatttgtgactgagatgtgacatttgggattccccatcacttgtcatgccctcagcacccagcttgtgccattgggcattgatggcattgaactagagcgagtgcctgcctcggctgtggcacttccaggttcgactgaatcaagcatctgaagactgggtttttttgttgttgttgttccccttacagacaaaatgaagactatcatgtgcaatcttttacagtggggttgatgatacatttggaaggatttgcttgtttaatatgtacattttttgtgttaacagctttttgacacaattactgggtaatttctaatataggcagcagactgttttacgggttgctgttttaacatgggtttttgtcagatccatggtcttaggacttgactgatgagctttcagtgaagaatcctctaagataaaacttctatttaaagactttaactagaaagtgtttattttggctacattgttcaccttctgctgtattggtatttgtctgttgggatttcaagggagtgtagagaagacagaaggaaagctgagagctggcccgacatggtctgggacacagagttggagctggcactgaagatctccagggacttcagagaccaataaaagcccatagggaagagagagaggatatagggaaacagaatcagatgtgtaatatacttggcacagcgaaaaaatggatttaaaagacaaaaatggaggtccaggtagatgtaattcacacagactgaaagtgagttcgggcttgtgtaaaacacatgagattggatttgaccccttggctctcaagtgtccccttagatctagaactgctccttggtggccattagatcgagtcagttttgatctgcatcacttagttattgggaatttctttgttggaaacaggaaaatttttttagattatttggtgtacggttttgctcacaacaataggtggaagttgctagtgcagtcttggtctgatggctgtgtgcatcgcacattcggcttggtgaaatccttctctaaagcctctttttgtatttttataactaaacagaggaagtcttcagaagacctcgctttaaaacaaatttgtgcaaacactgctagagtcattttgaagctcaagcattttcactttgtttcttacatgtgtacttttttgtttacttgtgaaaatggccatctttaagcatatttattttctgccactttatttaaaggcaagcaatattttcttgatcataaatattttgtaatgaaatacttcctcttttccagggctttgtatgcacttgtataattacattgatggcaatgtagagtttgaatttcagtctgtaaatacttttttggaaaatagaaatttttattgctttaaagttttggatatgggtggttttcttttccgggtttggtggaaagtaatttgagaactttaaggttgtctttttaactgctggcaaaatgttgattttttaatattagataaaacgagtaaacgaaattccccagaaattagtagtaagtggggtctttgtgggttgggaagtagttttaatgtagaaagacatttacatataagtctgtttaatttcaaaggagtttgtgaaaaaaaatccatggtgaaaatgaaacaatgacatggttaatctggaacttacgttcttataccaataaaaggtacctcaatacatgttctttcaa

SEQ ID NO: 16405 - DNA, 2450 bp, Homo sapiens
taaagttgacttgaatttttcttttctctagtactgtaaaatcatgcctagatcttttggttaactggctgcacatataccttaataaccaggattcgggaacaaaggcattctgcgatgttgctctccatggaccattttactcagcctgccaagctgtgttctacacctttgtttttagacacaagcagcttttgagcggaaacctgaaagaaggtttgcagtatcttcagagtctgaattttgagcggatagtgatgagccagctaaatcccctgaagatttgcctgccctcagtggttaacttttttgctgcaatcacaaataagtaccagctcgtcttctgctacaccatcattgagaggaacaatcgccagatgctgccagtcattaggagtaccgctggaggagactcagtgcagatctgcacaaacccgctggacaccttcttcccctttgatccctgtgtgctgaagaggtcaaagaaattcattgatcctatttatcaggtgtgggaagacatgagtgctgaagagctacaggagttcaagaaacccatgaaaaaggacatagtggaagatgaagatgatgactttctgaaaggcgaagtgccccagaatgataccgtgattgggatcacaccaagctcctttgacacgcatttccgaagtccttcaagtagtgtgggctccccacccgtgttgtacatgcaacccagtcccctctgacggcagaaatttgtgactgagatgtgacatttgggattccccatcacttgtcatgccctcagcacccagcttgtgccattgggcattgatggcattgaactagagcgagtgcctgcctcggctgtggcacttccaggttcgactgaatcaagcatctgaagactgggtttttttgttgttgttgttccccttacagacaaaatgaagactatcatgtgcaatcttttacagtggggttgatgatacatttggaaggatttgcttgtttaatatgtacattttttgtgttaacagctttttgacacaattactgggtaatttctaatataggcagcagactgttttacgggttgctgttttaacatgggtttttgtcagatccatggtcttaggacttgactgatgagctttcagtgaagaatcctctaagataaaacttctatttaaagactttaactagaaagtgtttattttggctacattgttcaccttctgctgtattggtatttgtctgttgggatttcaagggagtgtagagaagacagaaggaaagctgagagctggcccgacatggtctgggacacagagttggagctggcactgaagatctccagggacttcagagaccaataaaagcccatagggaagagagagaggatatagggaaacagaatcagatgtgtaatatacttggcacagcgaaaaaatggatttaaaagacaaaaatggaggtccaggtagatgtaattcacacagactgaaagtgagttcgggcttgtgtaaaacacatgagattggatttgaccccttggctctcaagtgtccccttagatctagaactgctccttggtggccattagatcgagtcagttttgatctgcatcacttagttattgggaatttctttgttggaaacaggaaaatttttttagattatttggtgtacggttttgctcacaacaataggtggaagttgctagtgcagtcttggtctgatggctgtgtgcatcgcacattcggcttggtgaaatccttctctaaagcctctttttgtatttttataactaaacagaggaagtcttcagaagacctcgctttaaaacaaatttgtgcaaacactgctagagtcattttgaagctcaagcattttcactttgtttcttacatgtgtacttttttgtttacttgtgaaaatggccatctttaagcatatttattttctgccactttatttaaaggcaagcaatattttcttgatcataaatattttgtaatgaaatacttcctcttttccagggctttgtatgcacttgtataattacattgatggcaatgtagagtttgaatttcagtctgtaaatacttttttggaaaatagaaatttttattgctttaaagttttggatatgggtggttttcttttccgggtttggtggaaagtaatttgagaactttaaggttgtctttttaactgctggcaaaatgttgattttttaatattagataaaacgagtaaacgaaattccccagaaattagtagtaagtggggtctttgtgggttgggaagtagttttaatgtagaaagacatttacatataagtctgtttaatttcaaaggagtttgtgaaaaaaaatccatggtgaaaatgaaacaatgacatggttaatctggaacttacgttcttataccaataaaaggtacctcaatacatgttctttcaa

SEQ ID NO: 16406 - DNA, 1703 bp, Homo sapiens
cccacgcgtccgccacgcgtcgcatcacttgtcatgccctcagcacccagcttgtgccattgggcattgatggcattgaactagagcgagtgcctgcctcggctgtggcacttccaggttcgactgaatcaagcatctgaagactgggtttttttgttgttgttgttccccttacagacaaaatgaagactatcatgtgcaatcttttacagtggggttgatgatacatttggaaggatttgcttgtttaatatgtacattttttgtgttaacagctttttgacacaattactgggtaatttctaatataggcagcagactgttttacgggttgctgttttaacatgggtttttgtcagatccatggtcttaggacttgactgatgagctttcagtgaagaatcctctaagataaaacttctatttaaagactttaactagaaagtgtttattttggctacattgttcaccttctgctgtattggtatttgtctgttgggatttcaagggagtgtagagaagacagaaggaaagctgagagctggcccgacatggtctgggacacagagttggagctggcactgaagatctccagggacttcagagaccaataaaagcccatagggaagagagagaggatatagggaaacagaatcagatgtgtaatatacttggcacagcgaaaaaatggatttaaaagacaaaaatggaggtccaggtagatgtaattcacacagactgaaagtgagttcgggcttgtgtaaaacacatgagattggatttgaccccttggctctcaagtgtccccttagatctagaactgctccttggtggccattagatcgagtcagttttgatctgcatcacttagttattgggaatttctttgttggaaacaggaaaatttttttagattatttggtgtacggttttgctcacaacaataggtggaagttgctagtgcagtcttggtctgatggctgtgtgcatcgcacattcggcttggtgaaatccttctctaaagcctctttttgtatttttataactaaacagaggaagtcttcagaagacctcgctttaaaacaaatttgtgcaaacactgctagagtcattttgaagctcaagcattttcactttgtttcttacatgtgtacttttttgtttacttgtgaaaatggccatctttaagcatatttattttctgccactttatttaaaggcaagcaatattttcttgatcataaatattttgtaatgaaatacttcctcttttccagggctttgtatgcacttgtataattacattgatggcaatgtagagtttgaatttcagtctgtaaatacttttttggaaaatagaaatttttattgctttaaagttttggatatgggtggttttcttttccgggtttggtggaaagtaatttgagaactttaaggttgtctttttaactgctggcaaaatgttgattttttaatattagataaaacgagtaaacgaaattccccagaaattagtagtaagtggggtctttgtgggttgggaagtagttttaatgtagaaagacatttacatataagtctgtttaatttcaaaggagtttgtgaaaaaaaatccatggtgaaaatgaaacaatgacatggttaatctggaacttacgttcttataccaataaaaggtacctcaatacatgttctttcaa

SEQ ID NO: 16407 - DNA, 2101 bp, Homo sapiens
caaagtgctgggattacaggcgtgagccaccgcgcccggccaggaggtggatttaaacgtgatacataggcgtgtgccactacactggctttcttttgaaattaagatattttcttcaccatctttacaaacgttaacaccttcctgaggaaggaattgttgaaagcttttcagtcagcactggtgatgttactgatgatttctgatgtttctgcaggacatagtggaagatgaagatgatgactttctgaaaggcgaagtgccccagaatgataccgtgattgggatcacaccaagctcctttgacacgcatttccgaagtccttcaagtagtgtgggctccccacccgtgttgtacatgcaacccagtcccctctgacggcagaaatttgtgactgagatgtgacatttgggattccccatcacttgtcatgccctcagcacccagcttgtgccattgggcattgatggcattgaactagagcgagtgcctgcctcggctgtggcacttccaggttcgactgaatcaagcatctgaagactgggtttttttgttgttgttgttccccttacagacaaaatgaagactatcatgtgcaatcttttacagtggggttgatgatacatttggaaggatttgcttgtttaatatgtacattttttgtgttaacagctttttgacacaattactgggtaatttctaatataggcagcagactgttttacgggttgctgttttaacatgggtttttgtcagatccatggtcttaggacttgactgatgagctttcagtgaagaatcctctaagataaaacttctatttaaagactttaactagaaagtgtttattttggctacattgttcaccttctgctgtattggtatttgtctgttgggatttcaagggagtgtagagaagacagaaggaaagctgagagctggcccgacatggtctgggacacagagttggagctggcactgaagatctccagggacttcagagaccaataaaagcccatagggaagagagagaggatatagggaaacagaatcagatgtgtaatatacttggcacagcgaaaaaatggatttaaaagacaaaaatggaggtccaggtagatgtaattcacacagactgaaagtgagttcgggcttgtgtaaaacacatgagattggatttgaccccttggctctcaagtgtccccttagatctagaactgctccttggtggccattagatcgagtcagttttgatctgcatcacttagttattgggaatttctttgttggaaacaggaaaatttttttagattatttggtgtacggttttgctcacaacaataggtggaagttgctagtgcagtcttggtctgatggctgtgtgcatcgcacattcggcttggtgaaatccttctctaaagcctctttttgtatttttataactaaacagaggaagtcttcagaagacctcgctttaaaacaaatttgtgcaaacactgctagagtcattttgaagctcaagcattttcactttgtttcttacatgtgtacttttttgtttacttgtgaaaatggccatctttaagcatatttattttctgccactttatttaaaggcaagcaatattttcttgatcataaatattttgtaatgaaatacttcctcttttccagggctttgtatgcacttgtataattacattgatggcaatgtagagtttgaatttcagtctgtaaatacttttttggaaaatagaaatttttattgctttaaagttttggatatgggtggttttcttttccgggtttggtggaaagtaatttgagaactttaaggttgtctttttaactgctggcaaaatgttgattttttaatattagataaaacgagtaaacgaaattccccagaaattagtagtaagtggggtctttgtgggttgggaagtagttttaatgtagaaagacatttacatataagtctgtttaatttcaaaggagtttgtgaaaaaaaatccatggtgaaaatgaaacaatgacatggttaatctggaacttacgttcttataccaataaaaggtacctcaatacatgttctttcaa

SEQ ID NO: 16408 - DNA, 2086 bp, Homo sapiens
  misc_feature (140)..(140): n is a, c, g, or t
tagtagtaaacaggtggggactccattgccagcttggtgccttatctactgggcagtcgagttggtgtcttcatgggcagaaataggttgtaaaggtggccaactctccaggtgagagagagttttgtagcaggactttnggttgtaaatcgactattaccaacctactggtgggtgagagttcaagaaacccatgaaaaaggacatagtggaagatgaagatgatgactttctgaaaggcgaagtgccccagaatgataccgtgattgggatcacaccaagctcctttgacacgcatttccgaagtccttcaagtagtgtgggctccccacccgtgttgtacatgcaacccagtcccctctgacggcagaaatttgtgactgagatgtgacatttgggattccccatcacttgtcatgccctcagcacccagcttgtgccattgggcattgatggcattgaactagagcgagtgcctgcctcggctgtggcacttccaggttcgactgaatcaagcatctgaagactgggtttttttgttgttgttgttccccttacagacaaaatgaagactatcatgtgcaatcttttacagtggggttgatgatacatttggaaggatttgcttgtttaatatgtacattttttgtgttaacagctttttgacacaattactgggtaatttctaatataggcagcagactgttttacgggttgctgttttaacatgggtttttgtcagatccatggtcttaggacttgactgatgagctttcagtgaagaatcctctaagataaaacttctatttaaagactttaactagaaagtgtttattttggctacattgttcaccttctgctgtattggtatttgtctgttgggatttcaagggagtgtagagaagacagaaggaaagctgagagctggcccgacatggtctgggacacagagttggagctggcactgaagatctccagggacttcagagaccaataaaagcccatagggaagagagagaggatatagggaaacagaatcagatgtgtaatatacttggcacagcgaaaaaatggatttaaaagacaaaaatggaggtccaggtagatgtaattcacacagactgaaagtgagttcgggcttgtgtaaaacacatgagattggatttgaccccttggctctcaagtgtccccttagatctagaactgctccttggtggccattagatcgagtcagttttgatctgcatcacttagttattgggaatttctttgttggaaacaggaaaatttttttagattatttggtgtacggttttgctcacaacaataggtggaagttgctagtgcagtcttggtctgatggctgtgtgcatcgcacattcggcttggtgaaatccttctctaaagcctctttttgtatttttataactaaacagaggaagtcttcagaagacctcgctttaaaacaaatttgtgcaaacactgctagagtcattttgaagctcaagcattttcactttgtttcttacatgtgtacttttttgtttacttgtgaaaatggccatctttaagcatatttattttctgccactttatttaaaggcaagcaatattttcttgatcataaatattttgtaatgaaatacttcctcttttccagggctttgtatgcacttgtataattacattgatggcaatgtagagtttgaatttcagtctgtaaatacttttttggaaaatagaaatttttattgctttaaagttttggatatgggtggttttcttttccgggtttggtggaaagtaatttgagaactttaaggttgtctttttaactgctggcaaaatgttgattttttaatattagataaaacgagtaaacgaaattccccagaaattagtagtaagtggggtctttgtgggttgggaagtagttttaatgtagaaagacatttacatataagtctgtttaatttcaaaggagtttgtgaaaaaaaatccatggtgaaaatgaaacaatgacatggttaatctggaacttacgttcttataccaataaaaggtacctcaatacatgttctttcaa

SEQ ID NO: 16409 - DNA, 1653 bp, Homo sapiens
  misc_feature (1644)..(1644): n is a, c, g, or t
acagaggctgtggctggaaggagctgggcatccggcctgaggcgcagcggtcgcgttagttcggcccaatggcggcaccgctgcttcacacgcgtttgccgggagatgcggccgcttcgtcctctgcagttaagaagctgggcgcgtcgaggactgggatttcaaatatgcgtgcattagagaatgactttttcaattctcccccaagaaaaactgttcggtttggtggaactgtgacagaagtcttgctgaagtacaaaaagggtgaaacaaatgactttgagttgttgaagaaccagctgttagatccagacataaaggatgaccagatcatcaactggctgctagaattccgttcttctatcatgtacttgacaaaagactttgagcaacttatcagtattatattaagattgccttggttgaatagaagtcaaacagtagtggaagagtatttggcttttcttggtaatcttgtatcagcacagactgttttcctcagaccgtgtctcagcatgattgcttcccattttgtgcctccccgagtgatcattaaggaaggcgatgtagatgtttcagattctgatgatgaagatgataatcttcctgcaaattttgacacatgtcacagagccttgcaaataatagcaagatatgtaccatcgacaccgtggtttctcatgccaatactggtggaaaaatttccatttgttcgaaaatcagagagaacactggaatgttacgttcataacttactaaggattagtgtatattttccaaccttgaggcatgaaattctggagcttattattgaaaaactactcaagttggatgtgaatgcatcccggcagggtattgaagatgctgaagaaacagcaactcaaacttgtggtgggacagattccacggaaggattgtttaatatggatgaagatgaagaaactgaacatgaaacaaaggctggtcctgaacggctcgaccagatggtgcatcctgtagccgagcgcctggacatcctgatgtctttggttttgtcctacatgaaggatgtctgctatgtagatggtaaggttgataacggcaaaacaaaggatctatatcgcgacctgataaacatctttgacaaactcctgttgcccacccatgcctcctgccatgtacagtttttcatgttttacctctgtagtttcaaattggtgagtaagaatgtgattaacattatcttagcttactttgtttttgcccaaaaattttccctaaaaactggggtggacggagaccatgaagtaaataattcttttctttgagcttacttgctagtctgcttaataaaatcgcattctcctttctttttttgttttcttttcctttcttttttgagacacagtctcgctctgctgcccactgctgcaacctccacctcttgggctcaacggactctcagtccttaccctctcgatagctgggaccacaggttaccatgcctggctaatttttgtatttttagaagaggtggggtttcgccacgttggccatactggtcttgaactcctgaccacaagtgatctccgctctgccccaagctggatacagtgtacacttctgccactcctccagtacactgagagaacagctcaggatctntagatacca

SEQ ID NO: 16410 - DNA, 1706 bp, Homo sapiens
acagaggctgtggctggaaggagctgggcatccggcctgaggcgcagcggtcgcgttagttcggcccaatggcggcaccgctgcttcacacgcgtttgccgggagatgcggccgcttcgtcctctgcagttaagaagctgggcgcgtcgaggactgggatttcaaatatgcgtgcattagagaatgactttttcaattctcccccaagaaaaactgttcggtttggtggaactgtgacagaagtcttgctgaagtacaaaaagggtgaaacaaatgactttgagttgttgaagaaccagctgttagatccagacataaaggatgaccagatcatcaactggctgctagaattccgttcttctatcatgtacttgacaaaagactttgagcaacttatcagtattatattaagattgccttggttgaatagaagtcaaacagtagtggaagagtatttggcttttcttggtaatcttgtatcagcacagactgttttcctcagaccgtgtctcagcatgattgcttcccattttgtgcctccccgagtgatcattaaggaaggcgatgtagatgtttcagattctgatgatgaagatgataatcttcctgcaaattttgacacatgtcacagagccttgcaaataatagcaagatatgtaccatcgacaccgtggtttctcatgccaatactggtggaaaaatttccatttgttcgaaaatcagagagaacactggaatgttacgttcataacttactaaggattagtgtatattttccaaccttgaggcatgaaattctggagcttattattgaaaaactactcaagttggatgtgaatgcatcccggcagggtattgaagatgctgaagaaacagcaactcaaacttgtggtgggacagattccacggaaggattgtttaatatggatgaagatgaagaaactgaacatgaaacaaaggctggtcctgaacggctcgaccagatggtgcatcctgtagccgagcgcctggacatcctgatgtctttggttttgtcctacatgaaggatgtctgctatgtagatggtaaggttgataacggcaaaacaaaggatctatatcgcgacctgataaacatctttgacaaactcctgttgcccacccatgcctcctgccatgtacagtttttcatgttttacctctgtagtttcaaattgggattcgcagaggcatttttggaacatctctggaaaaaattgcaggacccaagtaatcctgccatcatcaggcaggctgctggaaattatattggaagctttttggcaagagctaaatttattcctcttatgattcgggaacaaaggcattctgcgatgttgctctccatggaccattttactcagcctgccaagctgtgttctacacctttgtttttagacacaagcagcttttgagcggaaacctgaaagaaggtttgcagtatcttcagagtctgaattttgagcggatagtgatgagccagctaaatcccctgaagatttgcctgccctcagtggttaacttttttgctgcaatcacaaagatgaagacttgtggatatggatggtggtgatggttgcacaacaatatcaatttattttataccactgaaccgtgcacttcaaaatggttaagatggtaaattttatgttgtgtattttaccataataaaaaaaattgtagaggga

SEQ ID NO: 16411 - DNA, 248 bp, Homo sapiens
gctctgatgttgggtgcatatataattgttacgtcttcctgttgaattgacccttttatcattatgtaatgaccttctttgtctcttgtgacagtttttgacttgaagtctttttgtctaatataagaaaagctgcttacgctctgttttggtgaccatttgcatgatatatcttgtttcatcccttcactttcagcctacgtgtgtccttaaagctaaagtgagtcttttgtagacaccctataatt

SEQ ID NO: 16412 - DNA, 700 bp, Homo sapiens
agaatagcctgaacaacagagaccatctctactaaaaaaagcaaacaaaccaacctagccaagcatagtagcatacctactctggaggctgaggcaggagaatcctgagcctaggagtttgaggctgcagtgagctatgattgtaccatttccctccagcctgggtgacaaagtgagaccctgtttcagaaaagaaaaaagatatatcatgcaaatacaagtaaaaaggaagttggtgtagttatactaatatcagataatatggaatttaaggtaagaagcattactacagttaaagacagacatttcataatgataaaatgatcactagggatatagaaagttgtaaatttatatgtaactaatagcatagttttaagttctataacaaatattaaacataaatctgcagtcttagtggaattttacatacctctcaataggtgatagaattaagcagacaaaaaaatcagtaaaaatataaatcatcttactaaaaagcaaacttgacctaactgatatttctataatgttgatatcaactgtgacaaactactcatttttaaaaagccacatggaacatttaccatcttgatcataacctgagtcataaattaagcctcagttaaattttaacacatttaaatcatttacagtatgtgttctcaccatagtggattaagctaaaaaaaaaaaaaaa

SEQ ID NO: 16413 - DNA, 797 bp, Homo sapiens
  misc_feature (360)..(360): n is a, c, g, or t
aaaataataaataatagctgattagggtaatcatttatttaatcagaataaagattatatccataaaatttacttgcagagaagtactttctttttgttttaaagacagggtctcactctgtcacccaagctatggtgcagtggcacaatcacagctcactgcagcctggacctcctggcctcaaggggatgatcctcctacttcaggaattatgccaccatgcccggctagttgagaagtactttcaaatagcaacatgaagcctttcctttaccatttgaaaataaaacatagttgtaaacataaaccagtatgtctttgtaaagccaataatatatcattttataggagcattgtcntcttgtgtttttcaagttgactatgtagttcaatgtcagtctccattttaatatcttgtttgtttatcagcctgagcatatttcattttaaaatgtatttgttgagaagtcatggtggttttttgtttttcacaagtcaagtagcttgaacactatcacttgtccaatgggaaagttgatgcttatctttatggcaaatgcttggttgaataatatatttgcaaagatgttaattctacagagagctaaataaagttaagatacctgtaaaacagtttctccagatgactttaaaataagccttatttttgtaaatttatgttaaattttaggtgttaagttgtgaaatacctaatgatgtgggcctaaatttgcctcattcagactgagacagggctggtaaaattcatttctagctaataaactgtgctataact

SEQ ID NO: 16414 - DNA, 394 bp, Homo sapiens
gccatgacctcttgtgctcaggcagttctccctgcctcagcctccttagtagctggaacccacaggtatgtgcccacccacacccggctaatttttgtatttttttgtagagatgggttttcgctatgttgcccaggctggtctcaaattccctgggctcaaacaatccacccacctctgcctcccaaagtgctgggattacaggtgtgagccaccaagcccagcctagctcctctacctgaacttatttttcattatcctaaagtgataaaatagatcaagaagatcagaacaggcttaaattgatgctataaaaccaattactctgtattatctttgcaactcttttgtaagtctaaaattgtttgaaaataaaagtttattttaaaaatta

SEQ ID NO: 16415 - DNA, 354 bp, Homo sapiens
cttctgcttagccaatagccctgaagatcagcatattatgtgatatggtagaatctgcacctttcacaatgatgaagctaatgataaactattttcattgtactcaattgcaagaaggcatgagaatatgcagtactgtttagaataattttcttatacactggtcaatgtaaaacaaatttttaagtattggtacttgaattaataaaatattagttaaaaagaaagtttaactctccgaaacagtgccctcttgtgggtttcattaactgaagtttgactccagagggaaagaatgaccactccaccctagaattctctgcaccaatttttaaaataataaaaaaattttga

SEQ ID NO: 16416 - DNA, 365 bp, Homo sapiens
gttgatcttcagcccctgggctcaagcagtccttccaccttggtctcccaaagtgctgggattatatgtgtgagccacagcacctggcctcatctatgttttttaatgctgcatagctgaggcccttgagccagatccctggggttcatatttcattactgccactgtgtgagtacgactctggtcatctgttgaacttgttccctcatcagtaaaatgacttttaatacgaatacctgcgtgataagagtttttgtgggaattaaactgtaatacttagaaacgtatagtttagtgtcacatagtaggtgattgataaatttttgcttttttccatgatgtggatgcaatacattgttggacct

SEQ ID NO: 16417 - DNA, 569 bp, Homo sapiens
gtacaccacctgattatttagccacgctgaaatgctggctggggaccctgctggaaggaaggtccctgagaccccactggtcttttctactttgttcttcattacgagtgaagcgggctcaagatcttcccattgtcaccagcacggaaagagccccaagatcttgtggccattctgttttcctcttggactgaattgtcttccgtttgtttcttttttaaggtaagaattgtgacaaaggccagtcttttttcattgacgccccagattccccagccacgttagcctacagaagtataattcagagtaagtatttccatgagtactaaatgcagatgcctgtggggcaggaagcaacataaaggagccaggggtgtggaaggacaggtgggtggtggggtctgtgatgaccacagagtggcccccatagccgaggaagccaggagtccatgagaaatctctcaatgtgtgagtattgtgaattaattcatagtttaaaaaacatggtgagggtgaaatttatggcttaggaaatacatcccaataaagggataaagtaattcattttt

SEQ ID NO: 16418 - DNA, 1237 bp, Homo sapiens
accacgaaggcggcaaaggcgacggaatggaggaggtgcctcacgactgtccaggggccgacagcgcccaggcgggcagaggggcttcatgtcagggatgccccaaccagcggctgtgcgcttctggagcgggggccactccggacacggctatagaggaaatcaaagagaaaatgaagactgtaaaacacaaaatcttggtattgtctgggaaaggcggtgttgggaaaagcacattcagcgcccaccttgcccatggcctagcagaggatgaaaacacacagattgctcttctagacatcgatatatgtgggccatcgattcccaagataatgggattggaaggagagcaggttcaccagagtggctcaggctggtctccagtgtacgtggaagacaacctgggggtgatgtcagtgggcttcctgctcagcagtcctgatgatgctgttatctggaggggacccaagaaaaacggcatgatcaagcagttcctccgagatgtggactggggagaggtcgactacctcattgtggacaccccacctgggacgtcggatgaacacctctcggtcgtccggtacctggccacagcacacatcgatggagcagtgatcatcaccactccccaggaggtgtcactccaggatgtccggaaagaaatcaacttctgccgcaaggtgaagctgcccatcatcggggtggtggagaacatgagtggcttcatctgtcctaagtgcaagaaagaatctcagatattccctcccacaaccgggggcgcggagctcatgtgccaggacttggaggtccctctcctcggcagagtgcccctggatccgctcataggtaagaattgtgacaaaggccagtcttttttcattgacgccccagattccccagccacgttagcctacagaagtataattcagagaatccaagagttttgtaatctccatcagtcaaaagaagagaacctcatcagttcctgaaacgagagaatgttcaggaccaagcagttaccgagcgaggcactcactgggcagcacatccagccagacccgaccagctccgggatggggtgggtcacagcaaaaggaccagatgctggtgtggtccgaagccactttctcagagacactttaatcattgagtatttgtacacttttctttagaacatatataaagggcattctctacaaatgtgccgttttaagaataaaaccccctcaaatctctc

SEQ ID NO: 16419 - DNA, 750 bp, Homo sapiens
ggttcagacatttggtgtatgtgcttggctgaggagccaatggggcaaaggcgacggaatggaggaggtgcctcacgactgtccaggggccgacagcgcccaggcgggcagaggggcttcatgtcagggatgccccaaccagcggctgtgcgcttctggagcgggggccactccggacacggtaaaaaaaaaaaaaaaaaaaaaaaaaaaaaatttttggggggcttgggccctggaaaaggtttcttaagagcccattccggtggggcgcgcgggggcccagaggtgaggggcacgtgggcaaacgggggtcccaagggaagaccggggccaagcagcaaaggcgcggggagttctcccccaatataaaaaaaagcgccgcggggggacaccggagggttctggaacaacaattcgcgaaaggggatacacgggaggaccaaacgggggacctatcaacaagggggtccccaggggagcccgcgaatttcaaatttagcccgagtgtcgtgtgtgacacaagagaacaaaaacaaattaaaacaaaacaaaaaaaagaaagaaaaaaaaaaataaaaaataaaaaataaaaacaaaaacaaaacggcggaggccagggcgcgcccccgcgacggcggggcgccggggcggcgggggcagcccggcgggggcgaggcgcgcgccgcggccaccgcgcgccgccgcgcccggggccgcgggagggggcgggcgggggggcggctctgaaac

SEQ ID NO: 16420 - DNA, 377 bp, Homo sapiens
aagctggatgcatcgcgcagccatgcaggatcgacacctagatggaatccaaagaaatatcaggcacgagggaggtttttgaaaatcatccattcaggttcaaaagaagagaacctcatcagttcctgaaacgagagaatgttcaggaccaagcagttaccgagcgaggcactcactgggcagcacatccagccagacccgaccagctccgggatggggtgggtcacagcaaaaggaccagatgctggtgtggtccgaagccactttctcagagacactttaatcattgagtatttgtacacttttctttagaacatatataaagggcattctctacaaatgtgccgttttaagaataaaaccccctcaaatctctc

SEQ ID NO: 16421 - DNA, 699 bp, Homo sapiens
tgggggattttgtccccaagttggtgaccattgctgtttgcaaagttctcttctggagctgggaatacagcactgaaagcttcagacagttcctacctttgtggagactatgttctagttgggggagacaaacgtgtaaaccaataaatgagaccccttcaagtgtgataatagccttattttcttcctagcacttatttctaccattgtctgagaggtatttcagaggatcgttttaaacagccccaggactagtactaggactaggacttagctctttctagttgactggaagcgtgacattcgaggtttggtgtgggacctcatcccctgaactttggttttctttgcagctatagaggaaatcaaagagaaaatgaagactgtaaaacacaaaatcttggtattgtctgggaaaggcggtgttgggaaaagcacattcagcgcccaccttgcccatggcctagcagaggatgaaaacacacaggtgagacctcaggaaccactgggagatgctcattttgtctgagggtcgtgatggctactaaataactgattcctaggccaggcgcagtggttcatgcctgtaatcccagcactttgggaggccaaggcctaaaattgcaatttttaaattagtacctaagtacctacatatgatccttgattttgcccacaaagcctaataatatatttgct

SEQ ID NO: 16422 - DNA, 1271 bp, Homo sapiens
accacgaaggcggcaaaggcgacggaatggaggaggtgcctcacgactgtccaggggccgacagcgcccaggcgggcagaggggcttcatgtcagggatgccccaaccagcggctgtgcgcttctggagcgggggccactccggacacggctatagaggaaatcaaagagaaaatgaagactgtaaaacacaaaatcttggtattgtctgggaaaggcggtgttgggaaaagcacattcagcgcccaccttgcccatggcctagcagaggatgaaaacacacagattgctcttctagacatcgatatatgtgggccatcgattcccaagataatgggattggaaggagagcaggttcaccagagtggctcaggctggtctccagtgtacgtggaagacaacctgggggtgatgtcagtgggcttcctgctcagcagtcctgatgatgctgttatctggaggggacccaagaaaaacggcatgatcaagcagttcctccgagatgtggactggggagaggtcgactacctcattgtggacaccccacctgggacgtcggatgaacacctctcggtcgtccggtacctggccacagcacacatcgatggagcagtgatcatcaccactccccaggaggtgtcactccaggatgtccggaaagaaatcaacttctgccgcaaggtgaagctgcccatcatcggggtggtggagaacatgagtggcttcatctgtcctaagtgcaagaaagaatctcagatattccctcccacaaccgggggcgcggagctcatgtgccaggacttggaggtccctctcctcggcagagtgcccctggatccgctcataggtaagaattgtgacaaaggccagtcttttttcattgacgccccagattccccagccacgttagcctacagaagtataattcagagaatccaagagttttgtaatctccatcagtcaaaagaagagaacctcatcagttcctgaaacgagagaatgttcaggaccaagcagttaccgagcgaggcactcactgggcagcacatccagccagacccgaccagctccgggatggggtgggtcacagcaaaaggaccagatgctggtgtggtccgaagccactttctcagagacactttaatcattgagtatttgtacacttttctttagaacatatataaagggcattctctacaaatgtgccgttttaagaataaaaccccctcaaatctctcaaaagaatatagagacaaaacaaacaacaaaacg

SEQ ID NO: 16423 - DNA, 1400 bp, Homo sapiens
accacgaaggcggcaaaggcgacggaatggaggaggtgcctcacgactgtccaggggccgacagcgcccaggcgggcagaggggcttcatgtcagggatgccccaaccagcggctgtgcgcttctggagcgggggccactccggacacggctatagaggaaatcaaagagaaaatgaagactgtaaaacacaaaatcttggtattgtctgggaaaggcggtgttgggaaaagcacattcagcgcccaccttgcccatggcctagcagaggatgaaaacacacagattgctcttctagacatcgatatatgtgggccatcgattcccaagataatgggattggaaggagagcaggttcaccagagtggctcaggctggtctccagtgtacgtggaagacaacctgggggtgatgtcagtgggcttcctgctcagcagtcctgatgatgctgttatctggaggggacccaagaaaaacggcatgatcaagcagttcctccgagatgtggactggggagaggtcgactacctcattgtggacaccccacctgggacgtcggatgaacacctctcggtcgtccggtacctggccacagcacacatcgatggagcagtgatcatcaccactccccaggaggtgtcactccaggatgtccggaaagaaatcaacttctgccgcaaggtgaagctgcccatcatcggggtggtggagaacatgagtggcttcatctgtcctaagtgcaagaaagaatctcagatattccctcccacaaccgggggcgcggagctcatgtgccaggacttggaggtccctctcctcggcagagtgcccctggatccgctcataggtaagaattgtgacaaaggccagtcttttttcattgacgccccagattccccagccacgttagcctacagaagtataattcagagaatccaagagttttgtaatctccatcagtcaaaagaagagaacctcatcagttcctgaaacgagagaatgttcaggaccaagcagttaccgagcgaggcactcactgggcagcacatccagccagacccgaccagctccgggatggggtgggtcacagcaaaaggaccagatgctggtgtggtccgaagccactttctcagagacactttaatcattgagtatttgtacacttttctttagaacatatataaagggcattctctacaaatgtgccgttttaagaataaaaccccctcaaatctctcccccgaggcctgtttcacgtaaaaaacaaatgggttgtgggatcgtgggattctgctgtgtcggaagcttagtcgattgtagaaactcccgtttaagccatttctgcctgtgaagataagaaagcctaatgctggtgaatctccagcccctcgaggccaggct

SEQ ID NO: 16424 - DNA, 1087 bp, Homo sapiens
accacgaaggcggcaaaggcgacggaatggaggaggtgcctcacgactgtccaggggccgacagcgcccaggcgggcagaggggcttcatgtcagggatgccccaaccagcggctgtgcgcttctggagcgggggccactccggacacggctatagaggaaatcaaagagaaaatgaagactgtaaaacacaaaatcttggtattgtctgggaaaggcggtgttgggaaaagcacattcagcgcccaccttgcccatggcctagcagaggatgaaaacacacagattgctcttctagacatcgatatatgtgggccatcgattcccaagataatgggattggaaggagagcaggttcaccagagtggctcaggctggtctccagtgtacgtggaagacaacctgggggtgatgtcagtgggcttcctgctcagcagtcctgatgatgctgttatctggaggggacccaagaaaaacggcatgatcaagcagttcctccgagatgtggactggggagaggtcgactacctcattgtggacaccccacctgggacgtcggatgaacacctctcggtcgtccggtacctggccacagcacacatcgatggagcagtgatcatcaccactccccaggaggtgtcactccaggatgtccggaaagaaatcaacttctgccgcaaggtgaagctgcccatcatcggggtggtggagaacatgagtggcttcatctgtcctaagtgcaagaaagaatctcagatattccctcccacaaccgggggcgcggagctcatgtgccaggacttggaggtccctctcctcggcagagtgcccctggatccgctcataggtaagaattgtgacaaaggccagtcttttttcattgacgccccagattccccagccacgttagcctacagaagtataattcagagaatccaagagttttgtaatctccatcagtcaaaagaagagaacctcatcagttcctgaaacgagagaatgttcaggaccaagcagttaccgagcgaggcactcactggggtactggcccgcacatccgtactggcccgcacatccgtactggcccg

SEQ ID NO: 16425 - DNA, 1082 bp, Homo sapiens
accacgaaggcggcaaaggcgacggaatggaggaggtgcctcacgactgtccaggggccgacagcgcccaggcgggcagaggggcttcatgtcagggatgccccaaccagcggctgtgcgcttctggagcgggggccactccggacacggctatagaggaaatcaaagagaaaatgaagactgtaaaacacaaaatcttggtattgtctgggaaaggcggtgttgggaaaagcacattcagcgcccaccttgcccatggcctagcagaggatgaaaacacacagattgctcttctagacatcgatatatgtgggccatcgattcccaagataatgggattggaaggagagcaggttcaccagagtggctcaggctggtctccagtgtacgtggaagacaacctgggggtgatgtcagtgggcttcctgctcagcagtcctgatgatgctgttatctggaggggacccaagaaaaacggcatgatcaagcagttcctccgagatgtggactggggagaggtcgactacctcattgtggacaccccacctgggacgtcggatgaacacctctcggtcgtccggtacctggccacagcacacatcgatggagcagtgatcatcaccactccccaggaggtgtcactccaggatgtccggaaagaaatcaacttctgccgcaaggtgaagctgcccatcatcggggtggtggagaacatgagtggcttcatctgtcctaagtgcaagaaagaatctcagatattccctcccacaaccgggggcgcggagctcatgtgccaggacttggaggtccctctcctcggcagagtgcccctggatccgctcataggtaagaattgtgacaaaggccagtcttttttcattgacgccccagattccccagccacgttagcctacagaagtataattcagagaatccaagagttttgtaatctccatcagtcaaaagaagagaacctcatcagttcctgaaacgagagaatgttcaggaccaagcagttaccgagcgaggcactcactgggccccgagggtcccgcgtgaccctcatagtaggtagggacagt

SEQ ID NO: 16426 - DNA, 1182 bp, Homo sapiens
accacgaaggcggcaaaggcgacggaatggaggaggtgcctcacgactgtccaggggccgacagcgcccaggcgggcagaggggcttcatgtcagggatgccccaaccagcggctgtgcgcttctggagcgggggccactccggacacgggtctgggaaaggcggtgttgggaaaagcacattcagcgcccaccttgcccatggcctagcagaggatgaaaacacacagattgctcttctagacatcgatatatgtgggccatcgattcccaagataatgggattggaaggagagcaggttcaccagagtggctcaggctggtctccagtgtacgtggaagacaacctgggggtgatgtcagtgggcttcctgctcagcagtcctgatgatgctgttatctggaggggacccaagaaaaacggcatgatcaagcagttcctccgagatgtggactggggagaggtcgactacctcattgtggacaccccacctgggacgtcggatgaacacctctcggtcgtccggtacctggccacagcacacatcgatggagcagtgatcatcaccactccccaggaggtgtcactccaggatgtccggaaagaaatcaacttctgccgcaaggtgaagctgcccatcatcggggtggtggagaacatgagtggcttcatctgtcctaagtgcaagaaagaatctcagatattccctcccacaaccgggggcgcggagctcatgtgccaggacttggaggtccctctcctcggcagagtgcccctggatccgctcataggtaagaattgtgacaaaggccagtcttttttcattgacgccccagattccccagccacgttagcctacagaagtataattcagagaatccaagagttttgtaatctccatcagtcaaaagaagagaacctcatcagttcctgaaacgagagaatgttcaggaccaagcagttaccgagcgaggcactcactgggcagcacatccagccagacccgaccagctccgggatggggtgggtcacagcaaaaggaccagatgctggtgtggtccgaagccactttctcagagacactttaatcattgagtatttgtacacttttctttagaacatatataaagggcattctctacaaatgtgccgttttaagaataaaaccccctcaaatctctc

SEQ ID NO: 16427 - DNA, 1168 bp, Homo sapiens
accacgaaggcggcaaaggcgacggaatggaggaggtgcctcacgactgtccaggggccgacagcgcccaggcgggcagaggggcttcatgtcagggatgccccaaccagcggctgtgcgcttctggagcgggggccactccggacacggctatagaggaaatcaaagagaaaatgaagactgtaaaacacaaaatcttggtattgtctgggaaaggcggtgttgggaaaagcacattcagcgcccaccttgcccatggcctagcagaggatgaaaacacacaggttcaccagagtggctcaggctggtctccagtgtacgtggaagacaacctgggggtgatgtcagtgggcttcctgctcagcagtcctgatgatgctgttatctggaggggacccaagaaaaacggcatgatcaagcagttcctccgagatgtggactggggagaggtcgactacctcattgtggacaccccacctgggacgtcggatgaacacctctcggtcgtccggtacctggccacagcacacatcgatggagcagtgatcatcaccactccccaggaggtgtcactccaggatgtccggaaagaaatcaacttctgccgcaaggtgaagctgcccatcatcggggtggtggagaacatgagtggcttcatctgtcctaagtgcaagaaagaatctcagatattccctcccacaaccgggggcgcggagctcatgtgccaggacttggaggtccctctcctcggcagagtgcccctggatccgctcataggtaagaattgtgacaaaggccagtcttttttcattgacgccccagattccccagccacgttagcctacagaagtataattcagagaatccaagagttttgtaatctccatcagtcaaaagaagagaacctcatcagttcctgaaacgagagaatgttcaggaccaagcagttaccgagcgaggcactcactgggcagcacatccagccagacccgaccagctccgggatggggtgggtcacagcaaaaggaccagatgctggtgtggtccgaagccactttctcagagacactttaatcattgagtatttgtacacttttctttagaacatatataaagggcattctctacaaatgtgccgttttaagaataaaaccccctcaaatctctc

SEQ ID NO: 16428 - DNA, 1236 bp, Homo sapiens
ggttcagacatttggtgtatgtgcttggctgaggagccaatggggcaaaggcgacggaatggaggaggtgcctcacgactgtccaggggccgacagcgcccaggcgggcagaggggcttcatgtcagggatgccccaaccagcggctgtgcgcttctggagcgggggccactccggacacggctatagaggaaatcaaagagaaaatgaagactgtaaaacacaaaatcttggtattgtctgggaaaggcggtgttgggaaaagcacattcagcgcccaccttgcccatggcctagcagaggatgaaaacacacagattgctcttctagacatcgatatatgtgggccatcgattcccaagataatgggattggaaggagagcagtacgtggaagacaacctgggggtgatgtcagtgggcttcctgctcagcagtcctgatgatgctgttatctggaggggacccaagaaaaacggcatgatcaagcagttcctccgagatgtggactggggagaggtcgactacctcattgtggacaccccacctgggacgtcggatgaacacctctcggtcgtccggtacctggccacagcacacatcgatggagcagtgatcatcaccactccccaggaggtgtcactccaggatgtccggaaagaaatcaacttctgccgcaaggtgaagctgcccatcatcggggtggtggagaacatgagtggcttcatctgtcctaagtgcaagaaagaatctcagatattccctcccacaaccgggggcgcggagctcatgtgccaggacttggaggtccctctcctcggcagagtgcccctggatccgctcataggtaagaattgtgacaaaggccagtcttttttcattgacgccccagattccccagccacgttagcctacagaagtataattcagagaatccaagagttttgtaatctccatcagtcaaaagaagagaacctcatcagttcctgaaacgagagaatgttcaggaccaagcagttaccgagcgaggcactcactgggcagcacatccagccagacccgaccagctccgggatggggtgggtcacagcaaaaggaccagatgctggtgtggtccgaagccactttctcagagacactttaatcattgagtatttgtacacttttctttagaacatatataaagggcattctctacaaatgtgccgttttaagaataaaaccccctcaaatctctc

SEQ ID NO: 16429 - DNA, 1193 bp, Homo sapiens
accacgaaggcggcaaaggcgacggaatggaggaggtgcctcacgactgtccaggggccgacagcgcccaggcgggcagaggggcttcatgtcagggatgccccaaccagcggctgtgcgcttctggagcgggggccactccggacacggctatagaggaaatcaaagagaaaatgaagactgtaaaacacaaaatcttggtattgtctgggaaaggcggtgttgggaaaagcacattcagcgcccaccttgcccatggcctagcagaggatgaaaacacacagattgctcttctagacatcgatatatgtgggccatcgattcccaagataatgggattggaaggagagcaggttcaccagagtggctcaggctggtctccagtgtacgtggaagacaacctgggggtgatgtcagtgggcttcctgctcagcagtcctgatgatgctgttatctggaggggacccaagaaaaacggcatgatcaagcagttcctccgagatgtggactggggagaggtcgactacctcattgtggacaccccacctgggacgtcggatgaacacctctcggtcgtccggtacctggccacagcacacatcgatggagcagtgatcatcaccactccccaggaggtgtcactccaggatgtccggaaagaaatcaacttctgccgcaaggtgaagctgcccatcatcggggtggtggagaacatgagtggcttcatctgtcctaagtgcaagaaagaatctcagatattccctcccacaaccgggggcgcggagctcatgtgccaggacttggaggtccctctcctcggcagagtgcccctggatccgctcataggtaagaattgtgacaaaggccagtcttttttcattgacgccccagattccccagccacgttagcctacagaagtataattcagagtaagtatttccatgagtactaaatgcagatgcctgtggggcaggaagcaacataaaggagccaggggtgtggaaggacaggtgggtggtggggtctgtgatgaccacagagtggcccccatagccgaggaagccaggagtccatgagaaatctctcaatgtgtgagtattgtgaattaattcatagtttaaaaaacatggtgagggtgaaatttatggcttaggaaatacatcccaataaagggataaagtaattcattttt

SEQ ID NO: 16430 - DNA, 1153 bp, Homo sapiens
accacgaaggcggcaaaggcgacggaatggaggaggtgcctcacgactgtccaggggccgacagcgcccaggcgggcagaggggcttcatgtcagggatgccccaaccagcggctgtgcgcttctggagcgggggccactccggacacggctatagaggaaatcaaagagaaaatgaagactgtaaaacacaaaatcttggtattgtctgggaaaggcggtgttgggaaaagcacattcagcgcccaccttgcccatggcctagcagaggatgaaaacacacagattgctcttctagacatcgatatatgtgggccatcgattcccaagataatgggattggaaggagagcaggttcaccagagtggctcaggctggtctccagtgtacgtggaagacaacctgggggtgatgtcagtgggcttcctgctcagcagtcctgatgatgctgttatctggaggggacccaagaaaaacggcatgatcaagcagttcctccgagatgtggactggggagaggtcgactacctcattgtggacaccccacctgggacgtcggatgaacacctctcggtcgtccggtacctggccacagcacacatcgatggagcagtgatcatcaccactccccaggaggtgtcactccaggatgtccggaaagaaatcaacttctgccgcaaggtgaagctgcccatcatcggggtggtggagaacatgagtggcttcatctgtcctaagtgcaagaaagaatctcagatattccctcccacaaccgggggcgcggagctcatgtgccaggacttggaggtccctctcctcggcagagtgcccctggatccgctcataggaatccaagagttttgtaatctccatcagtcaaaagaagagaacctcatcagttcctgaaacgagagaatgttcaggaccaagcagttaccgagcgaggcactcactgggcagcacatccagccagacccgaccagctccgggatggggtgggtcacagcaaaaggaccagatgctggtgtggtccgaagccactttctcagagacactttaatcattgagtatttgtacacttttctttagaacatatataaagggcattctctacaaatgtgccgttttaagaataaaaccccctcaaatctctc

SEQ ID NO: 16431 - DNA, 1051 bp, Homo sapiens
accacgaaggcggcaaaggcgacggaatggaggaggtgcctcacgactgtccaggggccgacagcgcccaggcgggcagaggggcttcatgtcagggatgccccaaccagcggctgtgcgcttctggagcgggggccactccggacacggctatagaggaaatcaaagagaaaatgaagactgtaaaacacaaaatcttggtattgtctgggaaaggcggtgttgggaaaagcacattcagcgcccaccttgcccatggcctagcagaggatgaaaacacacagattgctcttctagacatcgatatatgtgggccatcgattcccaagataatgggattggaaggagagcaggttcaccagagtggctcaggctggtctccagtgtacgtggaagacaacctgggggtgatgtcagtgggcttcctgctcagcagtcctgatgatgctgttatctggaggggacccaagaaaaacggcatgatcaagcagttcctccgagatgtggactggggagaggtcgactacctcattgtggacaccccacctgggacgtcggatgaacacctctcggtcgtccggtacctggccacagcacacatcgatggagcagtgatcatcaccactccccaggaggtgtcactccaggatgtccggaaagaaatcaacttctgccgcaaggtgaagctgcccatcatcggggtggtggagaacatgagtggcttcatctgtcctaagtgcaagaaagaatctcagatattccctcccacaaccgggggcgcggagctcatgtgccaggacttggaggtccctctcctcggcagagtgcccctggatccgctcataggaatccaagagttttgtaatctccatcagtcaaaagaagagaacctcatcagttcctgaaacgagagaatgttcaggaccaagcagttaccgagcgaggcactcactggggctgcccacgaagtggctgccccaagtgttcaggtttactgagagcattaggggcaacaagggagccctgggcatctggggacaaggcctggcat

SEQ ID NO: 16432 - DNA, 782 bp, Homo sapiens
accacgaaggcggcaaaggcgacggaatggaggaggtgcctcacgactgtccaggggccgacagcgcccaggcgggcagaggggcttcatgtcagggatgccccaaccagcggctgtgcgcttctggagcgggggccactccggacacggctatagaggaaatcaaagagaaaatgaagactgtaaaacacaaaatcttggtattgtctgggaaaggcggtgttgggaaaactgcccatcatcggggtggtggagaacatgagtggcttcatctgtcctaagtgcaagaaagaatctcagatattccctcccacaaccgggggcgcggagctcatgtgccaggacttggaggtccctctcctcggcagagtgcccctggatccgctcataggtaagaattgtgacaaaggccagtcttttttcattgacgccccagattccccagccacgttagcctacagaagtataattcagagaatccaagagttttgtaatctccatcagtcaaaagaagagaacctcatcagttcctgaaacgagagaatgttcaggaccaagcagttaccgagcgaggcactcactgggcagcacatccagccagacccgaccagctccgggatggggtgggtcacagcaaaaggaccagatgctggtgtggtccgaagccactttctcagagacactttaatcattgagtatttgtacacttttctttagaacatatataaagggcattctctacaaatgtgccgttttaagaataaaaccccctcaaatctctc

SEQ ID NO: 16433 - DNA, 1102 bp, Homo sapiens
accacgaaggcggcaaaggcgacggaatggaggaggtgcctcacgactgtccaggggccgacagcgcccaggcgggcagaggggcttcatgtcagggatgccccaaccagcggctgtgcgcttctggagcgggggccactccggacacggctatagaggaaatcaaagagaaaatgaagactgtaaaacacaaaatcttggtattgtctgggaaaggcggtgttgggaaaagcacattcagcgcccaccttgcccatggcctagcagaggatgaaaacacacagattgctcttctagacatcgatatatgtgggccatcgattcccaagataatgggattggaaggagagcaggttcaccagagtggctcaggctggtctccagtgtacgtggaagacaacctgggggtgatgtcagtgggcttcctgctcagcagtcctgatgatgctgttatctggaggggacccaagaaaaacggcatgatcaagcagttcctccgagatgtggactggggagaggtcgactacctcattgtggacaccccacctgggacgtcggatgaacacctctcggtcgtccggtacctggccacagcacacatcgatggagcagtgatcatcaccactccccaggaggtgtcactccaggatgtccggaaagaaatcaacttctgccgcaaggtgaagctgcccatcatcggggtggtggagaacatgagtggcttcatctgtcctaagtgcaagattgacgccccagattccccagccacgttagcctacagaagtataattcagagaatccaagagttttgtaatctccatcagtcaaaagaagagaacctcatcagttcctgaaacgagagaatgttcaggaccaagcagttaccgagcgaggcactcactgggcagcacatccagccagacccgaccagctccgggatggggtgggtcacagcaaaaggaccagatgctggtgtggtccgaagccactttctcagagacactttaatcattgagtatttgtacacttttctttagaacatatataaagggcattctctacaaatgtgccgttttaagaataaaaccccctcaaatctctc

SEQ ID NO: 16434 - DNA, 512 bp, Homo sapiens
cctgcccgagtgccatgctcgtctcagtcactagctaggagcagcctgggagtggcattgcctcaacacaaacgtggtggtggattttggagcatggcagctgctgccagagatccaagaggtaagaattgtgacaaaggccagtcttttttcattgacgccccagattccccagccacgttagcctacagaagtataattcagagaatccaagagttttgtaatctccatcagtcaaaagaagagaacctcatcagttcctgaaacgagagaatgttcaggaccaagcagttaccgagcgaggcactcactgggcagcacatccagccagacccgaccagctccgggatggggtgggtcacagcaaaaggaccagatgctggtgtggtccgaagccactttctcagagacactttaatcattgagtatttgtacacttttctttagaacatatataaagggcattctctacaaatgtgccgttttaagaataaaaccccctcaaatctctc

SEQ ID NO: 16435 - DNA, 786 bp, Homo sapiens
accacgaaggcggcaaaggcgacggaatggaggaggtgcctcacgactgtccaggggccgacagcgcccaggcgggcagaggggcttcatgtcagggatgccccaaccagcggctgtgcgcttctggagcgggggccactccggacacggctatagaggaaatcaaagagaaaatgaagactgtaaaacacaaaatcttggtattgtctgggaaaggcggtgttgggaaaagcacattcagcgcccaccttgcccatggcctagcagaggatgaaaacacacagattgctcttctagacatcgatatatgtgggccatcgattcccaagataatgggattggaaggagagcaggttcaccagagtggctcaggctggtctccagtgtacgtggaagacaacctgggggtgatgtcagtgggcttcctgctcagcagtcctgatgatgctgttatctggaggggacccaagaaaaacggcatgatcaagcagttcctccgagctgacaaacccatcttgaaggctggccgggcgtaccacaaatataaggcaaagaggaactgctggccacgagtacggggtgtggccatgaatcctgtggagcatccttttggaggtggcaaccaccagcacatcggcaagccctccaccatccgcagagatgcccctgctggccgcaaagtgggtctcattgctgcccgccggactggacgtctccggggaaccaagactgtgcaggagaaagagaactagtgctgagggcctcaataaagtttgtgtttatgcc

SEQ ID NO: 16436 - DNA, 685 bp, Homo sapiens
accacgaaggcggcaaaggcgacggaatggaggaggtgcctcacgactgtccaggggccgacagcgcccaggcgggcagaggggcttcatgtcagggatgccccaaccagcggctgtgcgcttctggagcgggggccactccggacacggctatagaggaaatcaaagagaaaatgaagactgtaaaacacaaaatcttggtattgtctgggaaaggcggtgttgggaaaagcacattcagcgcccaccttgcccatggcctagcagaggatgaaaacacacagattgctcttctagacatcgatatatgtgggccatcgattcccaagataatgggattggaaggagagcaggtaatagccggttacagaactcaggaaattattctcttaaggcaaactctgtagcactgaactgtcaaacctcaacaaagaggcatgcggagcccataaatgtttttttgttgttgttttgttttgttgtttttgagacaaggtctcactcttgtcgcccgggctggagtgcaagcgagactttttctcaaaaaaaaagctatagaaccctgaaattatttttatcatggttttatagtggcttatttgggtcagagaggtgagatcaacaggaggttgatctggtactgagacttaaggtaataatgtgaaagtgttatcagggcaagctt

SEQ ID NO: 16437 - DNA, 388 bp, Homo sapiens
taagtttctttaaaatgtggtccatccttgtgattctgcaaaaaaattatgtttcctcccctttgaatttgccttgcagaaagaatctcagatattccctcccacaaccgggggcgcggagctcatgtgccaggacttggaggtccctctcctcggcagagtgcccctggatccgctcataggtgggtgaccccagtgtggggcagcacctcactcctcggtcagccccacaggcacgggtcgggcacaacagggggcggctacagagaggggcaatggaaggaggagggtcaatggggcgctggagccagacccaccctccagctggcaccccaagaggccaccgggagagaggccgagacccctgcgggcaggtagcgggagcaag

SEQ ID NO: 16438 - DNA, 209 bp, Homo sapiens
aaccttttaacctttgtccttgcactttacaatctaaagatctacctgtggctctcagacttcctcacacttgggttttagaaataacttgtaaagcagactggacccaaggccgccttcagtgtcaagaagggcattgtgacttgcccctcaatttctgtccattgaagtctggttttccatgaggaacttgcgggctcacccacccc

SEQ ID NO: 16439 - DNA, 351 bp, Homo sapiens
gtcggtaggcccagtagtcaactcctaactaatagagtagttattagctggttagttgtctgcagctaagcaggaatgggactggatggtggggactcctgtgagaatgctgatgggtgccgcctcctcacctgtgtgtcgcaggtgtaggcgatacctgggaagccgttgtacggggctggcatttgctacttttataagatgtcacaagcatgacccaggagcacaccccatgagagtcacagtggtaccagcacctgctggctgctctctgcactgatgacagctgttagggaatcacattcgagactttaactagattggtccagagtgcttcactcttcttcttta

SEQ ID NO: 16440 - DNA, 159 bp, Homo sapiens
tcagatgcaattaaatataacagaacactgtgctggtcaaatggactatatatgtatatatgtgtgtgtgtgtatagaggtatgaactaatatatatgtatgaaatacatatatacacacacacttatatgtgagggagtagtggaggagggaagaaag

SEQ ID NO: 16441 - DNA, 596 bp, Homo sapiens
ggacttgagcatgggtagggtggcttcagagtggtagtctggctgtttgtttgtaatcaccaaaatgaagctacagtgatgtttcagtttacataacagagtcctgaggcttaaagatgccaggaaattaatttaaagatattgtagtacgtatccctgtccagactagaactccagtccaggagaacgccagtgctccttctgtttcacatagagaacacatcagtactgtgacacacagaaaggttttagtgggatgcttggttaagagaaatacgtttacaacaaaagaggtgatactgttgcttgtcttagaaaaatatgggagacctcaatcagctgaagttcaacatgttcaaaggtggacaaagtttctcgttgctctaagtaagtttaaaattgagccaaaaaggtcttgattgataagggtggctgatacatttttgaatgttttcactggcatgattcacaaaattgtataaattgtatagtcccaggctatcccaccattaactgcctcatggggactgtctctaacttccccaggacttgatccatagggaaatgcttgcaagaataaaaagcattaatgaatt

SEQ ID NO: 16442 - DNA, 556 bp, Homo sapiens
cagatgaaaatcatatgaagacacagcatcatgtcaggcaatagagacaaaagcatcaacctttcgggatcatttgatggattaaacaggaaaaccaaaaatctccaagtgagaagaccttacttgtcttctgaaagtctgaaaagctgggatacatgaagactgccatcccttgagtcacttgccctgtagctgccactgttggaaaagggcttgcttctgtgtccttgtgcccactttgaaaatccctgggaagtccttggagtcagatgagcaggcctccgccactctgccaaaaagtctgttcacttgatgaacacctgttttcgaagtcctgaatctgtagtcataagattcagccctgtttccttccaaatcttgacttcatattcaaactagagaataaaaatttaaaaacaggcccttgtgcctaggatgtagaaaaaattactaattgttttcctatgtcccacgtaaaataccaaacagtttttaaccattatgaaaatgtatcgtaagacagcttcaaaataaagtattttcatgtaagtttaaa

SEQ ID NO: 16443 - DNA, 477 bp, Homo sapiens
  misc_feature (97)..(97): n is a, c, g, or t
ccaacagctgggagaagctgagtcccatcagccattcaaaagactgcagccccagccaagagtttgatgtaacctcaggagagaccctgagccaganccacctagaaaagctgggatacatgaagactgccatcccttgagtcacttgccctgtagctgccactgttggaaaagggcttgcttctgtgtccttgtgcccactttgaaaatccctgggaagtccttggagtcagatgagcaggcctccgccactctgccaaaaagtctgttcaggtatttttcctctggaaatgagctgactaggcacgctacttctacttgaaaaagactgatgcttgtcttacaccattttgaggtcaccacagtacatgactcagaatcattagacaaatgttgattgaatatctcctacattccaaatactgtgttgaatgtggttaaagcattaaatgttaatggaatattttgtacagtcaa

SEQ ID NO: 16444 - DNA, 739 bp, Homo sapiens
  misc_feature (97)..(97): n is a, c, g, or t
ccaacagctgggagaagctgagtcccatcagccattcaaaagactgcagccccagccaagagtttgatgtaacctcaggagagaccctgagccaganccacctagaaaagctgggatacatgaagactgccatcccttgagtcacttgccctgtagctgccactgttggaaaagggcttgcttctgtgtccttgtgcccactttgaaaatccctgggaagtccttggagtcagatgagcaggcctccgccactctgccaaaaagtctgttcacaggaagtttcacatcactagagaagagagaagaaggacatttgtactgggaggagtcgaccggtcccagtaaggagaaagtagctacagcgtcatgggtgagctgggtcccccaaaaaggaactttaagggaatggactgaatcaagtctgagatgtccccaaagcaagaccaaagaactgaggaagagaagcattcatcagaaaccaaaattcagctacaagtgagcatccagatggaggtattatgaagaggaactgagactgagggcaaaaggtgccagccagaatcctggataggagagcaagaaccaggacctcatttaagagacaacctgcttaaggcagagtaagcacaaatgggcactcaacatcaatgaagtaacagcaaagtcacataataaaagcatggaattaagacaagctgaagattcggatgcaataaaacaaccacccattattaaaaaa

SEQ ID NO: 16445 - DNA, 530 bp, Homo sapiens
  misc_feature (97)..(97): n is a, c, g, or t
ccaacagctgggagaagctgagtcccatcagccattcaaaagactgcagccccagccaagagtttgatgtaacctcaggagagaccctgagccaganccacctagaaaagctgggatacatgaagactgccatcccttgagtcacttgccctgtagctgccactgttggaaaagggcttgcttctgtgtccttgtgcccactttgaaaatccctgggaagtccttggagtcagatgagcaggcctccgccactctgccaaaaagtctgttcaatcaggagtccccaacccctgagccatggactgatatggagctatggtctgttaggaactgggctgcccaggaggagcaatggtgcttctacaatttccttataggaggagtgaagagtaagcatttggattggaccaggatttggagaacttgtcatgttgctctacgtgcatatgaaatacatcattgtaacttagaatgtgaattacagaacaaacatgaaagttagaaaaatattctaaacatatttttatgat

SEQ ID NO: 16446 - DNA, 553 bp, Homo sapiens
  misc_feature (97)..(97): n is a, c, g, or t
ccaacagctgggagaagctgagtcccatcagccattcaaaagactgcagccccagccaagagtttgatgtaacctcaggagagaccctgagccaganccacctagaaaagctgggatacatgaagactgccatcccttgagtcacttgccctgtagctgccactgttggaaaagggcttgcttctgtgtccttgtgcccactttgaaaatccctgggaagtccttggagtcagatgagcaggcctccgccactctgccaaaaagtctgttcaaaaaatatgggagacctcaatcagctgaagttcaacatgttcaaaggtggacaaagtttctcgttgctctaagtaagtttaaaattgagccaaaaaggtcttgattgataagggtggctgatacatttttgaatgttttcactggcatgattcacaaaattgtataaattgtatagtcccaggctatcccaccattaactgcctcatggggactgtctctaacttccccaggacttgatccatagggaaatgcttgcaagaataaaaagcattaatgaatt

SEQ ID NO: 16447 - DNA, 549 bp, Homo sapiens
  misc_feature (97)..(97): n is a, c, g, or t
ccaacagctgggagaagctgagtcccatcagccattcaaaagactgcagccccagccaagagtttgatgtaacctcaggagagaccctgagccaganccacctagaaaagctgggatacatgaagactgccatcccttgagtcacttgccctgtagctgccactgttggaaaagggcttgcttctgtgtccttgtgcccactttgaaaatccctgggaagtccttggagtcagatgagcaggcctccgccactctgccaaaaagtctgttcaaaaaatatgggagacctcaatcagctgaagttcaacatgttcaaaggtggacaaagtttctcgttgctctaaggtatttttcctctggaaatgagctgactaggcacgctacttctacttgaaaaagactgatgcttgtcttacaccattttgaggtcaccacagtacatgactcagaatcattagacaaatgttgattgaatatctcctacattccaaatactgtgttgaatgtggttaaagcattaaatgttaatggaatattttgtacagtcaa

SEQ ID NO: 16448 - DNA, 308 bp, Homo sapiens
taatgtaagcattaacaactaagactttcataaaagcactgtatcttaactttcctggcctaaatcaaaaaaaggaaaacattgataagtgtcctagaaacttggattcttttatagatttgttcttggggctctgatgtttgggattgacgttctgtgctgaccattttatatgcattttatcttaatagtatgtgctttcatgaagattctgatacaagtgggcaatccttaaattatctttgaaaaattggttaattttggttaaaaaagggaaagtggctgggtgcagtggctcacgcctgtaa

SEQ ID NO: 16449 - DNA, 414 bp, Homo sapiens
agtaagcaactgaatatgtttacagtgcttggtgctggctgtctgcctcctatacgcattgccttggctgaagaaagtcaccatatgcaagtcaatccccttctaggaggtccacatcgcgtgttaattgatggaagggggtgttaaataggcccagtgccctagtcccaacccgtgacacttctaaaagatcatcccaggtgcagaacacccctatggttggctgaggcccgcactatgattgcacctccgttcggtaattctcttgtcccaaatctgcttcttttccttcccttccatttcataagaaaactctgctaaaccttcacattcaccttcatctcaaagtatgctttttgggaaattcaccttgcagcagaagcctagtagaaatattaaagatagatttgtgta

SEQ ID NO: 16450 - DNA, 1224 bp, Homo sapiens
gtatttttttgtagagatgagggttttgccatgttgtccaggctggtctcaaactcctgggctcaagcagtcctccacctgggccccccagagtgttgggattacagatgtgagccaccttacccagcctacctaaaacctttcagtctcttttctaaactccagaaaagagaagactctgaaaagctgaaatctgtgggggctgtagaaggttctaggattgatgtggtatttgacatttgtatagaaaaaattgccaatttcttttttttccttatggtaattctggataccagtttaataattttggagatatttaaaactgtcaatatgaggaataattcatacatgtgtacttttttcctacaaatgagtaattgaagaattttgtttagccagaccatttaattctcatcaattgcatatttctagttaaatccgaacttcattctatattaagtaacattttattcagatccatatctaaatagcaatattttgtgagatttactaagaatttttcctggtatgtatggttttggtgtattggaatgtacctctgttgactctgtgcttaaaaatgtaaagcaagtagctacttccatgaatcctcaaaatgccagttaaatgggcatagagttaagtggaaggtgattaaaagaaatagggaaacctactttctaactcgttgagggcaagagaacttctatggtcatcttttgtgtcaaatctttagtatatagtatttggctcatgccaggaggaccttattcaataaaggctgataatattgaaattggactttcttaaaaaatgttttaaaacttaccatttaaaaagccttctttaatatataatctaaaagttggggaggagtataattgaaggaaattatccaaattagatttttctgctttgccaaggatatgccatcaagaaacaatttttggggctatctttttatggtgatgaggtatgtgatacaatttggagaattctgaatttataaaaagaatacaatcgaaaattggcattgcttgtcttttgacaatcttgcagtaagctctaggcggtggccgtgacttagtttctgtgaataattggcaggttaagggtagaaaactcatttgaagattgatagcagtatcgttctttgcgtaatttaaaaacaggattagtagctggagcaacatggcaagaacctacttttccaaaaaaaaaaaa

SEQ ID NO: 16451 - DNA, 423 bp, Homo sapiens
  misc_feature (3)..(3): n is a, c, g, or t
  misc_feature (6)..(6): n is a, c, g, or t
  misc_feature (69)..(69): n is a, c, g, or t
ggncantaggtttttattatttattattattgtttgttttgagatgcaatcttgctctgtcacccaggntggtgtgcactgggcaacaagagctagactctatctcaatacaacaacacgtttattaataacagaagagaaactaggtgctgaagggacagtgggcagggaggggaggagagagcccagactgcagaatgaatcggagtgggcagaggggcatctccgcccacagggacagggaactcacaatggctctcacacagtctcagctgtgctgcttggggagccagtgtgctctcagagatccatccagacccattatcagagtggtttcttctcaggaacaccatgactcagaaagtcttttcagggctggaatgatggccaggtattatggaggccattaaaaattatttaatt

SEQ ID NO: 16452 - DNA, 566 bp, Homo sapiens
gaggaaactgaggctcagaaggataaaggaactctgagtttgtaagtggcacagccaggacttgaacctgaatcagtctgatccccagaagcaaggctcttagccacaatgcctgctgcagtcggccagctctgcatccctccataactcttccacactttccaatcccaagtctttgtacctggcatctcccttacctttttccatccagtaaccttggtgttttctcctcagtggacccttcttggccctgagccacatttgtggccctctctttggtgctcctgtaagttggcccttgtcccactgagtggtcaaaacctagtaacatgtccctctcctccacctctgtattcccagggcttggcaaatagtaagcacccaataactctgttaaatacatttgccttgaatatattctacctgatatctcagctcaagggaagtttgtgaatttcaagggaagtgtgttaatcagtatcacataaccaatttagtggttttcaatggagtaactgaagttacttgaaaagttttttttaattaaattaaattaattaattaat

SEQ ID NO: 16453 - DNA, 434 bp, Homo sapiens
catttgcaaaatagtaataaataaatatcagtgtccagcactgtgtctgggccatagtacgtgttcagtaaattatatgtctaatgttccattattggaacgctaagcatgtgggagttatttatatcctactgctcgggtcatcaccagggtctgatttttcacacgtgtctgcaattcaaaaaattgcaacctctggcataaatgggttaatgttattccttttctcatgctctcccagaatgtgacagggcttccgagggaaacactataccatggaagaaccggcagagtgtccttaaggccccggcaggagtcagggtcattatgtgctggagccaccatatttggtgaaaaggacttattcccaggcctgacccagcaggatcacctatgaaattggtttcttaggagattcctggctcttttctttg

SEQ ID NO: 16454 - DNA, 300 bp, Homo sapiens
ctctcccccacacctcaaagtagccacacctcctagggtcccctggcttagtgaatggaccactctcatcctgctgagcaggttagtaacctgggggtcaacctggacaccttccttctcatccccatgttccttgtatcacaaagttctcccctaattcctaagaatctagaatgcctccctggaacctctatgtctttggccggccatcttggtctgagcacccatcatctcttccctgcatcagtacaatgtcctactgacaggtcatttccacgtactctggccttctccaattca

SEQ ID NO: 16455 - DNA, 400 bp, Homo sapiens
aacacaccctcatgtcctcatcttaacctaatctcttctttaaaggtcctatctctaaatacagtcacattctcagataatgggggtagggcttcaacatatgaattttggagggatgcagtttcgcccataacaggataatttttttgttttgttttgttttgagacaagagcctgggcgacagagcaagactccatctcaaaaaaaaaaaaaaaaaaaaaaggaaatatgtgtggtatgatatgagtaagtttaaaagagatatgagtaagtttaaaagtccccacacagctgggcatggtggttcttgcctggagtcccagtctttgggaggctgaggattgcttgagctcaggaattccagcacagcctgggcagcatagtaagactatggctctc

SEQ ID NO: 16456 - DNA, 362 bp, Homo sapiens
gtcatagctcgctatagcctcaagctcctgggctcaagcaatctttctgccttagcctcctgagtagctgggactacaagcagacgccatcataccctgctaattttaaaattttattgtagatatgggggtctccctatgttccccaggctggtcttgaactcctgggctcatgtgatcctcttgcctgagcctcccaaagtgctgggattacaagtgtgagctgccatatctggcgttactgtgatttttattaaaaaatttgattgtggtaaagtatatgtaataaaatttacttattttaactatttttaagtatatacttcagtggcattaaatacaccttgttgtgcaaccatcac

SEQ ID NO: 16457 - DNA, 438 bp, Homo sapiens
atggctgtgtgctgtcttctggttctggagctcgagctaagtgagctctgcatgtttgagcttcctaggaatctggtcattatgactgataggtgccaggactcatgctgaaggtactccagtaagaaaagcacggtattatgggagcccaggaaaggggccactgactagaggcttccagggagatgtttgattcctgaatcttgaaagctgagttggtgttagctgggtgaaaggaagaagggagggctttgcagccagtgggaactgcaggaacagaaaggtgagaaacgtttgaggtgtgaaagagagcattattctagggctgttactacccatgtccagaagcttacgacttggaaaggtggagtggttgcctcgggattacgcctgggccaggctgggaggggctttgtgtgctaggccaagcagcttgaa

SEQ ID NO: 16458 - DNA, 492 bp, Homo sapiens
agggcagcccccactttcctacaaaatggagggagccatcccttccctgtccacctcaccaggggtgctatgacatgcaagtgagaagctgggcatgaacgcactttataaaagcaaaagctctgtgtaaatctaactacaaggacaatgccttgggagagattttgtcgggacagagaggagttgccagggaagaaggtttgaaagatacggttgtctagaggtgagaccaaaggatccagagacttggggaccagaggtgacagtggatgacgtgaagccacaggagccccacccccatgcagcctcttccccacccccccccaccacgcgctcaatcatgagtacctcaaaggattgttgggcttgggggaaaagaggtggattcctgggcaagaacctaaagtagcaggactcggaattctcgggaaattattatgactcaataaaagaattcacaccttaggtgtgggagtaagaacaaaaaaaact

SEQ ID NO: 16459 - DNA, 525 bp, Homo sapiens
gaagggcccaaagagttctcccaaaggagaactctcccatgacgccaaggttgcctcctcagccatgtcccttgtggcttcacctattatcccagctgttggccagcttggttgcctttccatctgtgaccccctcctccactgccttcttcctcactgtgcctgacttccccatccacacagcattttgtaccgaagccgaccgatgccacagcgcaggcccctgaggggcgctttgctgtgcaggctccagcctctcctgcatctgcttggcaaagtgaggtccacctccttgggtttttgcctctttctaaacaccacctgcaaactgcctccccgcaaaggaaagtagcagggacttgtcctccccagggcactgcacacaggctcgaagcctggtcgggaggctctttggtcaggctggaaagagctttgacaagacagagtggcccctgctgggctggggtgtgctggggagagtcccttttcctctgactcctgaactcatcaggcaacagtacagga

SEQ ID NO: 16460 - DNA, 858 bp, Homo sapiens
attccctgccaggcggcagcatcctcacgactgctgtgagtgtccccaggtctccagctgtgcagtgtgagggagctcttggaccagagcccctgctgcctcattacccagatgcacagccccggcgtcacaccggcctcccgagccccgtgttaactgcagaagaaattagccagactcaggcgctgggagcaggtcagctggccgccggcacctgtgagattgtgaccttggaccgggacagcagccagcctcggaggacgatcgcccggcagaccgcccgctgtgcgtgtagaaaggggcagatcgccggcaccacgagagcccggcccgcctgtgtggacgcaagaatcatcaagaccaagcagtggtgtgacatgcttccgtgtctggagggggaaggctgcgacttgttaatcaaccggtcaggctggacgtgcacgcagcccggcggagcggagagggcggccgtggtggaggcctccaccccaggagcaccccgcgcaccctcggaggacgggcttcggctgcgcggaggccgtggcacacctgcgggaggcagcgacggcccccacgcagacgccgggaacgcaggccgctttattcctctgtacttagatcaacttgaccgtactaaaatccctttctgttttaaccagttaaacatgcctcttctacagctccatttttgatagttggataatccagtatctgccaagagcatgttgggtctcccgtgactgctgcctcatcgataccccatttagctccagaaagcaaagaaaactcgagtaacacttgtttgaaagagatcattaaatgtattttgcaaagcctaaagttatatatttaacagtt

SEQ ID NO: 16461 - DNA, 1521 bp, Homo sapiens
gcatgtacaggctgggtggttaatcggccgaggggcggatggagggcgcgagcgggcggccgcggaggctgcacccggcggggcgctgatgcggcgcctggaccttcgctgcgcgacttcgggggcgtcggccgagttgggactccgcgatgcagctcctgaaggcgctctgggcactggcaggggccgcgctctgctgcttcctcgtcctagtgatccacgcgcagttcctcaaagaaggtcagctggccgccggcacctgtgagattgtgaccttggaccgggacagcagccagcctcggaggacgatcgcccggcagaccgcccgctgtgcgtgtagaaaggggcagatcgccggcaccacgagagcccggcccgcctgtgtggacgcaagaatcatcaagaccaagcagtggtgtgacatgcttccgtgtctggagggggaaggctgcgacttgttaatcaaccggtcaggctggacgtgcacgcagcccggcgggaggataaagaccaccacggtctcctgacaaacacagcccctgaggggccccgggagtggccttggctccctggagagcccacgtctcagccacagttctccactcgcctcggacttcacccgttctctgccgcccgcccactccgtttccctgtggtccgtgaaggacggcctcaggccttggcatcctgagcttcggtctgtccagccgacccgaggaggccggactcagacacataggcggggggcggcacctggcatcagcaatacgcagtctgtgggagcccggccgcgcccagcccccgccgaccgtggcgttggccctgctgtcctcagaggaggaggaggaggaggcagctccggcagccacagaaggctgcagcccagcccgcctgagacacgacgcctgccccaggggactgtcaggcacagaagcggcctcctcccgtgccccagactgtccgaattgcttttattttcttatactttcagtatactccatagaccaaagagcaaaatctatctgaacctggacgcaccctcactgtcagggtccctggggtcgcttgtgcgggcgggagggcaatggtggcagagacatgctggtggccccggcggagcggagagggcggccgtggtggaggcctccaccccaggagcaccccgcgcaccctcggaggacgggcttcggctgcgcggaggccgtggcacacctgcgggaggcagcgacggcccccacgcagacgccgggaacgcaggccgctttattcctctgtacttagatcaacttgaccgtactaaaatccctttctgttttaaccagttaaacatgcctcttctacagctccatttttgatagttggataatccagtatctgccaagagcatgttgggtctcccgtgactgctgcctcatcgataccccatttagctccagaaagcaaagaaaactcgagtaacacttgtttgaaagagatcattaaatgtattttgcaaagcctaaagttatatatttaacagtt

SEQ ID NO: 16462 - DNA, 1125 bp, Homo sapiens
gcatgtacaggctgggtggttaatcggccgaggggcggatggagggcgcgagcgggcggccgcggaggctgcacccggcggggcgctgatgcggcgcctggaccttcgctgcgcgacttcgggggcgtcggccgagttgggactccgcgatgcagctcctgaaggcgctctgggcactggcaggggccgcgctctgctgcttcctcgtcctagtgatccacgcgcagttcctcaaagaaggtcagctggccgccggcacctgtgagattgtgaccttggaccgggacagcagccagcctcggaggacgatcgcccggcagaccgcccgctgtgcgtgtagaaaggggcagatcgccggcaccacgagagcccggcccgcctgtgtggacgcaagaatcatcaagaccaagcagtggtgtgacatgcttccgtgtctggagggggaaggctgcgacttgttaatcaaccggtcaggctggacgtgcacgcagcccggcgggaggataaagaccaccacggtctcctgacaaacacagcccctgaggggccccgggagtggccttggctccctggagagcccacgtctcagccacagttctccactcgcctcggacttcacccgttctctgccgcccgcccactccgtttccctgtggtccgtgaaggacggcctcaggccttggcatcctgagcttcggtctgtccagccgacccgaggaggccggactcagacacataggcggggggcggcacctggcatcacaccccgcgcaccctcggaggacgggcttcggctgcgcggaggccgtggcacacctgcgggaggcagcgacggcccccacgcagacgccgggaacgcaggccgctttattcctctgtacttagatcaacttgaccgtactaaaatccctttctgttttaaccagttaaacatgcctcttctacagctccatttttgatagttggataatccagtatctgccaagagcatgttgggtctcccgtgactgctgcctcatcgataccccatttagctccagaaagcaaagaaaactcgagtaacacttgtttgaaagagatcattaaatgtattttgcaaagcctaaagttatatatttaacagtt

SEQ ID NO: 16463 - DNA, 903 bp, Homo sapiens
gcatgtacaggctgggtggttaatcggccgaggggcggatggagggcgcgagcgggcggccgcggaggctgcacccggcggggcgctgatgcggcgcctggaccttcgctgcgcgacttcgggggcgtcggccgagttgggactccgcgatgcagctcctgaaggcgctctgggcactggcaggggccgcgctctgctgcttcctcgtcctagtgatccacgcgcagttcctcaaagaaggtcagctggccgccggcacctgtgagattgtgaccttggaccgggacagcagccagcctcggaggacgatcgcccggcagaccgcccgctgtgcgtgtagaaaggggcagatcgccggcaccacgagagcccggcccgcctgtgtggacgcaagaatcatcaagaccaagcagtggtgtgacatgcttccgtgtctggagggggaaggctgcgacttgttaatcaaccggtcaggctggacgtgcacgcagcccggcggagcggagagggcggccgtggtggaggcctccaccccaggagcaccccgcgcaccctcggaggacgggcttcggctgcgcggaggccgtggcacacctgcgggaggcagcgacggcccccacgcagacgccgggaacgcaggccgctttattcctctgtacttagatcaacttgaccgtactaaaatccctttctgttttaaccagttaaacatgcctcttctacagctccatttttgatagttggataatccagtatctgccaagagcatgttgggtctcccgtgactgctgcctcatcgataccccatttagctccagaaagcaaagaaaactcgagtaacacttgtttgaaagagatcattaaatgtattttgcaaagcctaaagttatatatttaacagtt

SEQ ID NO: 16464 - DNA, 1511 bp, Homo sapiens
ggcggcggcggcggaggatggcgcgcgcggggcccgcacgtggaggccggcgcgggggcgcgggcagggccggctgctgagacgcgctgctgccccccgcgcgggcgccgcggcttcaatggcgccatcgcccaggaccggcagccggcaagatgcgaccgccctgcccagcatgtcctcaactttctgggcgttcatgatcctggccagcctgctcatcgcctactgcagtcagctggccgccggcacctgtgagattgtgaccttggaccgggacagcagccagcctcggaggacgatcgcccggcagaccgcccgctgtgcgtgtagaaaggggcagatcgccggcaccacgagagcccggcccgcctgtgtggacgcaagaatcatcaagaccaagcagtggtgtgacatgcttccgtgtctggagggggaaggctgcgacttgttaatcaaccggtcaggctggacgtgcacgcagcccggcgggaggataaagaccaccacggtctcctgacaaacacagcccctgaggggccccgggagtggccttggctccctggagagcccacgtctcagccacagttctccactcgcctcggacttcacccgttctctgccgcccgcccactccgtttccctgtggtccgtgaaggacggcctcaggccttggcatcctgagcttcggtctgtccagccgacccgaggaggccggactcagacacataggcggggggcggcacctggcatcagcaatacgcagtctgtgggagcccggccgcgcccagcccccgccgaccgtggcgttggccctgctgtcctcagaggaggaggaggaggaggcagctccggcagccacagaaggctgcagcccagcccgcctgagacacgacgcctgccccaggggactgtcaggcacagaagcggcctcctcccgtgccccagactgtccgaattgcttttattttcttatactttcagtatactccatagaccaaagagcaaaatctatctgaacctggacgcaccctcactgtcagggtccctggggtcgcttgtgcgggcgggagggcaatggtggcagagacatgctggtggccccggcggagcggagagggcggccgtggtggaggcctccaccccaggagcaccccgcgcaccctcggaggacgggcttcggctgcgcggaggccgtggcacacctgcgggaggcagcgacggcccccacgcagacgccgggaacgcaggccgctttattcctctgtacttagatcaacttgaccgtactaaaatccctttctgttttaaccagttaaacatgcctcttctacagctccatttttgatagttggataatccagtatctgccaagagcatgttgggtctcccgtgactgctgcctcatcgataccccatttagctccagaaagcaaagaaaactcgagtaacacttgtttgaaagagatcattaaatgtattttgcaaagcctaaagttatatatttaacagtt

SEQ ID NO: 16465 - DNA, 1476 bp, Homo sapiens
attccctgccaggcggcagcatcctcacgactgctgtgagtgtccccaggtctccagctgtgcagtgtgagggagctcttggaccagagcccctgctgcctcattacccagatgcacagccccggcgtcacaccggcctcccgagccccgtgttaactgcagaagaaattagccagactcaggcgctgggagcaggtcagctggccgccggcacctgtgagattgtgaccttggaccgggacagcagccagcctcggaggacgatcgcccggcagaccgcccgctgtgcgtgtagaaaggggcagatcgccggcaccacgagagcccggcccgcctgtgtggacgcaagaatcatcaagaccaagcagtggtgtgacatgcttccgtgtctggagggggaaggctgcgacttgttaatcaaccggtcaggctggacgtgcacgcagcccggcgggaggataaagaccaccacggtctcctgacaaacacagcccctgaggggccccgggagtggccttggctccctggagagcccacgtctcagccacagttctccactcgcctcggacttcacccgttctctgccgcccgcccactccgtttccctgtggtccgtgaaggacggcctcaggccttggcatcctgagcttcggtctgtccagccgacccgaggaggccggactcagacacataggcggggggcggcacctggcatcagcaatacgcagtctgtgggagcccggccgcgcccagcccccgccgaccgtggcgttggccctgctgtcctcagaggaggaggaggaggaggcagctccggcagccacagaaggctgcagcccagcccgcctgagacacgacgcctgccccaggggactgtcaggcacagaagcggcctcctcccgtgccccagactgtccgaattgcttttattttcttatactttcagtatactccatagaccaaagagcaaaatctatctgaacctggacgcaccctcactgtcagggtccctggggtcgcttgtgcgggcgggagggcaatggtggcagagacatgctggtggccccggcggagcggagagggcggccgtggtggaggcctccaccccaggagcaccccgcgcaccctcggaggacgggcttcggctgcgcggaggccgtggcacacctgcgggaggcagcgacggcccccacgcagacgccgggaacgcaggccgctttattcctctgtacttagatcaacttgaccgtactaaaatccctttctgttttaaccagttaaacatgcctcttctacagctccatttttgatagttggataatccagtatctgccaagagcatgttgggtctcccgtgactgctgcctcatcgataccccatttagctccagaaagcaaagaaaactcgagtaacacttgtttgaaagagatcattaaatgtattttgcaaagcctaaagttatatatttaacagtt

SEQ ID NO: 16466 - DNA, 1411 bp, Homo sapiens
aacgactctagaggcgtgggtccaaaagggactacaagatgcacttcctgaacgctctatgggcactgggaggggccctgctctgctgcttactaactctaacgatacacgcgcagaacatcaaacaacgtcagcttggcaccagcagatgggagatggccacctctgacacccacagccttcagacggtgacgacgattgcttcgcataccgtccgatgtgcgtgtagaaatgagtggatcaggctggaccatgacagcctggtcctcatgtgtggactcaagaatcatcaagaccaagcagtggtgtgacatgcttccgtgtctggagggggaaggctgcgacttgttaatcaaccggtcaggctggacgtgcacgcagcccggcgggaggataaagaccaccacggtctcctgacaaacacagcccctgaggggccccgggagtggccttggctccctggagagcccacgtctcagccacagttctccactcgcctcggacttcacccgttctctgccgcccgcccactccgtttccctgtggtccgtgaaggacggcctcaggccttggcatcctgagcttcggtctgtccagccgacccgaggaggccggactcagacacataggcggggggcggcacctggcatcagcaatacgcagtctgtgggagcccggccgcgcccagcccccgccgaccgtggcgttggccctgctgtcctcagaggaggaggaggaggaggcagctccggcagccacagaaggctgcagcccagcccgcctgagacacgacgcctgccccaggggactgtcaggcacagaagcggcctcctcccgtgccccagactgtccgaattgcttttattttcttatactttcagtatactccatagaccaaagagcaaaatctatctgaacctggacgcaccctcactgtcagggtccctggggtcgcttgtgcgggcgggagggcaatggtggcagagacatgctggtggccccggcggagcggagagggcggccgtggtggaggcctccaccccaggagcaccccgcgcaccctcggaggacgggcttcggctgcgcggaggccgtggcacacctgcgggaggcagcgacggcccccacgcagacgccgggaacgcaggccgctttattcctctgtacttagatcaacttgaccgtactaaaatccctttctgttttaaccagttaaacatgcctcttctacagctccatttttgatagttggataatccagtatctgccaagagcatgttgggtctcccgtgactgctgcctcatcgataccccatttagctccagaaagcaaagaaaactcgagtaacacttgtttgaaagagatcattaaatgtattttgcaaagcctaaagttatatatttaacagtt

SEQ ID NO: 16467 - DNA, 1137 bp, Homo sapiens
gtgtagtaaatttaagcttatttttcatgtgggattcttcttggatgaccaactctggactaccagaaaaaaaaaattttaagttctgtgacttttctgagatactagaacaaaagaagaattaatcttcatctttctcaagaaatagatgttgacaaagaatcacttagcgattctgacatatcaattcccctatcttgaaatgaggtcactgtatgtaaatgatggaattatatcactccatttccaagggtagattttctataagtaaatatctcggaatttgtgtgcttgttttctgaatatatacagttgttttctttaaagatctcttggaattttgcctgttctgtgtgaaataaagtgttttaatgtgcattataggtatgatatagagaatctcctttccatccttgttactaaagggactggacaaataaatcttaaaaccaaaatactgaattaattttgcaagcatggctagtttttaggaagcatgctatcaaaaaaaaaaagactaaaaatgactgaaaaaatccaactgttttatatatatataaatatatatatatttatatatatatataaaggatattctgtaaagttatatgttgtttgacagtaaagccatcaatatttttgctatcaaaatagtataatactagtatctttttgtatgaaaatgtaatctttatataaataatacctctgatatttgcaactgcataatcgttcagtaattcaaaaagacatactagaatcctttttctgaaagtgttccttcaatttgcttttgttgaaaacggtagtccaggacctatgatatccctccacttcattcattatgaaagaaatcccttgtagataaacaagatattggcatctgcatgtaattatccccagattcagctgaaaactcccaacacagatggaattggctagacattttaatatatgtgatacctatatctagatatagaaggctgagagtgagcactggatataattcattttgattgaaattgatatggtgttattgttcttccagttgtctgtcctttgtgtatgttcttatttatatgttgatacactgtaacactatatgctattgctaaataaaattgattgagaaattca

SEQ ID NO: 16468 - DNA, 471 bp, Homo sapiens
gaggatgggaactgatggtagctaggaaggaaagcgtcaagaaggacctgaatgtacccagcttttctcgccaaacttcaataccacctcaggaaaaggcccactgtgtccaggggcgtcagtccagctcaatagtgtctagcttttcagaatcttctgattgtttggtctttaacaaaaacatagcatctatttgctaacaataaacttaagcaacatatgataatcatttcatctccttccaagaagtggtgaaaatgaaccaggtgacattaatttaacttctgtttttgtttatttttaatacaaccaaaaagatatgcacatattttaatttacattatggtactgtataatttaaaccataaactggtgctgattaatttctgcaacaaagcagcatattaaatgtactacatctagtgttgtagcaaaattaataaacttgttttaagttctgagacactttcc

SEQ ID NO: 16469 - DNA, 418 bp, Homo sapiens
tcaataacaatgtattatatttttgaaaattgcgaagagagtaagtattctcaccacaagaaatgatgagaacctgagatactgcatatatatgcatatgtatctctgtcttcctacatatacatatatatacacatacatatatgtatacacacacacacaaatatatatatatatatatatatatatatatatatatgtatagagagagagagacagaactcaaatcaatagtatgaattaataaattagatacttggagttttattttagaccaagaaagatatctggaacacaatgttctgcctcctgtatttgtaacttaatgtatcacagagagtagttcatttcattatatatagctctaacttattgtgtgttattgatcccaatactcagtttaatgaacacacgagtt

SEQ ID NO: 16470 - DNA, 125 bp, Homo sapiens
caagctccagctctcgctgaaaccctttcctgcctttgcttgcggggcacactgggtgctgtgagatttggagacgtccccgaagactcaggccctccaggagcctccctgaacccacatgtcct

SEQ ID NO: 16471 - DNA, 462 bp, Homo sapiens
ctgctcttacccccaccatagtggcctttggcgatgcctcctaccttcccccaacaactctcttgcgtgttagagagaaggggccctcccagcacaaagttgcattcctccccccaatttattctaatttattaatttagtcccaccccttctgagcctgcagccttctgcagcctggggactgtagagtaagtagctgccccagcccctcccaggcctgacccagcctggggagtgggacaaggtgtgggtgtggccctgttggaggttgatgttgctgtttttatctcttggctttgtgtttgtgttctgtgatactttttgagaaagaagaggccaggcacagtggcttacgcctgtaatcccagcactttgggaggccaaggtgggcggatcacttgagctcaagagtttgagaccagcctgggtaacatggtgaaaccccctctctgccaaaaatac

SEQ ID NO: 16472 - DNA, 513 bp, Homo sapiens
cccatatttggcttttctccatacctggtcattctgcataacatggcctggatgcctcagacttctaggagccatctaagattgtgagctgatgccaatcagctcctagagcttgcactccctccaggattgggatgccagtgaagcaaaaaaatggcccaacctgaaataaggaggtaggataaagagcataaggtcttagacaaatgcagactgttcagcttccagttttaggacatgtggatgtaattttatatcgtgtttctcatgttcgttgacttaaagcaagggttccacatttttttctacaaaaggtcagagaataaatattttagactatgggtacatgtgttttctgtcacacactctttttcattttattatttattatttttatttatttatttttgagacagagtcttgctctgttgcctaggctggagtgcagtggtgcgatctcaactcactgcaacctatgccttctgggttcaagtgattctcatgcctcagctt

SEQ ID NO: 16473 - DNA, 339 bp, Homo sapiens
gaatgcaagaaattacattatagaaagcaagctgtacttcagaaaaacacacatcaacagaggaagagaaaggctccatttcttttgaaaatgatggaagattcttctcagaaatctttttaaaaaatcagtatattcagagatctgatagagactttattttagttctagtttttttggggaaaagtttgccatggttttggaggctccttaaagtattaaatcttgagctcttcttatcaaagtcaagggaacctactgagtaaaactatttttaaaagggagaaatttttatgctttccttttaagaggttaatcaataaacccaagtgaacaaga

SEQ ID NO: 16474 - DNA, 320 bp, Homo sapiens
tataaaatcttggaaatgactttgttatacttgcctttattcactaatagatcatccaggaacttatgaagactttcatgtaaaacgtcaaagttcttttattttattttttttctaagccacctctgttcctgttcaatttttactttattaacaggctcttcttgcaaaatagaccatatcaccttattattttgatcacatatctcaggactctcagaattgttggtattccttcaacgaatatatggtatcttattttatcatgtaagtaacttcaaattttgtctttgatgaagtctcacgtattcatataccaa

SEQ ID NO: 16475 - DNA, 371 bp, Homo sapiens
caggtgccaggtcaatcacagtgtctggttggcccttacacactcttattgttaataataatacctacaataatgtattaagatacacataatacaggccgggcacggtggctcacacctgtaatactagcactttgggaggccgagatgggtggatcacgaagtcaggagagtgaaaccatcctggccaacatgatgaaaccccgtctctactaaaaatacaaaaattagcagggcatagtggcctgtaatttcagctactcaggaggttgagttaggagaatagcttgaactaaggagtcagaagttgcagtgagccgagatcgtgccactgaactccagcctgatgacatagcaagactccatctcaa

SEQ ID NO: 16476 - DNA, 770 bp, Homo sapiens
gcctggctctaaattcaagccaatgaagtcccaccatgaagagaggtctcctgttatagagaagccagccaatatctcttcctttatcccttggggtgcatgctttccatctgaggttgggtttagggtgcgtgaaaacctcctaggaagcttttaaaatgcagaatcctagacttgtggctaagattctaagacagtgagtctgggaccatggccaggaattggagctgtttaataagcatcccaggtaattctgctgcaagcccacccttggagaacactgggcagggtgagagggagctagaagcgcccccatgtggccatggcaggatgctgcaagagacagtctgctctcccaggtcagctggggtgtgcctgccctccttggagagtatgtaactccacccaccagagtgccactcctctctgctcttcctctcctatcaagtcttgcctctctctctctttgcctcagttctctgtccctgcacagcaggagttctgcttgatcctccctttgaggattggccccagtgcctggggaccctctgaatgtcgtctttggtctgttcctctcctttctggctctatctacctttctgagtttggcttctaccagcctgatttacactaccattctcttggggcaaggaatgtccccaccatttttggtttgccattgatgcattgattgtcacacctgttgtcccaggaagttgacctataactctccatggccagagtccctgctgatcagaattcaatttgcc

SEQ ID NO: 16477 - DNA, 493 bp, Homo sapiens
aaaattgctaattatacttttgcttacctcctgccatttaagtttgtaaatttctctatgtgaggctgaaaggttaggtcctggaaaattgtgattggtctgtaagcaccagaaatgtccaaaagtatatatcccctttgttaactgcacctgagcctgacatcctaccattcacatttggaatatataactcaaaacattgtccatatactgtttggtagaaatggtgtatcaagtttggtacagaaatatgtctgtcatgaacagcggcagcaatgaaaaccaggaggaggttaatgagagttctatggaggttttacgccactgtgataactttttataacaagggcctgagattaggggaagagtgagttgccagttcattaaattcttgtccattaaaacccatttctctttctggccgcttgtctacagtcatcccattctcagatgtactcatcccagcacattctttttttttcattgtggcaaa

SEQ ID NO: 16478 - DNA, 238 bp, Homo sapiens
catctaaattttaaagaccaagtgtatttgaaagagaaaaagtatagagagggagggagaagagctgtgtttgaatctatttatcctaacatctcttagatgtgactgtatgtggagatgcagaagtttaggacacaagactgaaggaatactaaccctagccatgacctgaaatatagtatcttttaaaagcctaatgttttcgtagtcttcctatttatttcttcttatcaagatt

SEQ ID NO: 16479 - DNA, 411 bp, Homo sapiens
acatctgtcagagaattgaggtcacagggcaaaccttcaccgcaaaaacaggcaggaaaatggagatcggctcacctaaggcagaagctgttggagacagtaattgagatttaaacatattgctgtgggctaagtgtggactagcttgagggttcaaaaccgggagcttgtctaagggaaccccacactttggtgggttttacctcgaggagacccactaggttctcctgtaaagatggcaggaaaattcccttgtgctttggacacgggaagggggaaagtaatccttttgaaatacatccaggaagaaatcagccccagatcttctgttctccatggcagagaacagttttctcagggaaaactacttgcagaagccttctctagcttaggagaagggcagttggatgg

SEQ ID NO: 16480 - DNA, 600 bp, Homo sapiens
tagggtgtctgaattagttgtccttcctttgttacagtctttcgtttttgctatttgtaagagggacctcagaaaagtatggattctagacagttctccctgcccctagtatgcagcagcatttgtttccccttggtaatacacccgagtcagtaaaccccttatttgcttgttggttcagtgcccagaagggcccaaaacagcaggtgagcctcaatgtacaattcagtgagctgttgtcttgtgttccccggaagcattcctcctgtaaaaaccaagccctccaaaccagtagaactccagttgaggggacaggtgagaggaaccactcctacttctatcccttgattcctggacccgtgaatcctggttataggagagacaacacatgcaaagcagaaccttgggggcagcacccaaaagttgtctcccaagtggtgctgtaacggagtcttcacgaggccgtttcactctaatgtttgtccagctgcttcctcctgctgagatacgtggtatgactgtgattacctggtcacaagcccattgcctcactttctttgctgtgaaatttgtttcttgattaaaagcaatattgaataa

SEQ ID NO: 16481 - DNA, 999 bp, Homo sapiens
cttttttagaggtggggccttgctctgtcaccctggctagagtgctgtgaaacgatcacagtccactgtaaccttgaacaccaactgcaggattcctattctcttttgtgggcaagatagggtgggggacattgtgcacccccttcttctctgtcccagtctgtgacagaccctgtcagacattgagaggcctgagagctgcaacagtggttgtgccagagaggaatttgccaaagctctcagcgacctttctgcattaaagtttcgtgccattatctctttcacatacaaattcaagcccttttttttcccttgaaatcacttttgtgctgtttaacctctttaccccgatttcccccccttctttcttgctccctttctagtagtttccagctaatggatcacctggataagattgcccctgtctttgtgagagcagcaattagctctcaccctgagaaggcggcgtgttctgttgcttggcagccttggtgtagaggatggattgggtctgcgtcttttcatttgaaagtaggttatcgattagcacggatgccaatttactacagaggctgttgccaatgcctcttgatctcattatggtgtaaattttcaagattgtatcacattagctcaggagaattcaggagagaaaaacgtagtaaagttaaaaaaaaaaaagccaaaaaaaaaaaaaaaacaacaaacaaacacacacaaattgtttgcggcgcgcctgcggcgccgaggaagaaaagcatttgaagaaaaccaactatcgtgttgtggcggcggcggcggcccccgagctagtgttataaggtgcgaaacgtgtggctccatctacgtggtttccccatgggcagaccggggcccatcgacaatggtgggggtgtgcttcctccgccaaaatgaaaaagaccccgcggggggaacccccagccgcgttctgtagacaaactccgaagggcggacttgggcgacagtagaggggactct

SEQ ID NO: 16482 - DNA, 2079 bp, Homo sapiens
ctggggatacctttaaaacaaacaaacaaacaaacaaaacaggatctgtctatcacctgtccaaatcctgaagcaaaatgagccttctttatggccaccttggaaaggcctgagtccccagcatcacctgggatacaaagtgttctgaggtgggggcagagtgccctcctgcccagatgccacactccacaatatctcttcctggcagacaggtttctcttaacttcctttggcaaatttggtttcacttccttttgcaactttagaacctttctcaggtcagtcataaggtagtggagaagccaggatttgaacccattctgtctgattccagagctcatgcattaaccacctgactgtggtgcctccccatcatatgtgcatcaagtatgatcatttttgtagttctcagagtacttagcaccatgcacatctgtaataagtacagccactgcctactgggaggtctaaaggttcaactcataagggacccacaggccacactgggctccagtctccttaaaagatgtgggacggagatcaacaattgtcagcagaaccccatcaggcatttgtcttctcactgagccttgcagcaaaccacacagctgtctataacctatctgttcccagattcaagaacacaagctgctcatcagttgggtgcaggatccactctagtacaaaagctgtgtgtctcaaggcataattccttatgattacttcatagctctgcttttgtcttgagacaaaagaaatttccttcaattcctacttttgctgagatattgttttttgaaaagcaattaaatcttgtcaatcacttttcccacctctttgagatacttacatggcttttcttctttattctcttagtgtggtaaattacattgatttattttaaatatgaaaccagccttgaattccaggaacaaactccatttggacatgctagaacaaccttttatatttgtttagatttgatttcctgaagtggtgttaaaaggttttcatatctatgtctgtgagggatattaatctgtacatttttttattactattttctggtgttatggtaatgctagtctcatagaatgaattaggaaaagttgcctccttctgtattttctgagagtttgtgtggcactggtaaaatattttctgtatatgtttgacataattcaccaggaaaattatttgtacctacaagttccctcctggaaagatgttgataatcacttattatcctttcattgtctgccagatctgtggcattgcttttttctctggtattagtaatttaaattttcccttatttcttgatcaattttggcagagatttatcaattttattaatctcttttaaaaatctgtattgagctttgttaattttctctattacatactttttatttctactcttacgattgctatttctttatttctcctttggatttagcccatttttctatttgtctaattttaggatttaaaattcaatcattatttttagatatttttatttttaaatataaacatgaaagttgcaatattaccttgggcactgttttgactgcattccacaagtttttatttgtcatgttttaatcaccattcagttcaaaatactttctaatgctccttgttatttcttctttgacccattggttatataaaagtacgttttgctttatttctaaatatgtgaagactttctagatatctcagttatttattactaatttaattttattgtagccagagaaaatacactgtatgtgttcaatctttggaaatttcttgagacttattttttgacccagtatgtttgccctcatgaacattccatattcactagaaaaagaatgtgtgttcaaataatgttggatatagtgttatgcaaatgccactaaatcaagataaatcttttgcactcttgttttttgcctgcttgttctaacaataagtgagaaagaagtgttaatatctccaattgtgattgtaatttgactgttatcctttggtttggtcagtttttgcctgttgaaattctgctattaaaacataaacatttaagat

SEQ ID NO: 16483 - DNA, 2050 bp, Homo sapiens
ctggggatacctttaaaacaaacaaacaaacaaacaaaacaggatctgtctatcacctgtccaaatcctgaagcaaaatgagccttctttatggccaccttggaaaggcctgagtccccagcatcacctgggatacaaagtgttctgaggtgggggcagagtgccctcctgcccagatgccacactccacaatatctcttcctggcagacaggtttctcttaacttcctttggcaaatttggtttcacttccttttgcaactttagaacctttctcaggtcagtcataaggtagtggagaagccaggatttgaacccattctgtctgattccagagctcatgcattaaccacctgactgtggtgcctccccatcatatgtgcatcaagtatgatcatttttgtagttctcagagtacttagcaccatgcacatctgtaataagtacagccactgcctactgggaggtctaaaggttcaactcataagggacccacaggccacactgggctccagtctccttaaaagatgtgggacggagatcaacaattgtcagcagaaccccatcaggcatttgtcttctcactgagccttgcagcaaaccacacagctgtctataacctatctgttcccagattcaagaacacaagctgctcatcagttgggtgcaggatccactctagtacaaaagctgtgtgtctcaaggcataattccttatgattacttcatagctctgcttttgtcttgagacaaaagaaatttccttcaattcctacttttgctgagatattgttttttgaaaagcaattaaatcttgtcaatcacttttcccacctctttgagatacttacatggcttttcttctttattctcttagtgtggtaaattacattgatttattttaaatatgaaaccagccttgaattccaggaacaaactccatttggacatgctagaacaaccttttatatttgtttagatttgatttcctgaagtggtgttaaaaggttttcatatctatgtctgtgagggatattaatctgtacatttttttattactattttctggtgttatggtaatgctagtctcatagaatgaattaggaaaagttgcctccttctgtattttctgagagtttgtgtggcactggtaaaatattttctgtatatgtttgacataattcaccaggaaaattatttgtacctacaagttccctcctggaaagatgttgataatcacttattatcctttcattgtctgccagatctgtggcattgcttttttctctggtattagtaatttaaattttcccttatttcttgatcaattttggcagagatttatcaattttattaatctcttttaaaaatctgtattgagctttgttaattttctctattacatactttttatttctactcttacgattgctatttctttatttctcctttggatttagcccatttttctatttgtctaattttaggatttaaaattcaatcattatttttagatatttttatttttaaatataaacatgaaagttgcaatattaccttgggcactgttttgactgcattccacaagtttttatttgtcatgttttaatcaccattcagttcaaaatactttctaatgctccttgttatttcttctttgacccattggttatataaaagtacgttttgctttatttctaaatatgtgaagactttctagatatctcagttatttattactaatttaattttattgtagccagagaaaatacactgtatgtgttcaatctttggaaatttcttgagacttaaacattccatattcactagaaaaagaatgtgtgttcaaataatgttggatatagtgttatgcaaatgccactaaatcaagataaatcttttgcactcttgttttttgcctgcttgttctaacaataagtgagaaagaagtgttaatatctccaattgtgattgtaatttgactgttatcctttggtttggtcagtttttgcctgttgaaattctgctattaaaacataaacatttaagat

SEQ ID NO: 16484 - DNA, 986 bp, Homo sapiens
gccaagaattcggcacgagcggcacgagctttattattatagtcatttgaaattgaaagagtaacatttatctttttgtagcattcttggtccctgctgttctgattaatattttatcagtgataaaaaataccaaaatatagtgtgtttgctcatcagatttgcaaattacaaaaactaggaggatatttcagtaatggtggaggctaagcttctgtaacaaaccgctgacacagtggctcaaagagcgcagatgttcatttcacttttgtaaccaccctgtggggtaggcaggctctgtaccggtaagtcgtcaagggcctggtctggtggagcacctctgctttcctcaacatgtgccttccaaggaggctccatggcttctgcttccagctggtgtggaagaaagaaggggcatgcaggaggagggattgcctttccccaggtgccttcaaggttgcagatgtcactcctgctcccaaaccattggcaagaacttggtcacgtggccacacctaatcacagggaggctgggagatgtaatcttacctgggcagttgtgtccctggagataagggaacagtgggttttcggggagctgctagcagtcttctcagaagaacaatagctctaacacattagctgcctcagcaagctggagttttgggctttatagtcaaaatatgaaacatagaaggaggccaggcatgatggctctcacctgtaatctcggcattttgggaggccaaggcaggcagatcgtttgagtcctggagaccatcctgggcaacatagcaaaaccttgtgtttacataaaatacaaaaaattagccaggcgtggtggcatgtgcctgtagtctcagctacctaggaggctgaggtgggaggatcacctgagcctggagggccgaggctgcagtgagccatgatcctgtcactgcactccattcagcctgggctacagagtgagactctgtctcaaaaaa

SEQ ID NO: 16485 - DNA, 1092 bp, Homo sapiens
ttgaatcctagcttttagaatattaataggagactcaaagttaatattcttaacaacttaaaattaaaaaaagtcataatctatcaaaagtttatttattggatggcattaaaacatttttgaggcagttgtctaatatgaacaataatctaaacaatatattccttaaattaagaggaaagacaagtgtcgtatttcgatcctgtttattcaaatgtgtgattttgctgaaatgaaagggataaaatgaatacttagagaataatacttcatttttgcagtactttttaattttgataaaaaagatacaaagttcataatatcaaaatatgtgttcaaaattggtattttaattttaatatttttgtaagttgatttaaattttgctcttttttcaggtgtgcttggtttattatatttagtcaagttaatttagtcgaatgtggtaacatttttctgatttatctttagttggagcacacccttgaactgaacagtggccaaaggaaagctttctgggctttggaaagtagttgtttaactttgttttaagccgttttcttagtgattctgtatcaagtagaggataagtgtagtttaacttagtttttaatataacccataatcaagaacatgagcgaaaagcagacataaatcgatatggatggtttgtggtgtgtgtgggatgtgggggaattaagaaaatgccatttacctaagcacagtttgcctgaatttctgcttggttgtgttgtttaccgtaagtactgagggtagtttccctaagtctgtcctgagaaaaagcatacttagtactcctgtatttgttcttatgaaatgactatctgccttcttgtatctagtaagattggctggctcaattttcttctgtcaaattatatggttattttttatattaccacatcagcattatattaaaagtgtttttaatagttgattgtattttgccaactactagtatagactcaaatttgctatttaatttttaaaatacaatttattttgtaaatcctttaaaaaatatttggttagttttggattagaaatgatttatgttagccatgtgttgaa

SEQ ID NO: 16486 - DNA, 2512 bp, Homo sapiens
tcccctcgggggtggggtagtgctcagctcccaccgtggtcctcgcaggcaccacatacttattcggaggaggcgcccccggggtcgcgagatggaagcgcgcgtccgggaggccgtgtaacgggagctgcgggactcagcgggccagagagcgcggcgggccacccccggctcagcccgtggatgctgaccgccccctcggagagtccccgcagacatggcggagagctggctgcgcctctcgggagccgggccggcggaggaggccgggccggagggcggcctggaggagcccgacgccctggatgacagcctgaccagcctgcagtggctgcaggaattctccattctcaacgccaaggcccccgccctgcccccggggggcaccgacccccacggctaccaccaggtgccaggttcagcggcgcccgggtcccccctggcggccgaccccgcctgcctggggcagccacacacgccgggcaagcccacgtcgtcgtgcacgtcgcggagcgcgcccccggggctgcaggccccaccccccgacgacgtggactacgccaccaatccgcacgtgaagcctccctactcgtatgccacgctcatctgcatggccatgcaggccagcaaggccaccaagatcaccctgtcggccatctacaagtggatcacggacaacttctgctacttccgccacgcagatcccacctggcagaattcaatccgccacaacctgtctctgaacaagtgcttcatcaaagtgcctcgggagaaggacgaaccaggcaaggggggcttctggcgcattgacccccagtacgcggagcggctactgagcggcgctttcaagaagcggcgactgccccctgtccacatccacccagcctttgcccgccaggccgcgcaggagcccagcgctgtcccccgggccgggccgctgacggtgaataccgaggcccagcagctgctgcgggagttcgaggaggccaccggggaggcgggctggggtgcaggcgagggcaggctggggcataagcgcaaacagccgctgcccaagcgggtggccaaggtcccgcggccccccagcaccctgctgcccaccccggaggagcagggtgagctggaacccctcaaaggcaactttgactgggaggccatcttcgacgccggcactctgggcggggagctgggtgcactggaggccctggagctgagcccgcctctgagccccgcctcacacgtggacgtggacctcaccatccacggccgccacatcgactgccctgccacctgggggccttcggtggagcaggctgccgacagcctggacttcgatgagaccttcctggccacatccttcctgcagcacccctgggacgagagcggcagtggctgcctgcccccggagcccctctttgaggctggggatgccaccctggcctccgacctgcaggactgggccagcgtgggggccttcttgtaagaggccaggccctgccccacctctggacagtgcccaagtcagggtccagaactgccccccaacacaggtccacagacaccccaccacctaggcaggggctgggccagggctccaaggcttgccccagaggccacatggccaccagccccagctgccatcagattcaagcccaggaggctgaaaacgagggcccaggaccagaatcgctgcctcctctccccagccccaccttgtacacacagtgtttcattgctccgcgtcttcccagccccagaaaccggctaaaggaccctgcaccatgagagccgaggcctggaggagcccgggtcaggctggggaggaacagaactgggccctcccagagcacctccgcttcccccctgcttccccaggtctctatccagagagagtccccaggtacaacaaatgctaattagatgacagcaaattaaccccctggaggcttctcctggcagagcctccctggggccggggcaggctgtggatggggcggagcagggcagaagatggactgggggagggggcagagagaggagaccaaaatgaggtggtggcacagggtggggcaaggagatcctctctaaggcctctggggtctttgcctggccccatccctagggggcggggaggggacgtaaatccctaatctttaagcccgacttgaggctgagagcagctggaagtttgggtttggtggtttgggggccggggcagccaagctgtatggggcaggacagacagactaatgtagtgagtgtagctgtagctgaggcttaactgggagggatgccgagcttgctggaactactgggaccaagaagcggggtaccccacgcccctgcctgcactcctcgggggcgtggggcgtgccttgctccacccggactccctgggctgcgtcccacatccaccctcctgccccgtggggcaatttaacctttttcatgaaagttatttacaatgaaaagtttttaaaaataaaatttttaaaaatctaaaaaaaaaact

SEQ ID NO: 16487 - DNA, 2641 bp, Homo sapiens
ctttggagcggctacttaatgccggtcccggggccgcggtagctcagagaagcgccgtcgggcgggggggcggcaagaggcgctggcagggcccccgagctgggggcagagagccgcagggggtgggagcaacttcttccagaaccttcctctggcccgggctgcgctctgagccaggcaccacatacttattcggaggaggcgcccccggggtcgcgagatggaagcgcgcgtccgggaggccgtgtaacgggagctgcgggactcagcgggccagagagcgcggcgggccacccccggctcagcccgtggatgctgaccgccccctcggagagtccccgcagacatggcggagagctggctgcgcctctcgggagccgggccggcggaggaggccgggccggagggcggcctggaggagcccgacgccctggatgacagcctgaccagcctgcagtggctgcaggaattctccattctcaacgccaaggcccccgccctgcccccggggggcaccgacccccacggctaccaccaggtgccaggttcagcggcgcccgggtcccccctggcggccgaccccgcctgcctggggcagccacacacgccgggcaagcccacgtcgtcgtgcacgtcgcggagcgcgcccccggggctgcaggccccaccccccgacgacgtggactacgccaccaatccgcacgtgaagcctccctactcgtatgccacgctcatctgcatggccatgcaggccagcaaggccaccaagatcaccctgtcggccatctacaagtggatcacggacaacttctgctacttccgccacgcagatcccacctggcagaattcaatccgccacaacctgtctctgaacaagtgcttcatcaaagtgcctcgggagaaggacgaaccaggcaaggggggcttctggcgcattgacccccagtacgcggagcggctactgagcggcgctttcaagaagcggcgactgccccctgtccacatccacccagcctttgcccgccaggccgcgcaggagcccagcgctgtcccccgggccgggccgctgacggtgaataccgaggcccagcagctgctgcgggagttcgaggaggccaccggggaggcgggctggggtgcaggcgagggcaggctggggcataagcgcaaacagccgctgcccaagcgggtggccaaggtcccgcggccccccagcaccctgctgcccaccccggaggagcagggtgagctggaacccctcaaaggcaactttgactgggaggccatcttcgacgccggcactctgggcggggagctgggtgcactggaggccctggagctgagcccgcctctgagccccgcctcacacgtggacgtggacctcaccatccacggccgccacatcgactgccctgccacctgggggccttcggtggagcaggctgccgacagcctggacttcgatgagaccttcctggccacatccttcctgcagcacccctgggacgagagcggcagtggctgcctgcccccggagcccctctttgaggctggggatgccaccctggcctccgacctgcaggactgggccagcgtgggggccttcttgtaagaggccaggccctgccccacctctggacagtgcccaagtcagggtccagaactgccccccaacacaggtccacagacaccccaccacctaggcaggggctgggccagggctccaaggcttgccccagaggccacatggccaccagccccagctgccatcagattcaagcccaggaggctgaaaacgagggcccaggaccagaatcgctgcctcctctccccagccccaccttgtacacacagtgtttcattgctccgcgtcttcccagccccagaaaccggctaaaggaccctgcaccatgagagccgaggcctggaggagcccgggtcaggctggggaggaacagaactgggccctcccagagcacctccgcttcccccctgcttccccaggtctctatccagagagagtccccaggtacaacaaatgctaattagatgacagcaaattaaccccctggaggcttctcctggcagagcctccctggggccggggcaggctgtggatggggcggagcagggcagaagatggactgggggagggggcagagagaggagaccaaaatgaggtggtggcacagggtggggcaaggagatcctctctaaggcctctggggtctttgcctggccccatccctagggggcggggaggggacgtaaatccctaatctttaagcccgacttgaggctgagagcagctggaagtttgggtttggtggtttgggggccggggcagccaagctgtatggggcaggacagacagactaatgtagtgagtgtagctgtagctgaggcttaactgggagggatgccgagcttgctggaactactgggaccaagaagcggggtaccccacgcccctgcctgcactcctcgggggcgtggggcgtgccttgctccacccggactccctgggctgcgtcccacatccaccctcctgccccgtggggcaatttaacctttttcatgaaagttatttacaatgaaaagtttttaaaaataaaatttttaaaaatctaaaaaaaaaact

SEQ ID NO: 16488 - DNA, 1788 bp, Homo sapiens
ctttggagcggctacttaatgccggtcccggggccgcggtagctcagagaagcgccgtcgggcgggggggcggcaagaggcgctggcagggcccccgagctgggggcagagagccgcagggggtgggagcaacttcttccagaaccttcctctggcccgggctgcgctctgagccaggcaccacatacttattcggaggaggcgcccccggggtcgcgagatggaagcgcgcgtccgggaggccgtgtaacgggagctgcgggactcagcgggccagagagcgcggcgggccacccccggctcagcccgtggatgctgaccgccccctcggagagtccccgcagacatggcggagagctggctgcgcctctcgggagccgggccggcggaggaggccgggccggagggcggcctggaggagcccgacgccctggatgacagcctgaccagcctgcagtggctgcaggaattctccattctcaacgccaaggcccccgccctgcccccggggggcaccgacccccacggctaccaccaggtgccaggttcagcggcgcccgggtcccccctggcggccgaccccgcctgcctggggcagccacacacgccgggcaagcccacgtcgtcgtgcacgtcgcggagcgcgcccccggggctgcaggccccaccccccgacgacgtggactacgccaccaatccgcacgtgaagcctccctactcgtatgccacgctcatctgcatggccatgcaggccagcaaggccaccaagatcaccctgtcggccatctacaagtggatcacggacaacttctgctacttccgccacgcagatcccacctggcagaattcaatccgccacaacctgtctctgaacaagtgcttcatcaaagtgcctcgggagaaggacgaaccaggcaaggggggcttctggcgcattgacccccagtacgcggagcggctactgagcggcgctttcaagaagcggcgactgccccctgtccacatccacccagcctttgcccgccaggccgcgcaggagcccagcgctgtcccccgggccgggccgctgacggtgaataccgaggcccagcagctgctgcgggagttcgaggaggccaccggggaggcgggctggggtgcaggcgagggcaggctggggcataagcgcaaacagccgctgcccaagcgggtggccaaggtcccgcggccccccagcaccctgctgcccaccccggaggagcagggtgagctggaacccctcaaaggcaactttgactgggaggccatcttcgacgccggcactctgggcggggagctgggtgcactggaggccctggagctgagcccgcctctgagccccgcctcacacgtggacgtggacctcaccatccacggccgccacatcgactgccctgccacctgggggccttcggtggagcaggctgccgacagcctggacttcgatgagaccttcctggccacatccttcctgcagcacccctgggacgagagcggcagtggctgcctgcccccggagcccctctttgaggctggggatgccaccctggcctccgacctgcaggactgggccagcgtgggggccttcttgtaagaggccaggccctgccccacctctggacagtgcccaagtcagggtccagaactgccccccaacacaggtccacatccaccctcctgccccgtggggcaatttaacctttttcatgaaagttatttacaatgaaaagtttttaaaaataaaatttttaaaaatctaaaaaaaaaact

SEQ ID NO: 16489 - DNA, 1237 bp, Homo sapiens
ctttggagcggctacttaatgccggtcccggggccgcggtagctcagagaagcgccgtcgggcgggggggcggcaagaggcgctggcagggcccccgagctgggggcagagagccgcagggggtgggagcaacttcttccagaaccttcctctggcccgggctgcgctctgagccaggcaccacatacttattcggaggaggcgcccccggggtcgcgagatggaagcgcgcgtccgggaggccgtgtaacgggagctgcgggactcagcgggccagagagcgcggcgggccacccccggctcagcccgtggatgctgaccgccccctcggagagtccccgcagacatggcggagagctggctgcgcctctcgggagccgggccggcggaggaggccgggccggagggcggcctggaggagcccgacgccctggatgacagcctgaccagcctgcagtggctgcaggaattctccattctcaacgccaaggcccccgccctgcccccggggggcaccgacccccacggctaccaccaggtgccaggttcagcggcgcccgggtcccccctggcggccgaccccgcctgcctggggcagccacacacgccgggcaagcccacgtcgtcgtgcacgtcgcggagcgcgcccccggggctgcaggccccaccccccgacgacgtggactacgccaccaatccgcacgtgaagcctccctactcgtatgccacgctcatctgcatggccatgcaggccagcaaggccaccaagatcaccctgtcggccatctacaagtggatcacggacaacttctgctacttccgccacgcagatcccacctggcaggtagaggaggcacgggcggcggccgctccctccccattccctcctcgctccccacgctgcactggattcatatcccaaatctgcaggccaagtaggctctgcggtgcggccagcgccccagaagggagccctgcaaaggagcccagttcttgcaactgcccctcctttgacttccagagagagagagagagagaagggagaatgtccagaggtggagggctttaggggtgcagaggctgagattcaaggggaaataacctgccattcatccagcaggcccaggccaaagaccagggctagactctgcgtggacagaatctccttggggagagcgatgaactgaaggcgcattcttgtcccaagtcctagaattcctagacactgccctgcccc

SEQ ID NO: 16490 - DNA, 229 bp, Homo sapiens
ttataattttctgaaaaaattaagtccaaaactagctggggtcagtagggctctgacatgttgcatctaaagaaaactgtgaataaaagtagagtaaaatatgtgctttatttgtcatccccagtgctttaaatgtttcgatcattttatcacatttcaactcatgatgtttatgaagatgaatgcaattaaactttgtttctatagttgcttttttggttgttattta

SEQ ID NO: 16491 - DNA, 157 bp, Homo sapiens
taaataatgacactcccttataacacatttttatgcagatgctccaaacatatttctaaagaatatttaactgacatgggaaaatggttaaatattacagtcaggtaagaaaaggacaacaggctaataaaagaacactagtaatgattccaatttt

SEQ ID NO: 16492 - DNA, 909 bp, Homo sapiens
gacacaactcaacacctacccctattataatattttatagcatcacttttcaatcttcaaatgaaaatcatggatgatgaagcttaccttcactcataaaaacatcactccatttactattctgaaatgaaactagcaggtaatataactagcctctaaaacatacccatcagtgacgttctaactgaaacagataagatattttataatgaaataattattttcatatgtacatattctagcatggttatattacaagatgtaattaaactactaagcagggcacatactttgtatgtgtgtgtataaatataaatatgtgaaaaatcaccatgaatgtggtagttaccaattcagacctgctgcattggcagttcaataccaggaaaggggtcgatgtcagcagtatgattttctaaaatgtggccaattctttagataaagttctaggcatacctagtctgtaatggcttcactcatatagtgcttgctgtgtgcctggcattgttctaatacctttctaataaatctatgaggtgagtactgctgttagtcccgttttgcatatgagggagttacccaggttatgtgctagtcatcctggttatgtgctaataatggcagagctgggattaaaatgaaagcagcctggctctggctttcttgctcataatcactcagtatataggcttccttccatttatagaattctctcattgcattcttgaaaaatccaaagcatattaaaactgggctgaaaattctgtgtgtttatatataaaatgaaatgagatcatagatttgttattgtaaactgagttcccatctatatgaatattgggcggggcaattgaaagttgtgttgatgagtcagctctttgttgtgagggctgtaagctgcagggcttg

SEQ ID NO: 16493 - DNA, 355 bp, Homo sapiens
gcctctctgttgcccaggatagagtgcagtggcatgatcataggctactatatagccttaggctcaagtgatccactcacctcagccttctgagtagctaggactatataggcatgcactaccatgcctggctaattcttaagtttttttgtagagatggggtctcttgccccagctggtcttgaacttctggtctcaagcaatcgatacttctgccttggcctcccaaagcactgggattacaggcgtgagcctccatgctgggcctaaagcatagctttaattttaagatatcgaataacaaattgtgaaatatttcagacttcaagaatgaaataatttgaatctggtgaac

SEQ ID NO: 16494 - DNA, 385 bp, Homo sapiens
tagtcagcatgttgtacacctggaatttattagcatctgtcatggatgacagaagtttaatttagttattttccaaataaataaccattttctccagcatcgtttattatattgctatccttttcttcctaaactggaatgtcatttatatcacattttccattacagattgagtatcccttatccaaaatgctcaggaccagaagtgtttcagctttcagattttttcatattttaaaatattctcattatatttaccagttcagcatccctaattcaaaaatttgaaatccagaatgcttcatgagcattttctttaagcagcctgtctgtgcttaaaaggtttcggattttggagcattttggattttggattttcagatta

SEQ ID NO: 16495 - DNA, 449 bp, Homo sapiens
cccagagacagagctggagcttggctcagcttggcaaacagagccctgatgttattagtttggcttctgggttgctgatgattgtactggaagggaaaagaggagaaacaggtcatgagccaaatgaggagtcccacagatgccacttcacaggcaccctatgtcataggaaggatattcaaatgtccagcacctaacgggtacaaaaagtagttagaaaaaatgaataagacctgctttgtgttagcacaacagggcgactatagtctaataatcgtgcattttaaaataactaaaagtataatcaattgtttgtgacacaaagaataaatacttaaggggatggataccccattctccatgacatgattattacgcattgcatgcctgtatcaaaacatctcagataccccataaatacgtacacttgctatgtacccacagaaatt

SEQ ID NO: 16496 - DNA, 336 bp, Homo sapiens
atcgcttgaacccgggtgtttaaggctgcagtgaactgagatcaggccacagcacctcaacctgggagacaaagtgagaccctgtctcaaaaaaaaaaaaaagcagagtttatgtaatccatcgtgtgcatatttatacaataatttacaattctatgtattttaaaagtgtataattcatatattatgtgacacaatatataatggaatataaaatatatattttatgtcatgtgtaacataacatcatctattatatgtagtgtatgtgcttatgtacatatcattggaatgaaagtttcattaaataattacccttaatatttgcagcccggt

SEQ ID NO: 16497 - DNA, 1384 bp, Homo sapiens
cattttattccctgaaaccctggggttgcttgccctgctacttttcgatagtacctttcctggccttcagtggtttgctcacataggttcgtcagtacatgttgaagtcttgaagaccctgtatagatctctggagatccagggatctccagatctctagatgcaaatctgcatagatgcaaatattttcttcctggatttccggctcttacatcctcagtctagggtgacaactaggttgtgctgagctgtggcctaggaattcttttccagacagctcacacaatcctaggggtcacctcattggtttccacttacccaggcatcactgccctgccctgcctgatactcagtgtctgaaaagtattgttaatatatatttctagttaaggttatttcacgtgggagatgaacctgatccttataattccagaagtggaattctaaaacagagcagctttttgcatacgttcaagtacagagaaaaaaataaaacagaaatttgtattaaaaaataaaaaagtaaattaatattagaaaccagagcatttttaaaaggaagttgagaaatttttttttagtgtttgaatggcatttattctttatatttacttttgaaataagggtaataaatgaaaattggctaaacttctaattgcactaagtaaattattacctaatattctttgtgtgcttttcttacctgattatgctatgaattaattttgtgaatttcttattatttaaatgtttcactctgacctgtgtcagtatgtttgccatttttagttgcttggttgtttttgttagaaagtaaaatgtattgttgcaccatgcatttgttatgtgtataaaattttttacttcacaaaactgtctataggcaattagcaattagtattaagaagttgtataaattgaaatcactttcatatactaaaaactgtaaaatgagagttattacaaaagatgttgtttattgttttattgtctcaacctttttaacataaaagaccgggtcataattgtgctaaattagggaagtaaaaagagaattgagctagatgcagtggctcatgcctggaatcctagcactttagtaggctgaggcaggcagatggcttgagcccaggattttgacaacagtctgcacaacatggcgaaacctcgtctctcctaaaaatacagaaattcatggcatgtgcctgtggtctcagttacttgtgaggctgaggtgagatgatcacttgagcctgggatgttgaggctgcagtgaaccgcgattacaccactgcactccagcctgggcaacacagcgagaccttatttttatattgtacatttgctcattttgtgctttttcttcttctccttatagttctgg

SEQ ID NO: 16498 - DNA, 328 bp, Homo sapiens
  misc_feature (296)..(296): n is a, c, g, or t
cacaagattctcaacttattcccaaaatagaattcttgattcttccctcttaaaatctgctccttcactatcccccatttattagctactgaagtcactactagtgagaggcaaaatttaagagctataaactaggatatttagcagaaaaaaatctctaagcaaagtgttcaggatactgcatggcttctcttggctgcttatagtaaaatccaaggagagacaatgaggtgaagatgaaatttataatcaaaaaagacatagaatgtaaagatttggaaaattctcaaccaggnccaggtaaagaataaaaaagcatgcttaggag

SEQ ID NO: 16499 - DNA, 447 bp, Homo sapiens
gtgaacttcattagtatcccttgccctcttctggaaaggcagaagaggaagccagatgtgtttgtgaagtaatgatggctcacacagcaaggatgggaggaaaagcatgcctgagagccaggaagactcagatgggacagaggctgtgccccagacacaggtgctgtcacccagccactcatgctgctcaatgcattccactaaatactcactaagaggatgattaatccaggacaggcacagaggccatcctccagaaaggggctccaagaccgagggaactgttctagagggaagcacgggaaggacatgatatggtgctcagatgtgcatcacgccccacaagcaattcccagctagactgtgccaactccacgcctttgcccttgcttaagagagtatagaagaattcaagtaagagtgatgttattatagagatagccttgc

SEQ ID NO: 16500 - DNA, 375 bp, Homo sapiens
ggggtttcaatatgttggccaggctggtcttgaactcctgacctcaggtgatctgcctgcttcagcctcccaaagtgctgggattacagacttgagccaccatgcccagcctgaatcattgtcttaaacttagtggtcacttctatgcttccttggccactcagttactggctttgctcccactgcccatgtgggatgtgggtttgattctgggcagccacttgtaggggagtggaggatgggtggagttggcctgctagaatcttctgtgactgagccggcagtgaccatcattctccactcctgtgatgagtgttcccttgatgagagtacttaggcagggatggggagagctgcgaacacaggtggaggtcc

SEQ ID NO: 16501 - DNA, 360 bp, Homo sapiens
ttatatatggggatcttttgctttgtgctcctggcatcaaattcagctataaagttgactcaaaccttccaaggatgggtattgttgtaaggtcctggtcagagcctggcagtacgtcagcctaccctgagtgcagagcttcaactacccgcctgctacaacagtgttttcatatttccatacctgagatatagtaaaaagtggttttaatacagaaacctggccaggcatggtggctcacacctgtaatcccagtactttgggaggctaaggagggaggattgcttgagcccaggagtttgagaccagcctggacaacatggtgagatccccattgctatatctcttaacatttattta

SEQ ID NO: 16502 - DNA, 428 bp, Homo sapiens
gcaagttatggaacttccctgtacactagattctttatctgaaaagtagaggtaataatagtgtatattttcccaggtgttatgagggctgtgtgaggtcatgtgtatgagggactcacacagtgcctgccacactgtaaggaataaaggtaagctgctgttggtatttttgttatttttattattgttgttattctgttgctgatattgctcttctgatctcttagatggctaataatttgtttgtaggtgtttatgtctggaacagaatacagagctctgtggatagcagtctgtttcaatatagtgatgtttgttaatttctataactgtgtcagctcatttgtacttggaaaactataagcagtatatttattccttaaattcagctatgtcatatttgaagtcaaaattgtgtatgttgtggg

SEQ ID NO: 16503 - DNA, 3585 bp, Homo sapiens
  misc_feature (4)..(5): n is a, c, g, or t
  misc_feature (2031)..(2031): n is a, c, g, or t
  misc_feature (2221)..(2221): n is a, c, g, or t
agcnnggtgaagggcggcgcgcttaggcaggcggtggcgcggctggagtgccgcggggagggctgtgccggttgctttctgcagccgcatctcggccagctctcctcgccgtccccggggcgctgtgcgtctccagtccgggaccgaagccgcctgccgtagcgggcggccagatccgcgtcccgcctcagcggccggaggacatgcgggagagagaatgagccagagggacacgctggtgcatctgtttgccggaggatgtggtggtacagtgggagctattctgacatgtccactggaagttgtaaaaacacgactgcagtcatcttctgtgacgctttatatttctgaagttcagctgaacaccatggctggagccagtgtcaaccgagtagtgtctcccggacctcttcattgcctaaaggtgatcttggaaaaagaagggcctcgttccttgtttagaggactaggccccaatttagtgggggtagccccttccagagcaatatactttgctgcttattcaaactgcaaggaaaagttgaatgatgtatttgatcctgattctacccaagtacatatgatttcagctgcaatggcaggtatgaatgtataatattaaaaaaaaaaaaaactttctgaaacctagaggcttaatattgaattataagtttgtagtgaaaagttgatgattaatgtgcttttcattgattagatgatttttacgtttatcgatataaaccaaattaggtatatgtaaaatctgtcatcagttgacatttttgtagtcaggagtttacatgctagggtacaagtaatatatttatattgccttgtgtagtccactgaatgtttagtgatcattgttaacagttttaagaatccaaccataattacactataaataagttatggagctgtaatttactcttctctcctcaatttctgttagtgccttttccctttttgctgcatgttttggcttctgtctgaaatgtgtcggcaattcttggtaaagtattcattttgtcctgtgctcaaatgctgaaatttttgtgagtgatgtattattattgacaattcagttactatgtgtattttttaaaattgtttattattctacataattcacactagacagcacctgaaatttagacactggctatgtgtacatgcttactatagaaatgtttccaggaactctctgtttctgtcatcactgataagtatatatgattctgaattaaaataactagttttaggtctttaccctgccataaagataaacagttggtttgaccaatctggttctggaatcatttgctgctatgcatgttagacaaagccacgaactttgattttccattgaaaattctccctaatatctgagatttattgtatatttactcatatctcacattttcaaattatgctgtaactttataaactgtagctgctttcatcagctattgatcaataaattgaatgtcaattatgtgcttaataatgagtgccttaaactgttaaacacttttggtttagaaataaagtgaatcaatttgacctatatacttcatgaagtaagtaagtttgaaatacaaatttctgaaaggtcaatagcccttatcgtattacaaattgtttttaaggctttttgtatttattaattgtcagttgattcactgaagctttaaaactggaagggacaatccaaaggtcaaaagagtgaaatacaatcatttaccaataaggaaaccttgggcaaattatgtaatttatgtgaacctctcttagcttacccatggaatgagtcaagtggtctacatagatttggattttgagaattagttctttcatttagtgttatagagattatcttgttacaactagaattatttttaatgtaatttttacagatgttgaatattagtagataggatttttcccctacgaatttggatgtaaggtaaaggttggtggccagtgacaaaccttataaccactttatcaggttctttaaaaatatatttntgaattaccagtgattatgtttttggcttataacctcagataattataaagaaatgttaatcttatttgaaagaattggaatctagaaagttagatgagcagtcattttatattgatatttgttatatcagtatagcaaatgcagaggttcagaatatctttatttccactggaacatcttatttcattngagtatctcatcagaatttattactgtatttgtatcacattgcaaagaatttcagtagaattgtcagtttgcacttttttctcaaatgtgtacaaatgttaacatatagttcatttttatctgtacattgatgccatttcccaacttgaattcctcaagttttggtaaacttacaatctcatacttgttcagaggttattgcactgtacacttactgtgtagaaaatactgtttgaatttgtttgcagttacattgttctgagaactgtgctctcagagcttctgtgcactattcatgagcattaacacttagccttgcagttttatacataactatatggttagtaaaactgaatggtccaatgcagactcattaaagtaggcttttgccccctttgttcttgaaataatctagaccagattactcggggttttttttaggattatttttataggtctaaatatgaatgatttgggggtatgaagtacttaaagatagttctgtgaaaaatcattttcagctgtctattcaagggaaaaaatgctaaccttgtcactttactacacaaaaccacactaaaataaaccattaatgatactgcctgcaagattttaacacaccagatagcacacacattaaggatttataaggcactgtacgtaatttttattccaagtgacctctcaattcattttcattttgcattttatccatatgaactcatgtttaatttagataataaaaatttattttattaaaaggacagtttatttaaagtgggtctttttatttgttgtagtgcatactataagaatttgtaagcctctaaagttgagctataaattttcatgcattaaaaatttgtttcagttgtgaggatatttaatcagattaaataatgttgactcttaatattttgcctgccttttttttctcctacacatgacctttgacagactaagtatatctcagctattgagggtatctgttttgttgcctgtatattttgtttaaattaacttgtatattcctttgtatacacctaggcacagatgtatgcaaaaaaaatttgttaaattacttctttctttatactaattctcaatttttaaaagattttatctggcatgtatatacttttatatagaacattataaatgtaaaggaaatgaattctaattttaattggattatgtattcatacagttattctcaatttttaaaatactaataatgtaatcattgaatgtttcctacatacgtagtgggttttatttgctcacagcatacagttatttttcaatttatgtttttctattagacttaaatttcattataataaaggcttttactcattaaatac

SEQ ID NO: 16504 - DNA, 720 bp, Homo sapiens
  misc_feature (4)..(5): n is a, c, g, or t
agcnnggtgaagggcggcgcgcttaggcaggcggtggcgcggctggagtgccgcggggagggctgtgccggttgctttctgcagccgcatctcggccagctctcctcgccgtccccggggcgctgtgcgtctccagtccgggaccgaagccgcctgccgtagcgggcggccagatccgcgtcccgcctcagcggccggaggacatgcgggagagagaatgagccagagggacacgctggtgcatctgtttgccggaggatgtggtggtacagtgggagctattctgacatgtccactggaagttgtaaaaacacgactgcagtcatcttctgtgacgctttatatttctgaagttcagctgaacaccatggctggagccagtgtcaaccgagtagtgtctcccggacctcttcattgcctaaaggtgatcttggaaaaagaagggcctcgttccttgtttagaggactaggccccaatttagtgggggtagccccttccagagcaatatactttgctgcttattcaaactgcaaggctgcaatggcaagcatttactggacattttttccgagaaagagtgagatcgtgtcatctcatgctccccattcgcaggttactttctgtagaaatatggctaactaaacttcgcttactggaatacagaaccaacccatttggctataaagatcggtacagctgatgcaggaccgggggaaagc

SEQ ID NO: 16505 - DNA, 1101 bp, Homo sapiens
  misc_feature (4)..(5): n is a, c, g, or t
agcnnggtgaagggcggcgcgcttaggcaggcggtggcgcggctggagtgccgcggggagggctgtgccggttgctttctgcagccgcatctcggccagctctcctcgccgtccccggggcgctgtgcgtctccagtccgggaccgaagccgcctgccgtagcgggcggccagatccgcgtcccgcctcagcggccggaggacatgcgggagagagaatgagccagagggacacgctggtgcatctgtttgccggaggatgtggtggtacagtgggagctattctgacatgtccactggaagttgtaaaaacacgactgcagtcatcttctgtgacgctttatatttctgaagttcagctgaacaccatggctggagccagtgtcaaccgagtagtgtctcccggacctcttcattgcctaaagtgagagcatagtattcaggagtgttttttagtttgtttgcgttagtgagttccagatgtttgtttacttatattctgccacattgaaaatgattttttataaacctatttacagaagttactctgaattgtactcataaggaatgataatccctaatggagaagaacagttagacagataagataaagtgtaattttacttccaaatcatgtgtatttagaatatttctacatttatccagtggagttttttctaaagctattataagtattttattttggattattcatttacttttgaaatgtgataatgtttaatgctaactcctttcgtgtatatttttaatgttccaagtaagtacatccaattaatgataatctgtgatttttatgtaacctaagtacaactgagacagcagagttctaatgctgttcagtatttgtttaacatttcctgatggtttggaaaagatttgtttttacagtttgccatacttcattatgttgcaattggatttgaaatttcaaaactattaaaattaggtttcgtatgtttatacttgtaaataatggaatgccttcgtgtctgccttatcagctcagtgtttgaacttagttcagtagtgtttattttgtaatagcaaataaactcattctgtgtatttacctttgttacta

SEQ ID NO: 16506 - DNA, 4639 bp, Homo sapiens
  misc_feature (4)..(5): n is a, c, g, or t
agcnnggtgaagggcggcgcgcttaggcaggcggtggcgcggctggagtgccgcggggagggctgtgccggttgctttctgcagccgcatctcggccagctctcctcgccgtccccggggcgctgtgcgtctccagtccgggaccgaagccgcctgccgtagcgggcggccagatccgcgtcccgcctcagcggccggaggacatgcgggagagagaatgagccagagggacacgctggtgcatctgtttgccggaggatgtggtggtacagtgggagctattctgacatgtccactggaagttgtaaaaacacgactgcagtcatcttctgtgacgctttatatttctgaagttcagctgaacaccatggctggagccagtgtcaaccgagtagtgtctcccggacctcttcattgcctaaaggtgatcttggaaaaagaagggcctcgttccttgtttagaggactaggccccaatttagtgggggtagccccttccagagcaatatactttgctgcttattcaaactgcaaggaaaagttgaatgatgtatttgatcctgattctacccaagtacatatgatttcagctgcaatggcaggttttactgcaatcacagcaaccaaccccatttggcttataaagactcggttacagcttgatgcaaggaaccgcggggaaaggcgaatgggtgcttttgaatgtgttcgtaaagtgtatcagacagatggactaaaaggattttataggggcatgtctgcttcatatgctggtatatcagagactgttatccattttgttatttatgaaagtataaaacaaaaactactggaatataagactgcttctacaatggaaaatgatgaagagtctgtgaaagaagcatcagattttgtgggaatgatgctagctgctgccacctcaaaaacttgtgccacaactatagcatatccacatgaagttgtaagaacaagactacgtgaagagggaacaaaatacagatctttttttcagactctatctttgcttgttcaagaagaaggttatgggtctctttatcgtggtctgacaactcatctagtgagacagattccaaacacagccattatgatggccacctatgaattggtggtttacctactcaatggatagcagcacgaggactgctgtactgcaaaaaaagaagaccaaaagattacagtggaccatgggatacagaagccagcatggcagacagaagaaaaatagtttgggaacatgtaactattctaagtggaagttttgttgtaggaattatagtaatcacaccacattacttggcctttcggtaatgtgaaaaaaaaaaaaaaacctcagagcctccaaggaaatgcctttagaagcactcctctctcaaaattgccattttctctaccatgtcccccagacacagttgggttttgttgatttatggcagtcttctaaacaaagccatccttaattttacatactgtattgtaactatccaaagatagtattggcagtcataaatttataacttctggcctttgtttaattccagtaaaataacagcaatgacaatgagatcgtcagtattattttcacatttccctgagaggacctggcacaatattttaaatttaattatttggcagtagtcactgtttttgacaaccaatgaaatagcgtctaaatatcttgtatattttttagcatcaaaatgttttggtttccactgctgacaggtgcttgttgtttagcctaatgtggatatttaaattgttaacataccaaacacacatggtaatagtttgggacaaaataactagtaaaatgttgatttctcggctatttcactgactgcggcatgtcctcgtgtcttctctgattttgtggtacatgaatgaatgcatttatctttttagtgacttactagttacgaacttgaattatcacctctttgtcatacttaagtatcatttacataaagtgtaaaagattttttcacttttgaatctttacctacttgctttcacattaagaatttgaacttttgagttttttccaggtctatatataatagattacatttattttgtaaagaaaatagtaatttaaagttttgccattttaaggtgacaatatttgggacagtataaatattatagacaagggcccccttgctgtctgctttagcaggtagtgacattaattgacttatagttttgtgtaaatgaacaaactgcttttgacaagaaatttattctgtcctagtttcctgcgtggtaaatcatagaaagattcaagttcatttgggttaaatgtgctaataggatgtagcttttaaattctgctattgagtcagctgtaccttttaatactttaaatgtgttatttgtatggcccttataaaggtgtttgctgtaattctgttaaaagacttcgcctatgccatactggtgtataaaaactgccgcaattggacgccggtgtggtactcatttcagtatacctgaactgtacattttgtgcaatggctttatctaaaagaatgacgcttcgtgaaagcactttgtggccttttttgggggggagggtgagagagtaggagagaataccatgttaagattaaaaaaaaaaacaaaaacattggtcatgtattaggcagaaacagtgttcataacatttttctgggttttaaatatgttgtttcggatatccttaatataaatgttttaggtattctgtgtaccctgtcgtacccccaacattatagaatattgcagtgtgtcattgcaagctttctctgctgtcaccagtgaaacatagtgccctgttaaattcccccactttaacttccttgtgatcaacagtaactggatgtttttgaggtgctcaattggaataaaaatattccaatctatttggagaccaaaggcaaaatcagttttcttacctttggaattattcgtaccttttatggtaaatttcagctttgacatgtattatgaggaacgtaccaaaaaccggtttgtaacaaatctgtagagaaggtctgaatctatcgtgtttgccttttcaggtgccatttctactgcctaatacagtgccatttgccttgtgaagacccataaacattcattgtgttgaatgtaagatagagactctccctagtcttactgatctcagtaccccacaaatgattaagaatgatatgaaaaccagcagctaaggaacatcttattatttagttgtagcatattcataacaagtgtccttcaaggataaacatatattctctatttgtatttagcaagtaaaacttgtgttgacctttagtgcattatattcagcttttaacagtattatgtatgtactggaaagcaaagaaatcttagagtcttggacattgtttatttgtgcaacaactagaaaggagcaatgaagtttatttcagttgtatttttccctaagcacaatctgcaatagtttatgtatgacagagataattcaaaaaggaaaactatatataaaagttgtatataaagtttgtctctgaaatatttctttgaagtttttaaaaaattgactcatgtttaaaaacaaaaacacatattcagagcattggacttttttaacttgttttcatctgtttatcatgacttttttatttctggtgtagagtccacattatttagtttgttgtacttttaaatttcaaagttcaaatctgaagaattagcgtttgtgatttcgggataccatgcagtggttttaatcccaggaaaaaaactatcaacaaaagttcgtttgattctcattatgtaactttgtagaaccatcctttctagatgggtccaccacagtgaatttgtaactttgaagtcaggatagaatatcattagattatctgtgagatagcattactatgttaggaccagcagagtttgggttggtaaaaataatgtttgctctattactgggttacagacatttcagcatttttaggttggttttaaatcactaaaaatatttattcggatttgaaggatttaagtgctaaaaatcaatccatttcttgcccttcaataattgtccatgcctgcctttgttgtttacatgctcttctgcccagactgttagtaatctagggaccccctttggagctgataagtacagttcagccttttctcctcaaatatataatgactttaacattcctaagaatataggtatttctgaatgatttaaatttgaggaattttaatacataaaatacaatgtacaaactttctgcccactcagatctcttctccatcatgtacttagtatttcccattaacctacacactgatttttatgctactccttgtagaaacaaaattctggtttgactcagtttttgtgtttataaacttttggaatgtgtaccccgtttatgtgaagaattatgacctatcagtcatagctaaatagtgaacctcaaaagtgttaacttttgactattcatgtgaggtttggtatcttgcatttatgtacatggctgtaaattatgtgcatttactctgtatttatgttatctagctgacttttacttgaattgttcaaattttaaaaattaaaatacgctcatgaaaa

SEQ ID NO: 16507 - DNA, 5357 bp, Homo sapiens
gtaaaatttgagttactcagttactgacatagaaaagaaccctgtgagaccaaattcagctttggaaacaatttagtgtaattattttgcatatgtagatacacctttgaaagccaagaaaggtttatgattggatctgtactatattaatttaaaaacaaattattcttaagtatattgtagcatttctgttcctgtaagtactttactcatcttaaatgtactgatcattagccacctttataaaaagaatgtgcctgacccactagtatttgatagaaatattaaaacagttaagatccttaaacatttctgcatataattttttattgagtaaatgtaacttaacgtaagtagttctatgaagtctgtgtaaattaaaaccctgttttgtgtagatgaagcaatctttataagtttctgtcatcaagactgtattttgtgtgctatttttccatagctaggaaggtagcaagtaaaacatatgcactatcctagaaacatactgttccaggtagatcttaatttactacctggaatgagccatcttaggtgaccaccattctgcaccaatacctagtacataatactttagttttaaagtaaactagagctgtcttctaccctgagtttattccatgtctataaaagagggaacttccaatttgtgactttttgaacttttgagtttttgtatgtgtttaagtaaatgacgataggcctgtcctattaaccctaacaaaaaccttactgtgatacggttattttaacagtattagtatgtatatatgtagaaagtattcatggggccaaacaacagtcttttccactatataatcaactaaagatcaaactattggtaaaatttgacatttgtgtagaattcattttgaatgtagtgatttgggatgctaatcaaaccccaggtaactgttttttttagctggttttaaggatcccaagtgcatgctttttagccgtagaatacacaaaatgtctatgtgtttgtagagatggatttctgaattcagcttagacagtagagagcaccctaaaggatattctaagtaggttgggaaagcaatttatattcattttgcttttaaaagaatctgttagttaaggacagaatttgagaattcatatagattggaagtgaagacaaatgtttgtcgtatgtgaaaagtgtaatatatacataaattagtagtttatttatatacattttcttgaatgtagatttatctaatttttaaaaccttaaagttaatagtgaattcttcatttttaccagagttcattttaaacatgtttgtttaggttttactgcaatcacagcaaccaaccccatttggcttataaagactcggttacagcttgatgcaaggaaccgcggggaaaggcgaatgggtgcttttgaatgtgttcgtaaagtgtatcagacagatggactaaaaggattttataggggcatgtctgcttcatatgctggtatatcagagactgttatccattttgttatttatgaaagtataaaacaaaaactactggaatataagactgcttctacaatggaaaatgatgaagagtctgtgaaagaagcatcagattttgtgggaatgatgctagctgctgccacctcaaaaacttgtgccacaactatagcatatccacatgaagttgtaagaacaagactacgtgaagagggaacaaaatacagatctttttttcagactctatctttgcttgttcaagaagaaggttatgggtctctttatcgtggtctgacaactcatctagtgagacagattccaaacacagccattatgatggccacctatgaattggtggtttacctactcaatggatagcagcacgaggactgctgtactgcaaaaaaagaagaccaaaagattacagtggaccatgggatacagaagccagcatggcagacagaagaaaaatagtttgggaacatgtaactattctaagtggaagttttgttgtaggaattatagtaatcacaccacattacttggcctttcggtaatgtgaaaaaaaaaaaaaaacctcagagcctccaaggaaatgcctttagaagcactcctctctcaaaattgccattttctctaccatgtcccccagacacagttgggttttgttgatttatggcagtcttctaaacaaagccatccttaattttacatactgtattgtaactatccaaagatagtattggcagtcataaatttataacttctggcctttgtttaattccagtaaaataacagcaatgacaatgagatcgtcagtattattttcacatttccctgagaggacctggcacaatattttaaatttaattatttggcagtagtcactgtttttgacaaccaatgaaatagcgtctaaatatcttgtatattttttagcatcaaaatgttttggtttccactgctgacaggtgcttgttgtttagcctaatgtggatatttaaattgttaacataccaaacacacatggtaatagtttgggacaaaataactagtaaaatgttgatttctcggctatttcactgactgcggcatgtcctcgtgtcttctctgattttgtggtacatgaatgaatgcatttatctttttagtgacttactagttacgaacttgaattatcacctctttgtcatacttaagtatcatttacataaagtgtaaaagattttttcacttttgaatctttacctacttgctttcacattaagaatttgaacttttgagttttttccaggtctatatataatagattacatttattttgtaaagaaaatagtaatttaaagttttgccattttaaggtgacaatatttgggacagtataaatattatagacaagggcccccttgctgtctgctttagcaggtagtgacattaattgacttatagttttgtgtaaatgaacaaactgcttttgacaagaaatttattctgtcctagtttcctgcgtggtaaatcatagaaagattcaagttcatttgggttaaatgtgctaataggatgtagcttttaaattctgctattgagtcagctgtaccttttaatactttaaatgtgttatttgtatggcccttataaaggtgtttgctgtaattctgttaaaagacttcgcctatgccatactggtgtataaaaactgccgcaattggacgccggtgtggtactcatttcagtatacctgaactgtacattttgtgcaatggctttatctaaaagaatgacgcttcgtgaaagcactttgtggccttttttgggggggagggtgagagagtaggagagaataccatgttaagattaaaaaaaaaaacaaaaacattggtcatgtattaggcagaaacagtgttcataacatttttctgggttttaaatatgttgtttcggatatccttaatataaatgttttaggtattctgtgtaccctgtcgtacccccaacattatagaatattgcagtgtgtcattgcaagctttctctgctgtcaccagtgaaacatagtgccctgttaaattcccccactttaacttccttgtgatcaacagtaactggatgtttttgaggtgctcaattggaataaaaatattccaatctatttggagaccaaaggcaaaatcagttttcttacctttggaattattcgtaccttttatggtaaatttcagctttgacatgtattatgaggaacgtaccaaaaaccggtttgtaacaaatctgtagagaaggtctgaatctatcgtgtttgccttttcaggtgccatttctactgcctaatacagtgccatttgccttgtgaagacccataaacattcattgtgttgaatgtaagatagagactctccctagtcttactgatctcagtaccccacaaatgattaagaatgatatgaaaaccagcagctaaggaacatcttattatttagttgtagcatattcataacaagtgtccttcaaggataaacatatattctctatttgtatttagcaagtaaaacttgtgttgacctttagtgcattatattcagcttttaacagtattatgtatgtactggaaagcaaagaaatcttagagtcttggacattgtttatttgtgcaacaactagaaaggagcaatgaagtttatttcagttgtatttttccctaagcacaatctgcaatagtttatgtatgacagagataattcaaaaaggaaaactatatataaaagttgtatataaagtttgtctctgaaatatttctttgaagtttttaaaaaattgactcatgtttaaaaacaaaaacacatattcagagcattggacttttttaacttgttttcatctgtttatcatgacttttttatttctggtgtagagtccacattatttagtttgttgtacttttaaatttcaaagttcaaatctgaagaattagcgtttgtgatttcgggataccatgcagtggttttaatcccaggaaaaaaactatcaacaaaagttcgtttgattctcattatgtaactttgtagaaccatcctttctagatgggtccaccacagtgaatttgtaactttgaagtcaggatagaatatcattagattatctgtgagatagcattactatgttaggaccagcagagtttgggttggtaaaaataatgtttgctctattactgggttacagacatttcagcatttttaggttggttttaaatcactaaaaatatttattcggatttgaaggatttaagtgctaaaaatcaatccatttcttgcccttcaataattgtccatgcctgcctttgttgtttacatgctcttctgcccagactgttagtaatctagggaccccctttggagctgataagtacagttcagccttttctcctcaaatatataatgactttaacattcctaagaatataggtatttctgaatgatttaaatttgaggaattttaatacataaaatacaatgtacaaactttctgcccactcagatctcttctccatcatgtacttagtatttcccattaacctacacactgatttttatgctactccttgtagaaacaaaattctggtttgactcagtttttgtgtttataaacttttggaatgtgtaccccgtttatgtgaagaattatgacctatcagtcatagctaaatagtgaacctcaaaagtgttaacttttgactattcatgtgaggtttggtatcttgcatttatgtacatggctgtaaattatgtgcatttactctgtatttatgttatctagctgacttttacttgaattgttcaaattttaaaaattaaaatacgctcatgaaaa

SEQ ID NO: 16508 - DNA, 4680 bp, Homo sapiens
atccttaattaaattattccccccccccccttgattacccggacgccgctggacctggccgcacgccgcaatctagcaggcgtcggggatccagggccgctttgaggagcctggcttcggatttcgcgtaggttgcatggcccaaggggacggggcggaaagtgcggaggctgaggacaaaatgggcgccggagactcctttagccctcgctccttgcagcgctcgcttgggcctctgcacgtcactcacgccccacctcggacctcgggccgctcatttccgggctcggctttgcaagatgtggtggtacagtgggagctattctgacatgtccactggaagttgtaaaaacacgactgcagtcatcttctgtgacgctttatatttctgaagttcagctgaacaccatggctggagccagtgtcaaccgagtagtgtctcccggacctcttcattgcctaaaggtgatcttggaaaaagaagggcctcgttccttgtttagaggactaggccccaatttagtgggggtagccccttccagagcaatatactttgctgcttattcaaactgcaaggaaaagttgaatgatgtatttgatcctgattctacccaagtacatatgatttcagctgcaatggcaggttttactgcaatcacagcaaccaaccccatttggcttataaagactcggttacagcttgatgcaaggaaccgcggggaaaggcgaatgggtgcttttgaatgtgttcgtaaagtgtatcagacagatggactaaaaggattttataggggcatgtctgcttcatatgctggtatatcagagactgttatccattttgttatttatgaaagtataaaacaaaaactactggaatataagactgcttctacaatggaaaatgatgaagagtctgtgaaagaagcatcagattttgtgggaatgatgctagctgctgccacctcaaaaacttgtgccacaactatagcatatccacatgaagttgtaagaacaagactacgtgaagagggaacaaaatacagatctttttttcagactctatctttgcttgttcaagaagaaggttatgggtctctttatcgtggtctgacaactcatctagtgagacagattccaaacacagccattatgatggccacctatgaattggtggtttacctactcaatggatagcagcacgaggactgctgtactgcaaaaaaagaagaccaaaagattacagtggaccatgggatacagaagccagcatggcagacagaagaaaaatagtttgggaacatgtaactattctaagtggaagttttgttgtaggaattatagtaatcacaccacattacttggcctttcggtaatgtgaaaaaaaaaaaaaaacctcagagcctccaaggaaatgcctttagaagcactcctctctcaaaattgccattttctctaccatgtcccccagacacagttgggttttgttgatttatggcagtcttctaaacaaagccatccttaattttacatactgtattgtaactatccaaagatagtattggcagtcataaatttataacttctggcctttgtttaattccagtaaaataacagcaatgacaatgagatcgtcagtattattttcacatttccctgagaggacctggcacaatattttaaatttaattatttggcagtagtcactgtttttgacaaccaatgaaatagcgtctaaatatcttgtatattttttagcatcaaaatgttttggtttccactgctgacaggtgcttgttgtttagcctaatgtggatatttaaattgttaacataccaaacacacatggtaatagtttgggacaaaataactagtaaaatgttgatttctcggctatttcactgactgcggcatgtcctcgtgtcttctctgattttgtggtacatgaatgaatgcatttatctttttagtgacttactagttacgaacttgaattatcacctctttgtcatacttaagtatcatttacataaagtgtaaaagattttttcacttttgaatctttacctacttgctttcacattaagaatttgaacttttgagttttttccaggtctatatataatagattacatttattttgtaaagaaaatagtaatttaaagttttgccattttaaggtgacaatatttgggacagtataaatattatagacaagggcccccttgctgtctgctttagcaggtagtgacattaattgacttatagttttgtgtaaatgaacaaactgcttttgacaagaaatttattctgtcctagtttcctgcgtggtaaatcatagaaagattcaagttcatttgggttaaatgtgctaataggatgtagcttttaaattctgctattgagtcagctgtaccttttaatactttaaatgtgttatttgtatggcccttataaaggtgtttgctgtaattctgttaaaagacttcgcctatgccatactggtgtataaaaactgccgcaattggacgccggtgtggtactcatttcagtatacctgaactgtacattttgtgcaatggctttatctaaaagaatgacgcttcgtgaaagcactttgtggccttttttgggggggagggtgagagagtaggagagaataccatgttaagattaaaaaaaaaaacaaaaacattggtcatgtattaggcagaaacagtgttcataacatttttctgggttttaaatatgttgtttcggatatccttaatataaatgttttaggtattctgtgtaccctgtcgtacccccaacattatagaatattgcagtgtgtcattgcaagctttctctgctgtcaccagtgaaacatagtgccctgttaaattcccccactttaacttccttgtgatcaacagtaactggatgtttttgaggtgctcaattggaataaaaatattccaatctatttggagaccaaaggcaaaatcagttttcttacctttggaattattcgtaccttttatggtaaatttcagctttgacatgtattatgaggaacgtaccaaaaaccggtttgtaacaaatctgtagagaaggtctgaatctatcgtgtttgccttttcaggtgccatttctactgcctaatacagtgccatttgccttgtgaagacccataaacattcattgtgttgaatgtaagatagagactctccctagtcttactgatctcagtaccccacaaatgattaagaatgatatgaaaaccagcagctaaggaacatcttattatttagttgtagcatattcataacaagtgtccttcaaggataaacatatattctctatttgtatttagcaagtaaaacttgtgttgacctttagtgcattatattcagcttttaacagtattatgtatgtactggaaagcaaagaaatcttagagtcttggacattgtttatttgtgcaacaactagaaaggagcaatgaagtttatttcagttgtatttttccctaagcacaatctgcaatagtttatgtatgacagagataattcaaaaaggaaaactatatataaaagttgtatataaagtttgtctctgaaatatttctttgaagtttttaaaaaattgactcatgtttaaaaacaaaaacacatattcagagcattggacttttttaacttgttttcatctgtttatcatgacttttttatttctggtgtagagtccacattatttagtttgttgtacttttaaatttcaaagttcaaatctgaagaattagcgtttgtgatttcgggataccatgcagtggttttaatcccaggaaaaaaactatcaacaaaagttcgtttgattctcattatgtaactttgtagaaccatcctttctagatgggtccaccacagtgaatttgtaactttgaagtcaggatagaatatcattagattatctgtgagatagcattactatgttaggaccagcagagtttgggttggtaaaaataatgtttgctctattactgggttacagacatttcagcatttttaggttggttttaaatcactaaaaatatttattcggatttgaaggatttaagtgctaaaaatcaatccatttcttgcccttcaataattgtccatgcctgcctttgttgtttacatgctcttctgcccagactgttagtaatctagggaccccctttggagctgataagtacagttcagccttttctcctcaaatatataatgactttaacattcctaagaatataggtatttctgaatgatttaaatttgaggaattttaatacataaaatacaatgtacaaactttctgcccactcagatctcttctccatcatgtacttagtatttcccattaacctacacactgatttttatgctactccttgtagaaacaaaattctggtttgactcagtttttgtgtttataaacttttggaatgtgtaccccgtttatgtgaagaattatgacctatcagtcatagctaaatagtgaacctcaaaagtgttaacttttgactattcatgtgaggtttggtatcttgcatttatgtacatggctgtaaattatgtgcatttactctgtatttatgttatctagctgacttttacttgaattgttcaaattttaaaaattaaaatacgctcatgaaaa

SEQ ID NO: 16509 - DNA, 4726 bp, Homo sapiens
  misc_feature (4)..(5): n is a, c, g, or t
agcnnggtgaagggcggcgcgcttaggcaggcggtggcgcggctggagtgccgcggggagggctgtgccggttgctttctgcagccgcatctcggccagctctcctcgccgtccccggggcgctgtgcgtctccagtccgggaccgaagccgcctgccgtagcgggcggccagatccgcgtcccgcctcagcggccggaggacatgcgggagagagaatgagccagagggacacgctggtgcatctgtttgccggaggatgtggtggtacagtgggagctattctgacatgtccactggaagttgtaaaaacacgactgcagtcatcttctgtgacgctttatatttctgaagttcagctgaacaccatggctggagccagtgtcaaccgagtagtgtctcccggacctcttcattgcctaaaggtgatcttggaaaaagaagggcctcgttccttgtttagaggactaggccccaatttagtgggggtagccccttccagagcaatatactttgctgcttattcaaactgcaaggaaaagttgaatgatgtatttgatcctgattctacccaagtacatatgatttcagctgcaatggcagaacacaagaaattaaatacaaaataatgcaaaatatttcataagtatggatgtgcaatattactggccatagtgcaaaaggtgaaaggttttactgcaatcacagcaaccaaccccatttggcttataaagactcggttacagcttgatgcaaggaaccgcggggaaaggcgaatgggtgcttttgaatgtgttcgtaaagtgtatcagacagatggactaaaaggattttataggggcatgtctgcttcatatgctggtatatcagagactgttatccattttgttatttatgaaagtataaaacaaaaactactggaatataagactgcttctacaatggaaaatgatgaagagtctgtgaaagaagcatcagattttgtgggaatgatgctagctgctgccacctcaaaaacttgtgccacaactatagcatatccacatgaagttgtaagaacaagactacgtgaagagggaacaaaatacagatctttttttcagactctatctttgcttgttcaagaagaaggttatgggtctctttatcgtggtctgacaactcatctagtgagacagattccaaacacagccattatgatggccacctatgaattggtggtttacctactcaatggatagcagcacgaggactgctgtactgcaaaaaaagaagaccaaaagattacagtggaccatgggatacagaagccagcatggcagacagaagaaaaatagtttgggaacatgtaactattctaagtggaagttttgttgtaggaattatagtaatcacaccacattacttggcctttcggtaatgtgaaaaaaaaaaaaaaacctcagagcctccaaggaaatgcctttagaagcactcctctctcaaaattgccattttctctaccatgtcccccagacacagttgggttttgttgatttatggcagtcttctaaacaaagccatccttaattttacatactgtattgtaactatccaaagatagtattggcagtcataaatttataacttctggcctttgtttaattccagtaaaataacagcaatgacaatgagatcgtcagtattattttcacatttccctgagaggacctggcacaatattttaaatttaattatttggcagtagtcactgtttttgacaaccaatgaaatagcgtctaaatatcttgtatattttttagcatcaaaatgttttggtttccactgctgacaggtgcttgttgtttagcctaatgtggatatttaaattgttaacataccaaacacacatggtaatagtttgggacaaaataactagtaaaatgttgatttctcggctatttcactgactgcggcatgtcctcgtgtcttctctgattttgtggtacatgaatgaatgcatttatctttttagtgacttactagttacgaacttgaattatcacctctttgtcatacttaagtatcatttacataaagtgtaaaagattttttcacttttgaatctttacctacttgctttcacattaagaatttgaacttttgagttttttccaggtctatatataatagattacatttattttgtaaagaaaatagtaatttaaagttttgccattttaaggtgacaatatttgggacagtataaatattatagacaagggcccccttgctgtctgctttagcaggtagtgacattaattgacttatagttttgtgtaaatgaacaaactgcttttgacaagaaatttattctgtcctagtttcctgcgtggtaaatcatagaaagattcaagttcatttgggttaaatgtgctaataggatgtagcttttaaattctgctattgagtcagctgtaccttttaatactttaaatgtgttatttgtatggcccttataaaggtgtttgctgtaattctgttaaaagacttcgcctatgccatactggtgtataaaaactgccgcaattggacgccggtgtggtactcatttcagtatacctgaactgtacattttgtgcaatggctttatctaaaagaatgacgcttcgtgaaagcactttgtggccttttttgggggggagggtgagagagtaggagagaataccatgttaagattaaaaaaaaaaacaaaaacattggtcatgtattaggcagaaacagtgttcataacatttttctgggttttaaatatgttgtttcggatatccttaatataaatgttttaggtattctgtgtaccctgtcgtacccccaacattatagaatattgcagtgtgtcattgcaagctttctctgctgtcaccagtgaaacatagtgccctgttaaattcccccactttaacttccttgtgatcaacagtaactggatgtttttgaggtgctcaattggaataaaaatattccaatctatttggagaccaaaggcaaaatcagttttcttacctttggaattattcgtaccttttatggtaaatttcagctttgacatgtattatgaggaacgtaccaaaaaccggtttgtaacaaatctgtagagaaggtctgaatctatcgtgtttgccttttcaggtgccatttctactgcctaatacagtgccatttgccttgtgaagacccataaacattcattgtgttgaatgtaagatagagactctccctagtcttactgatctcagtaccccacaaatgattaagaatgatatgaaaaccagcagctaaggaacatcttattatttagttgtagcatattcataacaagtgtccttcaaggataaacatatattctctatttgtatttagcaagtaaaacttgtgttgacctttagtgcattatattcagcttttaacagtattatgtatgtactggaaagcaaagaaatcttagagtcttggacattgtttatttgtgcaacaactagaaaggagcaatgaagtttatttcagttgtatttttccctaagcacaatctgcaatagtttatgtatgacagagataattcaaaaaggaaaactatatataaaagttgtatataaagtttgtctctgaaatatttctttgaagtttttaaaaaattgactcatgtttaaaaacaaaaacacatattcagagcattggacttttttaacttgttttcatctgtttatcatgacttttttatttctggtgtagagtccacattatttagtttgttgtacttttaaatttcaaagttcaaatctgaagaattagcgtttgtgatttcgggataccatgcagtggttttaatcccaggaaaaaaactatcaacaaaagttcgtttgattctcattatgtaactttgtagaaccatcctttctagatgggtccaccacagtgaatttgtaactttgaagtcaggatagaatatcattagattatctgtgagatagcattactatgttaggaccagcagagtttgggttggtaaaaataatgtttgctctattactgggttacagacatttcagcatttttaggttggttttaaatcactaaaaatatttattcggatttgaaggatttaagtgctaaaaatcaatccatttcttgcccttcaataattgtccatgcctgcctttgttgtttacatgctcttctgcccagactgttagtaatctagggaccccctttggagctgataagtacagttcagccttttctcctcaaatatataatgactttaacattcctaagaatataggtatttctgaatgatttaaatttgaggaattttaatacataaaatacaatgtacaaactttctgcccactcagatctcttctccatcatgtacttagtatttcccattaacctacacactgatttttatgctactccttgtagaaacaaaattctggtttgactcagtttttgtgtttataaacttttggaatgtgtaccccgtttatgtgaagaattatgacctatcagtcatagctaaatagtgaacctcaaaagtgttaacttttgactattcatgtgaggtttggtatcttgcatttatgtacatggctgtaaattatgtgcatttactctgtatttatgttatctagctgacttttacttgaattgttcaaattttaaaaattaaaatacgctcatgaaaa

SEQ ID NO: 16510 - DNA, 4484 bp, Homo sapiens
  misc_feature (4)..(5): n is a, c, g, or t
agcnnggtgaagggcggcgcgcttaggcaggcggtggcgcggctggagtgccgcggggagggctgtgccggttgctttctgcagccgcatctcggccagctctcctcgccgtccccggggcgctgtgcgtctccagtccgggaccgaagccgcctgccgtagcgggcggccagatccgcgtcccgcctcagcggccggaggacatgcgggagagagaatgagccagagggacacgctggtgcatctgtttgccggaggatgtggtggtacagtgggagctattctgacatgtccactggaagttgtaaaaacacgactgcagtcatcttctgtgacgctttatatttctgaagttcagctgaacaccatggctggagccagtgtcaaccgagtagtgtctcccggacctcttcattgcctaaaggtgatcttggaaaaagaagggcctcgttccttgtttagaggactaggccccaatttagtgggggtagccccttccagagcaatatactttgctgcttattcaaactgcaaggaaaagttgaatgatgtatttgatcctgattctacccaagtacatatgatttcagctgcaatggcaggttttactgcaatcacagcaaccaaccccatttggcttataaagactcggttacagcttgatgcaaggaaccgcggggaaaggcgaatgggtgcttttgaatgtgttcgtaaagtgtatcagacagatggactaaaaggattttataggggcatgtctgcttcatatgctggtatatcagagactgttatccattttgttatttatgaaagtataaaacaaaaactactggaatataagactgcttctacaatggaaaatgatgaagagtctgtgaaagaagcatcagattttgtgggaatgatgctagctgctgccacctcaaaaacttgtgccacaactatagcatatccacatgaagttgtaagaacaagactacgtgaagagggaacaaaatacagatctttttttcagactctatctttgcttgttcaagaagaaggttatgggtctctttatcgtggtctgacaactcatctagtgagacagattccaaacacagccattatgatggccacctatgaattggtggtttacctactcaatggatagcagcacgaggactgctgtactgcaaaaaaagaagaccaaaagattacagtggaccatgggatacagaagccagcatggcagacagaagaaaaatagtttgggaacatgtaactattctaagtggaagttttgttgtaggaattatagtaatcacaccacattacttggcctttcggtaatgtgaaaaaaaaaaaaaaacctcagagcctccaaggaaatgcctttagaagcactcctctctcaaaattgccattttctctaccatgtcccccagacacagttgggttttgttgatttatggcagtcttctaaacaaagccatccttaattttacatactgtattgtaactatccaaagatagtattggcagtcataaatttataacttctggcctttgtttaattccagtaaaataacagcaatgacaatgagatcgtcagtattattttcacatttccctgagaggacctggcacaatattttaaatttaattatttggcagtagtcactgtttttgacaaccaatgaaatagcgtctaaatatcttgtatattttttagcatcaaaatgttttggtttccactgctgacaggtgcttgttgtttagcctaatgtggatatttaaattgttaacataccaaacacacatggtaatagtttgggacaaaataactagtaaaatgttgatttctcggctatttcactgactgcggcatgtcctcgtgtcttctctgattttgtggtacatgaatgaatgcatttatctttttagtgacttactagttacgaacttgaattatcacctctttgtcatacttaagtatcatttacataaagtgtaaaagattttttcacttttgaatctttacctacttgctttcacattaagaatttgaacttttgagttttttccaggtctatatataatagattacatttattttgtaaagaaaatagtaatttaaagttttgccattttaaggtgacaatatttgggacagtataaatattatagacaagggcccccttgctgtctgctttagcaggtagtgacattaattgacttatagttttgtgtaaatgaacaaactgcttttgacaagaaatttattctgtcctagtttcctgcgtggtaaatcatagaaagattcaagttcatttgggttaaatgtgctaataggatgtagcttttaaattctgctattgagtcagctgtaccttttaatactttaaatgtgttatttgtatggcccttataaaggtgtttgctgtaattctgttaaaagacttcgcctatgccatactggtgtataaaaactgccgcaattggacgccggtgtggtactcatttcagtatacctgaactgtacattttgtgcaatggctttatctaaaagaatgacgcttcgtgaaagcactttgtggccttttttgggggggagggtgagagagtaggagagaataccatgttaagattaaaaaaaaaaacaaaaacattggtcatgtattaggcagaaacagtgttcataacatttttctgggttttaaatatgttgtttcggatatccttaatataaatgttttaggtattctgtgtaccctgtcgtacccccaacattatagaatattgcagtgtgtcattgcaagctttctctgctgtcaccagtgaaacatagtgccctgttaaattcccccactttaacttccttgtgatcaacagtaactggatgtttttgaggtgctcaattggaataaaaatattccaatctatttggagaccaaaggcaaaatcagttttcttacctttggaattattcgtaccttttatggtaaatttcagctttgacatgtattatgaggaacgtaccaaaaaccggtttgtaacaaatctgtagagaaggtctgaatctatcgtgtttgccttttcaggtgccatttctactgcctaatacagtgccatttgccttgtgaagacccataaacattcattgtgttgaatgtaagatagagactctccctagtcttactgatctcagtaccccacaaatgattaagaatgatatgaaaaccagcagctaaggaacatcttattatttagttgtagcatatttgtgcaacaactagaaaggagcaatgaagtttatttcagttgtatttttccctaagcacaatctgcaatagtttatgtatgacagagataattcaaaaaggaaaactatatataaaagttgtatataaagtttgtctctgaaatatttctttgaagtttttaaaaaattgactcatgtttaaaaacaaaaacacatattcagagcattggacttttttaacttgttttcatctgtttatcatgacttttttatttctggtgtagagtccacattatttagtttgttgtacttttaaatttcaaagttcaaatctgaagaattagcgtttgtgatttcgggataccatgcagtggttttaatcccaggaaaaaaactatcaacaaaagttcgtttgattctcattatgtaactttgtagaaccatcctttctagatgggtccaccacagtgaatttgtaactttgaagtcaggatagaatatcattagattatctgtgagatagcattactatgttaggaccagcagagtttgggttggtaaaaataatgtttgctctattactgggttacagacatttcagcatttttaggttggttttaaatcactaaaaatatttattcggatttgaaggatttaagtgctaaaaatcaatccatttcttgcccttcaataattgtccatgcctgcctttgttgtttacatgctcttctgcccagactgttagtaatctagggaccccctttggagctgataagtacagttcagccttttctcctcaaatatataatgactttaacattcctaagaatataggtatttctgaatgatttaaatttgaggaattttaatacataaaatacaatgtacaaactttctgcccactcagatctcttctccatcatgtacttagtatttcccattaacctacacactgatttttatgctactccttgtagaaacaaaattctggtttgactcagtttttgtgtttataaacttttggaatgtgtaccccgtttatgtgaagaattatgacctatcagtcatagctaaatagtgaacctcaaaagtgttaacttttgactattcatgtgaggtttggtatcttgcatttatgtacatggctgtaaattatgtgcatttactctgtatttatgttatctagctgacttttacttgaattgttcaaattttaaaaattaaaatacgctcatgaaaa

SEQ ID NO: 16511 - DNA, 4790 bp, Homo sapiens
  misc_feature (4)..(5): n is a, c, g, or t
agcnnggtgaagggcggcgcgcttaggcaggcggtggcgcggctggagtgccgcggggagggctgtgccggttgctttctgcagccgcatctcggccagctctcctcgccgtccccggggcgctgtgcgtctccagtccgggaccgaagccgcctgccgtagcgggcggccagatccgcgtcccgcctcagcggccggaggacatgcgggagagagaatgagccagagggacacgctggtgcatctgtttgccggaggatgtggtggtacagtgggagctattctgacatgtccactggaagttgtaaaaacacgactgcagtcatcttctgtgacgctttatatttctgaagttcagctgaacaccatggctggagccagtgtcaaccgagtagtgtctcccggacctcttcattgcctaaaggtgatcttggaaaaagaagggcctcgttccttgtttagaggactaggccccaatttagtgggggtagccccttccagagcaatatactttgctgcttattcaaactgcaaggaaaagttgaatgatgtatttgatcctgattctacccaagtacatatgatttcagctgcaatggcaggttttactgcaatcacagcaaccaaccccatttggcttataaagactcggttacagcttgatgcaaggaaccgcggggaaaggcgaatgggtgcttttgaatgtgttcgtaaagtgtatcagacagatggactaaaaggattttataggggcatgtctgcttcatatgctggtatatcagagactgttatccattttgttatttatgaaagtataaaacaaaaactactggaatataagactgcttctacaatggaaaatgatgaagagtctgtgaaagaagcatcagattttgtgggaatgatgctagctgctgccacctcaaaaacttgtgccacaactatagcatatccacatgaagttgtaagaacaagactacgtgaagagggaacaaaatacagatctttttttcagactctatctttgcttgttcaagaagaaggttatgggtctctttatcgtggtctgacaactcatctagtgagacagattccaaacacagccattatgatggccacctatgaattggtggtttacctactcaatggatagcagcacgaggactgctgtactgcaaaaaaagaagaccaaaagattacagtggaccatgggatacagaagccagcatggcagacagaagaaaaatagtttgggaacatgtaactattctaagtggaagttttgttgtaggaattatagtaatcacaccacattacttggcctttcggtaatgtgaaaaaaaaaaaaaaacctcagagcctccaaggaaatgcctttagaagcactcctctctcaaaattgccattttctctaccatgtcccccagacacagttgggttttgttgatttatggcagtcttctaaacaaagccatccttaattttacatactgtattgtaactatccaaagatagtattggcagtcataaatttataacttctggcctttgtttaattccagtaaaataacagcaatgacaatgagatcgtcagtattattttcacatttccctgagaggacctggcacaatattttaaatttaattatttggcagtagtcactgtttttgacaaccaatgaaatagcgtctaaatatcttgtatattttttagcatcaaaatgttttggtttccactgctgacaggtgcttgttgtttagcctaatgtggatatttaaattgttaacataccaaacacacatggtaatagtttgggacaaaataactagtaaaatgttgatttctcggctatttcactgactgcggcatgtcctcgtgtcttctctgattttgtggtacatgaatgaatgcatttatctttttagtgacttactagttacgaacttgaattatcacctctttgtcatacttaagtatcatttacataaagtgtaaaagattttttcacttttgaatctttacctacttgctttcacattaagaatttgaacttttgagttttttccaggtctatatataatagattacatttattttgtaaagaaaatagtaatttaaagttttgccattttaaggtgacaatatttgggacagtataaatattatagacaagggcccccttgctgtctgctttagcaggtagtgacattaattgacttatagttttgtgtaaatgaacaaactgcttttgacaagaaatttattctgtcctagtttcctgcgtggtaaatcatagaaagattcaagttcatttgggttaaatgtgctaataggatgtagcttttaaattctgctattgagtcagctgtaccttttaatactttaaatgtgttatttgtatggcccttataaaggtgtttgctgtaattctgttaaaagacttcgcctatgccatactggtgtataaaaactgccgcaattggacgccggtgtggtactcatttcagtatacctgaactgtacattttgtgcaatggctttatctaaaagaatgacgcttcgtgaaagcactttgtggccttttttgggggggagggtgagagagtaggagagaataccatgttaagattaaaaaaaaaaacaaaaacattggtcatgtattaggcagaaacagtgttcataacatttttctgggttttaaatatgttgtttcggatatccttaatataaatgttttaggtattctgtgtaccctgtcgtacccccaacattatagaatattgcagtgtgtcattgcaagctttctctgctgtcaccagtgaaacatagtgccctgttaaattcccccactttaacttccttgtgatcaacagtaactggatgtttttgaggtgctcaattggaataaaaatattccaatctatttggagaccaaaggcaaaatcagttttcttacctttggaattattcgtaccttttatggtaaatttcagctttgacatgtattatgaggaacgtaccaaaaaccggtttgtaacaaatctgtagagaaggtctgaatctatcgtgtttgccttttcaggtgccatttctactgcctaatacagtgccatttgccttgtgaagacccataaacattcattgtgttgaatgtaagatagagactctccctagtcttactgatctcagtaccccacaaatgattaagaatgatatgaaaaccagcagctaaggaacatcttattatttagttgtagcatattcataacaagtgtccttcaaggataaacatatattctctatttgtatttagcaagtaaaacttgtgttgacctttagtgcattatattcagcttttaacagtattatgtatgtactggaaagcaaagaaatcttagagtcttggacattgtttatttgtgcaacaactagaaaggagcaatgaagtttatttcagttgtatttttccctaagcacaatctgcaatagtttatgtatgacagagataattcaaaaaggaaaactatatataaaagttgtatataaagtttgtctctgaaatatttctttgaagtttttaaaaaattgactcatgtttaaaaacaaaaacacatattcagagcattggacttttttaacttgttttcatctgtttatcatgacttttttatttctggtgtagagtccacattatttagtttgttgtacttttaaatttcaaagttcaaatctgaagaattagcgtttgtgatttcgggataccatgcagtggttttaatcccaggaaaaaaactatcaacaaaagttcgtttgattctcattatgtaactttgtagaaccatcctttctagatgggtccaccacagtgaatttgtaactttgaagtcaggatagaatatcattagattatctgtgagatagcattactatgttaggaccagcagagtttgggttggtaaaaataatgtttgctctattactgggttacagacatttcagcatttttaggttggttttaaatcactaaaaatatttattcggatttgaaggatttaagtgctaaaaatcaatccatttcttgcccttcaataattgtccatgcctgcctttgttgtttacatgctcttctgcccagactgttagtaatctagggaccccctttggagctgataagtacagttcagccttttctcctcaaatatataatgactttaacattcctaagaatataggtatttctgaatgatttaaatttgaggaattttaatacataaaatacaatgtacaaactttctgcccactcagatctcttctccatcatgtacttagtatttcccattaacctacacactgatttttatgctactccttgtagaaacaaaattctggtttgactcagtttttgtgtttataaacttttggaatgtgtaccccgtttatgtgaagaattatgacctatcagtcatagctaaatagtgaacctcaaaagtgttaacttttgactattcatgtgaggtttggtatcttgcatttatgtacatggctgtaaattatgtgcatttactctgtatttatgttatctagctgacttttacttgaattgttcaaattttaaaaattaaaatacgctcatgaaaaaaaaaaaaaaaaaaaattgggggcgggccgaagattttcacactctctgggggggcccagaaggaaatgtatgcagacgggcacaagggggtcccaaaaacgggcgcgctgcaaccagtggtctgtctcgactcccccgccgggaggggaa

SEQ ID NO: 16512 - DNA, 3749 bp, Homo sapiens
  misc_feature (17)..(17): n is a, c, g, or t
attggccttaagcctgnctgcccaccctccaaaaacttgtgccacaacttataggcatatcccaccatgaagttgtaagaacaagactacgtgaagagggaacaaaatacagatctttttttcagactctatctttgcttgttcaagaagaaggttatgggtctctttatcgtggtctgacaactcatctagtgagacagattccaaacacagccattatgatggccacctatgaattggtggtttacctactcaatggatagcagcacgaggactgctgtactgcaaaaaaagaagaccaaaagattacagtggaccatgggatacagaagccagcatggcagacagaagaaaaatagtttgggaacatgtaactattctaagtggaagttttgttgtaggaattatagtaatcacaccacattacttggcctttcggtaatgtgaaaaaaaaaaaaaaacctcagagcctccaaggaaatgcctttagaagcactcctctctcaaaattgccattttctctaccatgtcccccagacacagttgggttttgttgatttatggcagtcttctaaacaaagccatccttaattttacatactgtattgtaactatccaaagatagtattggcagtcataaatttataacttctggcctttgtttaattccagtaaaataacagcaatgacaatgagatcgtcagtattattttcacatttccctgagaggacctggcacaatattttaaatttaattatttggcagtagtcactgtttttgacaaccaatgaaatagcgtctaaatatcttgtatattttttagcatcaaaatgttttggtttccactgctgacaggtgcttgttgtttagcctaatgtggatatttaaattgttaacataccaaacacacatggtaatagtttgggacaaaataactagtaaaatgttgatttctcggctatttcactgactgcggcatgtcctcgtgtcttctctgattttgtggtacatgaatgaatgcatttatctttttagtgacttactagttacgaacttgaattatcacctctttgtcatacttaagtatcatttacataaagtgtaaaagattttttcacttttgaatctttacctacttgctttcacattaagaatttgaacttttgagttttttccaggtctatatataatagattacatttattttgtaaagaaaatagtaatttaaagttttgccattttaaggtgacaatatttgggacagtataaatattatagacaagggcccccttgctgtctgctttagcaggtagtgacattaattgacttatagttttgtgtaaatgaacaaactgcttttgacaagaaatttattctgtcctagtttcctgcgtggtaaatcatagaaagattcaagttcatttgggttaaatgtgctaataggatgtagcttttaaattctgctattgagtcagctgtaccttttaatactttaaatgtgttatttgtatggcccttataaaggtgtttgctgtaattctgttaaaagacttcgcctatgccatactggtgtataaaaactgccgcaattggacgccggtgtggtactcatttcagtatacctgaactgtacattttgtgcaatggctttatctaaaagaatgacgcttcgtgaaagcactttgtggccttttttgggggggagggtgagagagtaggagagaataccatgttaagattaaaaaaaaaaacaaaaacattggtcatgtattaggcagaaacagtgttcataacatttttctgggttttaaatatgttgtttcggatatccttaatataaatgttttaggtattctgtgtaccctgtcgtacccccaacattatagaatattgcagtgtgtcattgcaagctttctctgctgtcaccagtgaaacatagtgccctgttaaattcccccactttaacttccttgtgatcaacagtaactggatgtttttgaggtgctcaattggaataaaaatattccaatctatttggagaccaaaggcaaaatcagttttcttacctttggaattattcgtaccttttatggtaaatttcagctttgacatgtattatgaggaacgtaccaaaaaccggtttgtaacaaatctgtagagaaggtctgaatctatcgtgtttgccttttcaggtgccatttctactgcctaatacagtgccatttgccttgtgaagacccataaacattcattgtgttgaatgtaagatagagactctccctagtcttactgatctcagtaccccacaaatgattaagaatgatatgaaaaccagcagctaaggaacatcttattatttagttgtagcatattcataacaagtgtccttcaaggataaacatatattctctatttgtatttagcaagtaaaacttgtgttgacctttagtgcattatattcagcttttaacagtattatgtatgtactggaaagcaaagaaatcttagagtcttggacattgtttatttgtgcaacaactagaaaggagcaatgaagtttatttcagttgtatttttccctaagcacaatctgcaatagtttatgtatgacagagataattcaaaaaggaaaactatatataaaagttgtatataaagtttgtctctgaaatatttctttgaagtttttaaaaaattgactcatgtttaaaaacaaaaacacatattcagagcattggacttttttaacttgttttcatctgtttatcatgacttttttatttctggtgtagagtccacattatttagtttgttgtacttttaaatttcaaagttcaaatctgaagaattagcgtttgtgatttcgggataccatgcagtggttttaatcccaggaaaaaaactatcaacaaaagttcgtttgattctcattatgtaactttgtagaaccatcctttctagatgggtccaccacagtgaatttgtaactttgaagtcaggatagaatatcattagattatctgtgagatagcattactatgttaggaccagcagagtttgggttggtaaaaataatgtttgctctattactgggttacagacatttcagcatttttaggttggttttaaatcactaaaaatatttattcggatttgaaggatttaagtgctaaaaatcaatccatttcttgcccttcaataattgtccatgcctgcctttgttgtttacatgctcttctgcccagactgttagtaatctagggaccccctttggagctgataagtacagttcagccttttctcctcaaatatataatgactttaacattcctaagaatataggtatttctgaatgatttaaatttgaggaattttaatacataaaatacaatgtacaaactttctgcccactcagatctcttctccatcatgtacttagtatttcccattaacctacacactgatttttatgctactccttgtagaaacaaaattctggtttgactcagtttttgtgtttataaacttttggaatgtgtaccccgtttatgtgaagaattatgacctatcagtcatagctaaatagtgaacctcaaaagtgttaacttttgactattcatgtgaggtttggtatcttgcatttatgtacatggctgtaaattatgtgcatttactctgtatttatgttatctagctgacttttacttgaattgttcaaattttaaaaattaaaatacgctcatgaaaa

SEQ ID NO: 16513 - DNA, 3788 bp, Homo sapiens
  misc_feature (4)..(5): n is a, c, g, or t
agcnnggtgaagggcggcgcgcttaggcaggcggtggcgcggctggagtgccgcggggagggctgtgccggttgctttctgcagccgcatctcggccagctctcctcgccgtccccggggcgctgtgcgtctccagtccgggaccgaagccgcctgccgtagcgggcggccagatccgcgtcccgcctcagcggccggaggacatgcgggagagagaatgagccagagggacacgctggtgcatctgtttgccggaggatgtggtggtacagtgggagctattctgacatgtccactggaagttgtaaaaacacgactgcagtcatcttctgtgacgctttatatttctgaagttcagctgaacaccatggctggagccagtgtcaaccgagtagtgtctcccggacctcttcattgcctaaaggtgatcttggaaaaagaagggcctcgttccttgtttagaggactaggccccaatttagtgggggtagccccttccagagcaatatactttgctgcttattcaaactgcaaggaaaagttgaatgatgtatttgatcctgattctacccaagtacatatgatttcagctgcaatggcaggttttactgcaatcacagcaaccaaccccatttggcttataaagactcggttacagcttgatgcaaggaaccgcggggaaaggcgaatgggtgcttttgaatgtgttcgtaaagtgtatcagacagatggactaaaaggattttataggggcatgtctgcttcatatgctggtatatcagagactgttatccattttgttatttatgaaagtataaaacaaaaactactggaatataagactgcttctacaatggaaaatgatgaagagtctgtgaaagaagcatcagattttgtgggaatgatgctagctgctgccacctcaaaaacttgtgccacaactatagcatatccacatgaagttgtaagaacaagactacgtgaagagggaacaaaatacagatctttttttcagactctatctttgcttgttcaagaagaaggttatgggtctctttatcgtggtctgacaactcatctagtgagacagattccaaacacagccattatgatggccacctatgaattggtggtttacctactcaatggatagcagcacgaggactgctgtactgcaaaaaaagaagaccaaaagattacagtggaccatgggatacagaagccagcatggcagacagaagaaaaatagtttgggaacatgtaactattctaagtggaagttttgttgtaggaattatagtaatcacaccacattacttggcctttcggtaatgtgaaaaaaaaaaaaaaacctcagagcctccaaggaaatgcctttagaagcactcctctctcaaaattgccattttctctaccatgtcccccagacacagttgggttttgttgatttatggcagtcttctaaacaaagccatccttaattttacatactgtattgtaactatccaaagatagtattggcagtcataaatttataacttctggcctttgtttaattccagtaaaataacagcaatgacaatgagatcgtcagtattattttcacatttccctgagaggacctggcacaatattttaaatttaattatttggcagtagtcactgtttttgacaaccaatgaaatagcgtctaaatatcttgtatattttttagcatcaaaatgttttggtttccactgctgacaggtgcttgttgtttagcctaatgtggatatttaaattgttaacataccaaacacacatggtaatagtttgggacaaaataactagtaaaatgttgatttctcggctatttcactgactgcggcatgtcctcgtgtcttctctgattttgtggtacatgaatgaatgcatttatctttttagtgacttactagttacgaacttgaattatcacctctttgtcatacttaagtatcatttacataaagtgtaaaagattttttcacttttgaatctttacctacttgctttcacattaagaatttgaacttttgagttttttccaggtctatatataatagattacatttattttgtaaagaaaatagtaatttaaagttttgccattttaaggtgacaatatttgggacagtataaatattatagacaagggcccccttgctgtctgctttagcaggtagtgacattaattgacttatagttttgtgtaaatgaacaaactgcttttgacaagaaatttattctgtcctagtttcctgcgtggtaaatcatagaaagattcaagttcatttgggttaaatgtgctaataggatgtagcttttaaattctgctattgagtcagctgtaccttttaatactttaaatgtgttatttgtatggcccttataaaggtgtttgctgtaattctgttaaaagacttcgcctatgccatactggtgtataaaaactgccgcaattggacgccggtgtggtactcatttcagtatacctgaactgtacattttgtgcaatggctttatctaaaagaatgacgcttcgtgaaagcactttgtggccttttttgggggggagggtgagagagtaggagagaataccatgttaagattaaaaaaaaaaacaaaaacattggtcatgtattaggcagaaacagtgttcataacatttttctgggttttaaatatgttgtttcggatatccttaatataaatgttttaggtattctgtgtaccctgtcgtacccccaacattatagaatattgcagtgtgtcattgcaagctttctctgctgtcaccagtgaaacatagtgccctgttaaattcccccactttaacttccttgtgatcaacagtaactggatgtttttgaggtgctcaattggaataaaaatattccaatctatttggagaccaaaggcaaaatcagttttcttacctttggaattattcgtaccttttatggtaaatttcagctttgacatgtattatgaggaacgtaccaaaaaccggtttgtaacaaatctgtagagaaggtctgaatctatcgtgtttgccttttcaggtgccatttctactgcctaatacagtgccatttgccttgtgaagacccataaacattcattgtgttgaatgtaagatagagactctccctagtcttactgatctcagtaccccacaaatgattaagaatgatatgaaaaccagcagctaaggaacatcttattatttagttgtagcatattcataacaagtgtccttcaaggataaacatatattctctatttgtatttagcaagtaaaacttgtgttgacctttagtgcattatattcagcttttaacagtattatgtatgtactggaaagcaaagaaatcttagagtcttggacattgtttatttgtgcaacaactagaaaggagcaatgaagtttatttcagttgtatttttccctaagcacaatctgcaatagtttatgtatgacagagataattcaaaaaggaaaactatatataaaagttgtatataaagtttgtctctgaaatatttctttgaagtttttaaaaaattgactcatgtttaaaaacaaaaacacatattcagagcattggacttttttaacttgttttcatctgtttatcatgacttttttatttctggtgtagagtccacattatttagtttgttgtacttttaaatttcaaagttcaaatctgaagtataaagctgaggtgcgtagcgacgccgcgggaagtatagctgaggacttg

SEQ ID NO: 16514 - DNA, 3048 bp, Homo sapiens
ggtaatgggcatatcgtgaccaggcgtcgacctggcacaatattttaaatttaattatttggcagtagtcactgtttttgacaaccaatgaaatagcgtctaaatatcttgtatattttttagcatcaaaatgttttggtttccactgctgacaggtgcttgttgtttagcctaatgtggatatttaaattgttaacataccaaacacacatggtaatagtttgggacaaaataactagtaaaatgttgatttctcggctatttcactgactgcggcatgtcctcgtgtcttctctgattttgtggtacatgaatgaatgcatttatctttttagtgacttactagttacgaacttgaattatcacctctttgtcatacttaagtatcatttacataaagtgtaaaagattttttcacttttgaatctttacctacttgctttcacattaagaatttgaacttttgagttttttccaggtctatatataatagattacatttattttgtaaagaaaatagtaatttaaagttttgccattttaaggtgacaatatttgggacagtataaatattatagacaagggcccccttgctgtctgctttagcaggtagtgacattaattgacttatagttttgtgtaaatgaacaaactgcttttgacaagaaatttattctgtcctagtttcctgcgtggtaaatcatagaaagattcaagttcatttgggttaaatgtgctaataggatgtagcttttaaattctgctattgagtcagctgtaccttttaatactttaaatgtgttatttgtatggcccttataaaggtgtttgctgtaattctgttaaaagacttcgcctatgccatactggtgtataaaaactgccgcaattggacgccggtgtggtactcatttcagtatacctgaactgtacattttgtgcaatggctttatctaaaagaatgacgcttcgtgaaagcactttgtggccttttttgggggggagggtgagagagtaggagagaataccatgttaagattaaaaaaaaaaacaaaaacattggtcatgtattaggcagaaacagtgttcataacatttttctgggttttaaatatgttgtttcggatatccttaatataaatgttttaggtattctgtgtaccctgtcgtacccccaacattatagaatattgcagtgtgtcattgcaagctttctctgctgtcaccagtgaaacatagtgccctgttaaattcccccactttaacttccttgtgatcaacagtaactggatgtttttgaggtgctcaattggaataaaaatattccaatctatttggagaccaaaggcaaaatcagttttcttacctttggaattattcgtaccttttatggtaaatttcagctttgacatgtattatgaggaacgtaccaaaaaccggtttgtaacaaatctgtagagaaggtctgaatctatcgtgtttgccttttcaggtgccatttctactgcctaatacagtgccatttgccttgtgaagacccataaacattcattgtgttgaatgtaagatagagactctccctagtcttactgatctcagtaccccacaaatgattaagaatgatatgaaaaccagcagctaaggaacatcttattatttagttgtagcatattcataacaagtgtccttcaaggataaacatatattctctatttgtatttagcaagtaaaacttgtgttgacctttagtgcattatattcagcttttaacagtattatgtatgtactggaaagcaaagaaatcttagagtcttggacattgtttatttgtgcaacaactagaaaggagcaatgaagtttatttcagttgtatttttccctaagcacaatctgcaatagtttatgtatgacagagataattcaaaaaggaaaactatatataaaagttgtatataaagtttgtctctgaaatatttctttgaagtttttaaaaaattgactcatgtttaaaaacaaaaacacatattcagagcattggacttttttaacttgttttcatctgtttatcatgacttttttatttctggtgtagagtccacattatttagtttgttgtacttttaaatttcaaagttcaaatctgaagaattagcgtttgtgatttcgggataccatgcagtggttttaatcccaggaaaaaaactatcaacaaaagttcgtttgattctcattatgtaactttgtagaaccatcctttctagatgggtccaccacagtgaatttgtaactttgaagtcaggatagaatatcattagattatctgtgagatagcattactatgttaggaccagcagagtttgggttggtaaaaataatgtttgctctattactgggttacagacatttcagcatttttaggttggttttaaatcactaaaaatatttattcggatttgaaggatttaagtgctaaaaatcaatccatttcttgcccttcaataattgtccatgcctgcctttgttgtttacatgctcttctgcccagactgttagtaatctagggaccccctttggagctgataagtacagttcagccttttctcctcaaatatataatgactttaacattcctaagaatataggtatttctgaatgatttaaatttgaggaattttaatacataaaatacaatgtacaaactttctgcccactcagatctcttctccatcatgtacttagtatttcccattaacctacacactgatttttatgctactccttgtagaaacaaaattctggtttgactcagtttttgtgtttataaacttttggaatgtgtaccccgtttatgtgaagaattatgacctatcagtcatagctaaatagtgaacctcaaaagtgttaacttttgactattcatgtgaggtttggtatcttgcatttatgtacatggctgtaaattatgtgcatttactctgtatttatgttatctagctgacttttacttgaattgttcaaattttaaaaattaaaatacgctcatgaaaa

SEQ ID NO: 16515 - DNA, 2772 bp, Homo sapiens
  misc_feature (4)..(5): n is a, c, g, or t
  misc_feature (2732)..(2732): n is a, c, g, or t
agcnnggtgaagggcggcgcgcttaggcaggcggtggcgcggctggagtgccgcggggagggctgtgccggttgctttctgcagccgcatctcggccagctctcctcgccgtccccggggcgctgtgcgtctccagtccgggaccgaagccgcctgccgtagcgggcggccagatccgcgtcccgcctcagcggccggaggacatgcgggagagagaatgagccagagggacacgctggtgcatctgtttgccggaggatgtggtggtacagtgggagctattctgacatgtccactggaagttgtaaaaacacgactgcagtcatcttctgtgacgctttatatttctgaagttcagctgaacaccatggctggagccagtgtcaaccgagtagtgtctcccggacctcttcattgcctaaaggtgatcttggaaaaagaagggcctcgttccttgtttagaggactaggccccaatttagtgggggtagccccttccagagcaatatactttgctgcttattcaaactgcaaggaaaagttgaatgatgtatttgatcctgattctacccaagtacatatgatttcagctgcaatggcaggttttactgcaatcacagcaaccaaccccatttggcttataaagactcggttacagcttgatgcaaggaaccgcggggaaaggcgaatgggtgcttttgaatgtgttcgtaaagtgtatcagacagatggactaaaaggattttataggggcatgtctgcttcatatgctggtatatcagagactgttatccattttgttatttatgaaagtataaaacaaaaactactggaatataagactgcttctacaatggaaaatgatgaagagtctgtgaaagaagcatcagattttgtgggaatgatgctagctgctgccacctcaaaaacttgtgccacaactatagcatatccacatgaagttgtaagaacaagactacgtgaagagggaacaaaatacagatctttttttcagactctatctttgcttgttcaagaagaaggttatgggtctctttatcgtggtctgacaactcatctagtgagacagattccaaacacagccattatgatggccacctatgaattggtggtttacctactcaatggatagcagcacgaggactgctgtactgcaaaaaaagaagaccaaaagattacagtggaccatgggatacagaagccagcatggcagacagaagaaaaatagtttgggaacatgtaactattctaagtggaagttttgttgtaggaattatagtaatcacaccacattacttggcctttcggtaatgtgaaaaaaaaaaaaaaacctcagagcctccaaggaaatgcctttagaagcactcctctctcaaaattgccattttctctaccatgtcccccagacacagttgggttttgttgatttatggcagtcttctaaacaaagccatccttaattttacatactgtattgtaactatccaaagatagtattggcagtcataaatttataacttctggcctttgtttaattccagtaaaataacagcaatgacaatgagatcgtcagtattattttcacatttccctgagaggacctggcacaatattttaaatttaattatttggcagtagtcactgtttttgacaaccaatgaaatagcgtctaaatatcttgtatattttttagcatcaaaatgttttggtttccactgctgacaggtgcttgttgtttagcctaatgtggatatttaaattgttaacataccaaacacacatggtaatagtttgggacaaaataactagtaaaatgttgatttctcggctatttcactgactgcggcatgtcctcgtgtcttctctgattttgtggtacatgaatgaatgcatttatctttttagtgacttactagttacgaacttgaattatcacctctttgtcatacttaagtatcatttacataaagtgtaaaagattttttcacttttgaatctttacctacttgctttcacattaagaatttgaacttttgagttttttccaggtctatatataatagattacatttattttgtaaagaaaatagtaatttaaagttttgccattttaaggtgacaatatttgggacagtataaatattatagacaagggcccccttgctgtctgctttagcaggtagtgacattaattgacttatagttttgtgtaaatgaacaaactgcttttgacaagaaatttattctgtcctagtttcctgcgtggtaaatcatagaaagattcaagttcatttgggttaaatgtgctaataggatgtagcttttaaattctgctattgagtcagctgtaccttttaatactttaaatgtgttatttgtatggcccttataaaggtgtttgctgtaattctgttaaaagacttcgcctatgccatactggtgtataaaaactgccgcaattggacgccggtgtggtactcatttcagtatacctgaactgtacattttgtgcaatggctttatctaaaagaatgacgcttcgtgaaagcactttgtggccttttttgggggggagggtgactctctttaccccccaaagttctacataaacaccccccacccccccttgctaagctaaaatgcgaaacctctaatacaacaacccagcggcctgcccagcctttccccgcccaccctaactgttttctatntgggctctttttttcgttgtcttacatacccacaccatat

SEQ ID NO: 16516 - DNA, 2711 bp, Homo sapiens
  misc_feature (4)..(5): n is a, c, g, or t
agcnnggtgaagggcggcgcgcttaggcaggcggtggcgcggctggagtgccgcggggagggctgtgccggttgctttctgcagccgcatctcggccagctctcctcgccgtccccggggcgctgtgcgtctccagtccgggaccgaagccgcctgccgtagcgggcggccagatccgcgtcccgcctcagcggccggaggacatgcgggagagagaatgagccagagggacacgctggtgcatctgtttgccggaggatgtggtggtacagtgggagctattctgacatgtccactggaagttgtaaaaacacgactgcagtcatcttctgtgacgctttatatttctgaagttcagctgaacaccatggctggagccagtgtcaaccgagtagtgtctcccggacctcttcattgcctaaaggtgatcttggaaaaagaagggcctcgttccttgtttagaggactaggccccaatttagtgggggtagccccttccagagcaatatactttgctgcttattcaaactgcaaggaaaagttgaatgatgtatttgatcctgattctacccaagtacatatgatttcagctgcaatggcaggttttactgcaatcacagcaaccaaccccatttggcttataaagactcggttacagcttgatgcaaggaaccgcggggaaaggcgaatgggtgcttttgaatgtgttcgtaaagtgtatcagacagatggactaaaaggattttataggggcatgtctgcttcatatgctggtatatcagagactgttatccattttgttatttatgaaagtataaaacaaaaactactggaatataagactgcttctacaatggaaaatgatgaagagtctgtgaaagaagcatcagattttgtgggaatgatgctagctgctgccacctcaaaaacttgtgccacaactatagcatatccacatgaagttgtaagaacaagactacgtgaagagggaacaaaatacagatctttttttcagactctatctttgcttgttcaagaagaaggttatgggtctctttatcgtggtctgacaactcatctagtgagacagattccaaacacagccattatgatggccacctatgaattggtggtttacctactcaatggatagcagcacgaggactgctgtactgcaaaaaaagaagaccaaaagattacagtggaccatgggatacagaagccagcatggcagacagaagaaaaatagtttgggaacatgtaactattctaagtggaagttttgttgtaggaattatagtaatcacaccacattacttggcctttcggtaatgtgaaaaaaaaaaaaaaacctcagagcctccaaggaaatgcctttagaagcactcctctctcaaaattgccattttctctaccatgtcccccagacacagttgggttttgttgatttatggcagtcttctaaacaaagccatccttaattttacatactgtattgtaactatccaaagatagtattggcagtcataaatttataacttctggcctttgtttaattccagtaaaataacagcaatgacaatgagatcgtcagtattattttcacatttccctgagaggacctggcacaatattttaaatttaattatttggcagtagtcactgtttttgacaaccaatgaaatagcgtctaaatatcttgtatattttttagcatcaaaatgttttggtttccactgctgacaggtgcttgttgtttagcctaatgtggatatttaaattgttaacataccaaacacacatggtaatagtttgggacaaaataactagtaaaatgttgatttctcggctatttcactgactgcggcatgtcctcgtgtcttctctgattttgtggtacatgaatgaatgcatttatctttttagtgacttactagttacgaacttgaattatcacctctttgtcatacttaagtatcatttacataaagtgtaaaagattttttcacttttgaatctttacctacttgctttcacattaagaatttgaacttttgagttttttccaggtctatatataatagattacatttattttgtaaagaaaatagtaatttaaagttttgccattttaaggtgacaatatttgggacagtataaatattatagacaagggcccccttgctgtctgctttagcaggtagtgacattaattgacttatagttttgtgtaaatgaacaaactgcttttgacaagaaatttattctgtcctagtttcctgcgtggtaaatcatagaaagattcaagttcatttgggttaaatgtgctaataggatgtagcttttaaattctgctattgagtcagctgtaccttttaatactttaaatgtgttatttgtatggcccttataaaggtgtttgctgtaattctgttaaaagacttcgcctatgccatactggtgtataaaaactgccgcaattggacgccggtgtggtactcatttcagtatacctgaactgtacattttgtgcaatggctttatctaaaagaatgacgcttcgtgaaagcactttgtggccttttttgggggggagggtgaatcaaaaaaatttgaccttctatgttcatattaaaatttctttctggcctgtggtttccatttttaagagaaaaataatttttggctaagtattcatgtaaaactggaca

SEQ ID NO: 16517 - DNA, 1986 bp, Homo sapiens
  misc_feature (4)..(5): n is a, c, g, or t
  misc_feature (1893)..(1893): n is a, c, g, or t
agcnnggtgaagggcggcgcgcttaggcaggcggtggcgcggctggagtgccgcggggagggctgtgccggttgctttctgcagccgcatctcggccagctctcctcgccgtccccggggcgctgtgcgtctccagtccgggaccgaagccgcctgccgtagcgggcggccagatccgcgtcccgcctcagcggccggaggacatgcgggagagagaatgagccagagggacacgctggtgcatctgtttgccggaggatgtggtggtacagtgggagctattctgacatgtccactggaagttgtaaaaacacgactgcagtcatcttctgtgacgctttatatttctgaagttcagctgaacaccatggctggagccagtgtcaaccgagtagtgtctcccggacctcttcattgcctaaaggtgatcttggaaaaagaagggcctcgttccttgtttagaggactaggccccaatttagtgggggtagccccttccagagcaatatactttgctgcttattcaaactgcaaggaaaagttgaatgatgtatttgatcctgattctacccaagtacatatgatttcagctgcaatggcaggttttactgcaatcacagcaaccaaccccatttggcttataaagactcggttacagcttgatgcaaggaaccgcggggaaaggcgaatgggtgcttttgaatgtgttcgtaaagtgtatcagacagatggactaaaaggattttataggggcatgtctgcttcatatgctggtatatcagagactgttatccattttgttatttatgaaagtataaaacaaaaactactggaatataagactgcttctacaatggaaaatgatgaagagtctgtgaaagaagcatcagattttgtgggaatgatgctagctgctgccacctcaaaaacttgtgccacaactatagcatatccacatgaagttgtaagaacaagactacgtgaagagggaacaaaatacagatctttttttcagactctatctttgcttgttcaagaagaaggttatgggtctctttatcgtggtctgacaactcatctagtgagacagattccaaacacagccattatgatggccacctatgaattggtggtttacctactcaatggatagcagcacgaggactgctgtactgcaaaaaaagaagaccaaaagattacagtggaccatgggatacagaagccagcatggcagacagaagaaaaatagtttgggaacatgtaactattctaagtggaagttttgttgtaggaattatagtaatcacaccacattacttggcctttcggtaatgtgaaaaaaaaaaaaaaacctcagagcctccaaggaaatgcctttagaagcactcctctctcaaaattgccattttctctaccatgtcccccagacacagttgggttttgttgatttatggcagtcttctaaacaaagccatccttaattttacatactgtattgtaactatccaaagatagtattggcagtcataaatttataacttctggcctttgtttaattccagtaaaataacagcaatgacaatgagatcgtcagtattattttcacatttccctgagaggacctggcacaatattttaaatttaattatttggcagtagtcactgtttttgacaaccaatgaaatagcgtctaaatatcttgtatattttttagcatcaaaatgttttggtttccactgctgacaggtgcttgttgtttagcctaatgtggatatttaaattgttaacataccaaacacacatggtaatagtttgggacaaaataactagtaaaatgttgatttctcggctatttcactgactgctgtactgcaaaaaaagaagaccaaaagnttacagtggaccatggggatacagaagccagcatggcagacagaaggaaaattagtttggggaccatgtaacttattctaagtgggagttttt

SEQ ID NO: 16518 - DNA, 1022 bp, Homo sapiens
  misc_feature (4)..(5): n is a, c, g, or t
agcnnggtgaagggcggcgcgcttaggcaggcggtggcgcggctggagtgccgcggggagggctgtgccggttgctttctgcagccgcatctcggccagctctcctcgccgtccccggggcgctgtgcgtctccagtccgggaccgaagccgcctgccgtagcgggcggccagatccgcgtcccgcctcagcggccggaggacatgcgggagagagaatgagccagagggacacgctggtgcatctgtttgccggaggatgtggtggtacagtgggagctattctgacatgtccactggaagttgtaaaaacacgactgcagtcatcttctgtgacgctttatatttctgaagttcagctgaacaccatggctggagccagtgtcaaccgagtagtgtctcccggacctcttcattgcctaaaggtgatcttggaaaaagaagggcctcgttccttgtttagaggactaggccccaatttagtgggggtagccccttccagagcaatatactttgctgcttattcaaactgcaaggaaaagttgaatgatgtatttgatcctgattctacccaagtacatatgatttcagctgcaatggcaggttttactgcaatcacagcaaccaaccccatttggcttataaagactcggttacagcttgatgcaaggaaccgcggggaaaggcgaatgggtgcttttgaatgtgttcgtaaagtgtatcagacagatggactaaaaggattttataggggcatgtctgcttcatatgctggtatatcagagactgttatccattttgttatttatgaaagtataaaacaaaaactactggaatataagactgcttctacaatggaaaatgatgaagagtctgtgaaagaagcatcagattttgtgggaatgatgctagctgctgccacctcaaaaacttgtgccacaactatagcatatccacatgaagttgtaaggacaagactacgtgtcagccattgacgggtcctctaagatctcaccaggttca

SEQ ID NO: 16519 - DNA, 3507 bp, Homo sapiens
  misc_feature (4)..(5): n is a, c, g, or t
  misc_feature (1953)..(1953): n is a, c, g, or t
  misc_feature (2143)..(2143): n is a, c, g, or t
agcnnggtgaagggcggcgcgcttaggcaggcggtggcgcggctggagtgccgcggggagggctgtgccggttgctttctgcagccgcatctcggccagctctcctcgccgtccccggggcgctgtgcgtctccagtccgggaccgaagccgcctgccgtagcgggcggccagatccgcgtcccgcctcagcggccggaggacatgcgggagagagaatgagccagagggacacgctggtgcatctgtttgccggaggatgtggtggtacagtgggagctattctgacatgtccactggaagttgtaaaaacacgactgcagtcatcttctgtgacgctttatatttctgaagttcagctgaacaccatggctggagccagtgtcaaccgagtagtgtctcccggacctcttcattgcctaaaagcaatatactttgctgcttattcaaactgcaaggaaaagttgaatgatgtatttgatcctgattctacccaagtacatatgatttcagctgcaatggcaggtatgaatgtataatattaaaaaaaaaaaaaactttctgaaacctagaggcttaatattgaattataagtttgtagtgaaaagttgatgattaatgtgcttttcattgattagatgatttttacgtttatcgatataaaccaaattaggtatatgtaaaatctgtcatcagttgacatttttgtagtcaggagtttacatgctagggtacaagtaatatatttatattgccttgtgtagtccactgaatgtttagtgatcattgttaacagttttaagaatccaaccataattacactataaataagttatggagctgtaatttactcttctctcctcaatttctgttagtgccttttccctttttgctgcatgttttggcttctgtctgaaatgtgtcggcaattcttggtaaagtattcattttgtcctgtgctcaaatgctgaaatttttgtgagtgatgtattattattgacaattcagttactatgtgtattttttaaaattgtttattattctacataattcacactagacagcacctgaaatttagacactggctatgtgtacatgcttactatagaaatgtttccaggaactctctgtttctgtcatcactgataagtatatatgattctgaattaaaataactagttttaggtctttaccctgccataaagataaacagttggtttgaccaatctggttctggaatcatttgctgctatgcatgttagacaaagccacgaactttgattttccattgaaaattctccctaatatctgagatttattgtatatttactcatatctcacattttcaaattatgctgtaactttataaactgtagctgctttcatcagctattgatcaataaattgaatgtcaattatgtgcttaataatgagtgccttaaactgttaaacacttttggtttagaaataaagtgaatcaatttgacctatatacttcatgaagtaagtaagtttgaaatacaaatttctgaaaggtcaatagcccttatcgtattacaaattgtttttaaggctttttgtatttattaattgtcagttgattcactgaagctttaaaactggaagggacaatccaaaggtcaaaagagtgaaatacaatcatttaccaataaggaaaccttgggcaaattatgtaatttatgtgaacctctcttagcttacccatggaatgagtcaagtggtctacatagatttggattttgagaattagttctttcatttagtgttatagagattatcttgttacaactagaattatttttaatgtaatttttacagatgttgaatattagtagataggatttttcccctacgaatttggatgtaaggtaaaggttggtggccagtgacaaaccttataaccactttatcaggttctttaaaaatatatttntgaattaccagtgattatgtttttggcttataacctcagataattataaagaaatgttaatcttatttgaaagaattggaatctagaaagttagatgagcagtcattttatattgatatttgttatatcagtatagcaaatgcagaggttcagaatatctttatttccactggaacatcttatttcattngagtatctcatcagaatttattactgtatttgtatcacattgcaaagaatttcagtagaattgtcagtttgcacttttttctcaaatgtgtacaaatgttaacatatagttcatttttatctgtacattgatgccatttcccaacttgaattcctcaagttttggtaaacttacaatctcatacttgttcagaggttattgcactgtacacttactgtgtagaaaatactgtttgaatttgtttgcagttacattgttctgagaactgtgctctcagagcttctgtgcactattcatgagcattaacacttagccttgcagttttatacataactatatggttagtaaaactgaatggtccaatgcagactcattaaagtaggcttttgccccctttgttcttgaaataatctagaccagattactcggggttttttttaggattatttttataggtctaaatatgaatgatttgggggtatgaagtacttaaagatagttctgtgaaaaatcattttcagctgtctattcaagggaaaaaatgctaaccttgtcactttactacacaaaaccacactaaaataaaccattaatgatactgcctgcaagattttaacacaccagatagcacacacattaaggatttataaggcactgtacgtaatttttattccaagtgacctctcaattcattttcattttgcattttatccatatgaactcatgtttaatttagataataaaaatttattttattaaaaggacagtttatttaaagtgggtctttttatttgttgtagtgcatactataagaatttgtaagcctctaaagttgagctataaattttcatgcattaaaaatttgtttcagttgtgaggatatttaatcagattaaataatgttgactcttaatattttgcctgccttttttttctcctacacatgacctttgacagactaagtatatctcagctattgagggtatctgttttgttgcctgtatattttgtttaaattaacttgtatattcctttgtatacacctaggcacagatgtatgcaaaaaaaatttgttaaattacttctttctttatactaattctcaatttttaaaagattttatctggcatgtatatacttttatatagaacattataaatgtaaaggaaatgaattctaattttaattggattatgtattcatacagttattctcaatttttaaaatactaataatgtaatcattgaatgtttcctacatacgtagtgggttttatttgctcacagcatacagttatttttcaatttatgtttttctattagacttaaatttcattataataaaggcttttactcattaaatac

SEQ ID NO: 16520 - DNA, 1109 bp, Homo sapiens
  misc_feature (4)..(5): n is a, c, g, or t
agcnnggtgaagggcggcgcgcttaggcaggcggtggcgcggctggagtgccgcggggagggctgtgccggttgctttctgcagccgcatctcggccagctctcctcgccgtccccggggcgctgtgcgtctccagtccgggaccgaagccgcctgccgtagcgggcggccagatccgcgtcccgcctcagcggccggaggacatgcgggagagagaatgagccagagggacacgctggtgcatctgtttgccggaggatgtggtggtacagtgggagctattctgacatgtccactggaagttgtaaaaacacgactgcagtcatcttctgtgacgctttatatttctgaagttcagctgaacaccatggctggagccagtgtcaaccgagtagtgtctcccggacctcttcattgcctaaaggtgatcttggaaaaagaagggcctcgttccttgtttagaggactaggccccaatttagtgggggtagccccttccagagcaatatactttgctgcttattcaaactgcaaggaaaagttgaatgatgtatttgatcctgattctacccaagtacatatgatttcagctgcaatggcagaacacaagaaattaaatacaaaataatgcaaaatatttcataagtatggatgtgcaatattactggccatagtgcaaaaggtgaaaggttttactgcaatcacagcaaccaaccccatttggcttataaagactcggttacagcttgatgcaaggaaccgcggggaaaggcgaatgggtgcttttgaatgtgttcgtaaagtgtatcagacagatggactaaaaggattttataggggcatgtctgcttcatatgctggtatatcagagactgttatccattttgttatttatgaaagtataaaacaaaaactactggaatataagactgcttctacaatggaaaatgatgaagagtctgtgaaagaagcatcagattttgtgggaatgatgctagctgctgccacctcaaaaacttgtgccacaactatagcatatccacatgaagttgtaaggacaagactacgtgtcagccattgacgggtcctctaagatctcaccaggttca

SEQ ID NO: 16521 - DNA, 3412 bp, Homo sapiens
  misc_feature (1858)..(1858): n is a, c, g, or t
  misc_feature (2048)..(2048): n is a, c, g, or t
gtttttatttttttttaatttcattttttctttttatcttcttggttaccaagttttagtgagttaagtggctgtcagagtattggaagggggtctgtttgaggatgaatggtaggaattttacatttgatgttgtcttattttaatgagtcaatacagaaagtacttcagagtatttatgaaaagtgtaaatctaatgttacatgagaatgtggctaggactttatggtttttaaatttctccattctaaaattatgaagatcaatttatatgtaaatcttacgcattaagaacatgcttattgataaatctaaatctctattttagagcaatatactttgctgcttattcaaactgcaaggaaaagttgaatgatgtatttgatcctgattctacccaagtacatatgatttcagctgcaatggcaggtatgaatgtataatattaaaaaaaaaaaaaactttctgaaacctagaggcttaatattgaattataagtttgtagtgaaaagttgatgattaatgtgcttttcattgattagatgatttttacgtttatcgatataaaccaaattaggtatatgtaaaatctgtcatcagttgacatttttgtagtcaggagtttacatgctagggtacaagtaatatatttatattgccttgtgtagtccactgaatgtttagtgatcattgttaacagttttaagaatccaaccataattacactataaataagttatggagctgtaatttactcttctctcctcaatttctgttagtgccttttccctttttgctgcatgttttggcttctgtctgaaatgtgtcggcaattcttggtaaagtattcattttgtcctgtgctcaaatgctgaaatttttgtgagtgatgtattattattgacaattcagttactatgtgtattttttaaaattgtttattattctacataattcacactagacagcacctgaaatttagacactggctatgtgtacatgcttactatagaaatgtttccaggaactctctgtttctgtcatcactgataagtatatatgattctgaattaaaataactagttttaggtctttaccctgccataaagataaacagttggtttgaccaatctggttctggaatcatttgctgctatgcatgttagacaaagccacgaactttgattttccattgaaaattctccctaatatctgagatttattgtatatttactcatatctcacattttcaaattatgctgtaactttataaactgtagctgctttcatcagctattgatcaataaattgaatgtcaattatgtgcttaataatgagtgccttaaactgttaaacacttttggtttagaaataaagtgaatcaatttgacctatatacttcatgaagtaagtaagtttgaaatacaaatttctgaaaggtcaatagcccttatcgtattacaaattgtttttaaggctttttgtatttattaattgtcagttgattcactgaagctttaaaactggaagggacaatccaaaggtcaaaagagtgaaatacaatcatttaccaataaggaaaccttgggcaaattatgtaatttatgtgaacctctcttagcttacccatggaatgagtcaagtggtctacatagatttggattttgagaattagttctttcatttagtgttatagagattatcttgttacaactagaattatttttaatgtaatttttacagatgttgaatattagtagataggatttttcccctacgaatttggatgtaaggtaaaggttggtggccagtgacaaaccttataaccactttatcaggttctttaaaaatatatttntgaattaccagtgattatgtttttggcttataacctcagataattataaagaaatgttaatcttatttgaaagaattggaatctagaaagttagatgagcagtcattttatattgatatttgttatatcagtatagcaaatgcagaggttcagaatatctttatttccactggaacatcttatttcattngagtatctcatcagaatttattactgtatttgtatcacattgcaaagaatttcagtagaattgtcagtttgcacttttttctcaaatgtgtacaaatgttaacatatagttcatttttatctgtacattgatgccatttcccaacttgaattcctcaagttttggtaaacttacaatctcatacttgttcagaggttattgcactgtacacttactgtgtagaaaatactgtttgaatttgtttgcagttacattgttctgagaactgtgctctcagagcttctgtgcactattcatgagcattaacacttagccttgcagttttatacataactatatggttagtaaaactgaatggtccaatgcagactcattaaagtaggcttttgccccctttgttcttgaaataatctagaccagattactcggggttttttttaggattatttttataggtctaaatatgaatgatttgggggtatgaagtacttaaagatagttctgtgaaaaatcattttcagctgtctattcaagggaaaaaatgctaaccttgtcactttactacacaaaaccacactaaaataaaccattaatgatactgcctgcaagattttaacacaccagatagcacacacattaaggatttataaggcactgtacgtaatttttattccaagtgacctctcaattcattttcattttgcattttatccatatgaactcatgtttaatttagataataaaaatttattttattaaaaggacagtttatttaaagtgggtctttttatttgttgtagtgcatactataagaatttgtaagcctctaaagttgagctataaattttcatgcattaaaaatttgtttcagttgtgaggatatttaatcagattaaataatgttgactcttaatattttgcctgccttttttttctcctacacatgacctttgacagactaagtatatctcagctattgagggtatctgttttgttgcctgtatattttgtttaaattaacttgtatattcctttgtatacacctaggcacagatgtatgcaaaaaaaatttgttaaattacttctttctttatactaattctcaatttttaaaagattttatctggcatgtatatacttttatatagaacattataaatgtaaaggaaatgaattctaattttaattggattatgtattcatacagttattctcaatttttaaaatactaataatgtaatcattgaatgtttcctacatacgtagtgggttttatttgctcacagcatacagttatttttcaatttatgtttttctattagacttaaatttcattataataaaggcttttactcattaaatac

SEQ ID NO: 16522 - DNA, 851 bp, Homo sapiens
atccttaattaaattattccccccccccccttgattacccggacgccgctggacctggccgcacgccgcaatctagcaggcgtcggggatccagggccgctttgaggagcctggcttcggatttcgcgtaggttgcatggcccaaggggacggggcggaaagtgcggaggctgaggacaaaatgggcgccggagactcctttagccctcgctccttgcagcgctcgcttgggcctctgcacgtcactcacgccccacctcggacctcgggccgctcatttccgggctcggctttgcaagatgtggtggtacagtgggagctattctgacatgtccactggaagttgtaaaaacacgactgcagtcatcttctgtgacgctttatatttctgaagttcagctgaacaccatggctggagccagtgtcaaccgagtagtgtctcccggacctcttcattgcctaaaggtgatcttggaaaaagaagggcctcgttccttgtttagaggactaggccccaatttagtgggggtagccccttccagagcaatatacactatgtacagactctgcgaatcagtccgctcggcgggcagcgtcctcgccaggtccaggcgccttggccggggaggagggggcaccagtagggaagggcgggctggtccaacaccttcttggcactcgaggagggcgggggaggaagtgccgatggcacctcccgatacaaaacatggagagaattctttaaataacggcacgaaactgagactgtcccccgaggaacctccgtgggcctcgggctgggggaggaccgcagtgcagtctctgcagtgaccgtaggcggtaccgaccga

SEQ ID NO: 16523 - DNA, 1142 bp, Homo sapiens
atccttaattaaattattccccccccccccttgattacccggacgccgctggacctggccgcacgccgcaatctagcaggcgtcggggatccagggccgctttgaggagcctggcttcggatttcgcgtaggttgcatggcccaaggggacggggcggaaagtgcggaggctgaggacaaaatgggcgccggagactcctttagccctcgctccttgcagcgctcgcttgggcctctgcacgtcactcacgccccacctcggacctcgggccgctcatttccgggctcggctttgcaagatgtggtggtacagtgggagctattctgacatgtccactggaagttgtaaaaacacgactgcagtcatcttctgtgacgctttatatttctgaagttcagctgaacaccatggctggagccagtgtcaaccgagtagtgtctcccggacctcttcattgcctaaagtgagagcatagtattcaggagtgttttttagtttgtttgcgttagtgagttccagatgtttgtttacttatattctgccacattgaaaatgattttttataaacctatttacagaagttactctgaattgtactcataaggaatgataatccctaatggagaagaacagttagacagataagataaagtgtaattttacttccaaatcatgtgtatttagaatatttctacatttatccagtggagttttttctaaagctattataagtattttattttggattattcatttacttttgaaatgtgataatgtttaatgctaactcctttcgtgtatatttttaatgttccaagtaagtacatccaattaatgataatctgtgatttttatgtaacctaagtacaactgagacagcagagttctaatgctgttcagtatttgtttaacatttcctgatggtttggaaaagatttgtttttacagtttgccatacttcattatgttgcaattggatttgaaatttcaaaactattaaaattaggtttcgtatgtttatacttgtaaataatggaatgccttcgtgtctgccttatcagctcagtgtttgaacttagttcagtagtgtttattttgtaatagcaaataaactcattctgtgtatttacctttgttacta

SEQ ID NO: 16524 - DNA, 328 bp, Homo sapiens
gtgattctagaggatcccgttcactttctacacctacacactgatttttatgctactccttgtagaaacaaaattctggtttgactcagtttttgtgtttataaacttttggaatgtgtaccccgtttatgtgaagaattatgacctatcagtcatagctaaatagtgaacctcaaaagtgttaacttttgactattcatgtgaggtttggtatcttgcatttatgtacatggctgtaaattatgtgcatttactctgtatttatgttatctagctgacttttacttgaattgttcaaattttaaaaattaaaatacgctcatgaaaa

SEQ ID NO: 16525 - DNA, 308 bp, Homo sapiens
gatttttatgctactccttgtagaaacaaaattctggtttgactcagtttttgtgtttataaacttttggaatgtgtaccccgtttatgtgaagaattatgacctatcagtcatagctaaatagtgaacctcaaaagtgttaacttttgactattcatgtgaggtttggtatcttgcatttatgtacatggctgtaaattatgtgcatttactctgtatttatgttatctagctgacttttacttgaattgttcaaattttaaaaattaaaatacgctcatgaaaatatggctttttctgtaatatat

SEQ ID NO: 16526 - DNA, 92 bp, Homo sapiens
ccatgctttatgtagcgacttgtttttgttttagaattactaatagaagggcgtttttaaagttcttaaattaaacattagcatattaagcc

SEQ ID NO: 16527 - DNA, 303 bp, Homo sapiens
ccaatcagacatgagttacctggagtacttctgatgatagttctccactcctgagtgggaaaaacaggaggaatggactctccttcctccagacatgttcatatttaaataagatgcctgaactactaccaccatcttttaagcaacccaaatatgaaattaacacatggaagagaacagaaccaataaaatctcagagaagttagagacattgtataccaagcttaatgcctgcattacccatgaaagttatgtgaaacttattaaaagtgtatggatgatataagaaaagttgagttgatt

SEQ ID NO: 16528 - DNA, 1090 bp, Homo sapiens
cgccaacattgggaaacctagtaaaaagtggaaatcgagcgttttaaataaaaaaaaaaaaaggtttctactagcaagactgatcgtaggcgaacttctcaaggaattttggaatattgtgccaaagtgagaatatttaatatttccaaaagtagacttaactaggaatacttaaagcagagactattggaaatgctttaatttgggatttcaggaaagggcttgaagagaaatattttatatgagcaagcctcttggaataattgaatcaccttaattttgtcactgttacttcgaagagaacgagaagagagaagatgggaaacgaaaggagaaagggaaaagaaatggggtggaaagaaaaaagcagaagagatcgccctataccagtaggcctagtaccctaggattctggcctctttctcccacctttggtgtttaagattaaggacagtgcattcctgcttttagaaatttaaatttaagtttgaagacttaattttaattactgtagtaggtaaagcaaagtcgttaaatacttgacatcaggatcccattggagtattgatttaggtcttttcaaaggtggtggtcctggttctctgcaccagccactggcggaatggcggaatggtgtatctaccaatgaacagatggactgggtgggcctcgggtacgggtggcttgagatgcaaatgcaagggtaggaaggcaccttcccccccaccactcccagcccaccccgccaatcttaaaacattgatctttataaaattcgcaaacgtcccacaggatttcattggcttaagagtattgtcaaatgaagacgccaggaagtattgagtttctgggtacataatactgtcctgagtgttgaaggaagaggactaatacgagattttaaaaaatggctgtggacaaccatccttcaggtgtgatggcaggacatcttgtatcacctgaaacttccttttttcgccgctaggtggtgggtgtgagtcttttgcggcctttaagtttctacggtgtttggaggaaatacgtttcagtttcaaataaatgaacaacgtgtaactctaagatgagtaaa

SEQ ID NO: 16529 - DNA, 423 bp, Homo sapiens
aatagtctggacacaaggacagtgtgctttggattagaggacatggtaagaaggcggcaggatgtgtgggatttgctacaggattgaacttaaggagatgaacttttcaatgggggagttttatatgcaactaatggtgaacttaggtagaggatggggaatagtagcatttaaaagcaaagaacatacagctctgggttgattgcttcagctttgcaactatccactgataacttggctttaaccaagttatgctgtatcttcaaaattttcatttgtaaaatggtgttattaacatccacctttgggattgctgagagaattaagtgagaaaaactctgttaaagggtttaggacaatatccagcgacagcaaatgctcaataaatgtcataattatttttctttgtaaaactttagacgt

SEQ ID NO: 16530 - DNA, 451 bp, Homo sapiens
aagaagtacttgagaatctatttcagttgcaaaatagttaacaaaatttgatttgagtagttctgaccttgctgtgctttggactcccatttgacagccctgaaggttcgtcattctaatttactcctgcccaaatggtgattttgacagtttaatccaaagtcttttaaagcaatgtctattcataccactttacaatctttatctaatctttagtgttctgaagatttaatttgctgacatttctaatttatggtctaaattatttgagagttttttgagattgagattaagcagatctcatagcagaatgggtactacaggagaagtcatagtatttcagtttcagtgtcttttggtttctgttggcttcctttcgaatcaaggctttactaagagagattggctcttaggagctcattgcctttttaaagcccaataattatatgtg

SEQ ID NO: 16531 - DNA, 403 bp, Homo sapiens
cttttccaaacattgctagacacatagtctcataaagaataaagaactaaagagaaaaattcttaccagaaatgagtatagtaaaatccacttgcttgttagtctctgctgtggtagggttttaaaattcatttaaaacaaaaactgaaaattagtaaagttaacattctttatcttgttttatttcattatgccatttttatcatgaagtactattaaatttagtagcaaacaaattctgtcgtgcagatgagttatactagtattcactcaggaagcataaagtcttatttctcctgatttacatgatagaatgattaccagatcaaagagaagaaaagttcatcattaccatcaatctctgggctcatacgttactgggtatagacctctgcgtgtcata

SEQ ID NO: 16532 - DNA, 293 bp, Homo sapiens
gaataatacttgctaccataaaagcacacattaagctcatagcccatggacctataaagcaactatgcaatcaagactacaaagtagtatatagtattctatgacatgaaaaaatactactatatagtattctatgacatggaaaaaaacctgacatatcatattatccttgaacaaaaaacagcctatgtgctctaattaaaagacatgaggtggcaaactggatttaaaaaaatctaaccttctgccgtcttcaagagacctatctcacatgtaatgccactcacaggcaa

SEQ ID NO: 16533 - DNA, 1462 bp, Homo sapiens
acctcgagacggaagtgagcgacacactctgcgtcctcgcctcaccaggaaactactaaagttcctggggaagcaaagtagaatttcataagaacaaaatggatggagaggagaaaacctatggtggctgtgaaggacctgatgccatgtatgtcaaattgatatcatctgatggccatgaatttattgtaaaaagagaacatgcattaacatcaggcacgataaaagccatgttgagtggcccaggtcagtttgctgagaacgaaaccaatgaggtcaattttagagagataccttcacatgtgctatcgaaagtatgcatgtattttacgtacaaggttcgctacactaacagctccaccgagattcctgaattcccaattgcacctgaaattgcactggaactgctgatggctgcgaacttcttagattgttaaataaaataaattataataaactgttaactcttttcagtatttaatacctgtagttcagttagtaactttttcatatatagcatgttgcctgtatgcagttgaactatataaagttcattgcaaagcagattatcttgtttttttgcatagcaatcaaagttgaaatttgtttgctacatcaacaaattaaggacattttcacaaactgagaaataaacaaatatgccaattcgtaggtggttttgccttatcctttgaatgtgacttaaaatcagcaatgatgatatagtaaatactgaaatttaggtgtaaatcaatacgttctacagggaaataatgaggctaagtatttttatgtttttagtggttttttagaaacctaatcttatagccgccattagcattactagagttatgcaaataattgcattataaacatgtttataacttagccaaaacattgatttttataactctccaagtatgagttgaaatttcttatgtcttttgataaactgcagtattctttaagtgtactttgtccttttgtttattgctacaatttaagaactttatttaaaaacaattttggaaggttactaggtacagcttttgcagaagaaactgaactgtagccagatggtcagcaagtaaactacatgacttagagttcttgtgcattatacattttgggtaattcaaagtactgtatttgcattgactataaagcgtcgtttgcaatatttattcttccttcatagtcccttgttgtgattatacttccagttgtttaaatgtattttaaaagactcactattaactttattcagatcttaaaagctacacctttttgaactattccagtctttctccatccaattagaatgttatggaataacatgtgaagagatacagtgaaaatcatattataatgcattgaagatatcctacatgaattatcttctattaaaatatgtcccaataaatatacccataatcagtgggtcttctactgaaatcaagct

SEQ ID NO: 16534 - DNA, 459 bp, Homo sapiens
acctcgagacggaagtgagcgacacactctgcgtcctcgcctcaccaggaaactactaaagttcctggggaagcaaagtagaatttcataagaacaaaatggatggagaggagaaaacctatggtggctgtgaaggacctgatgccatgtatgtcaaattgatatcatctgatggccatgaatttattgtaaaaagagaacatgcattaacatcaggcacgataaaagccatgttgagtggcccaggtcagtttgctgagaacgaaaccaatgaggtcaattttagagagataccttcacatgtgctatcgaaagtatgcatgtattttacgtacaaggttcgctacactaacagctccaccgagattcctgaattcccaattgcacctgaaattgcactggaactgctgatggctgcgaacttcttagattgttaaataaaataaattataataaact

SEQ ID NO: 16535 - DNA, 870 bp, Homo sapiens
acctcgagacggaagtgagcgacacactctgcgtcctcgcctcaccaggaaactactaaagttcctggggaagcaaagtagaatttcataagaacaaaatggatggagaggagaaaacctatggtggctgtgaaggacctgatgccatgtatgtcaaattgatatcatctgatggccatgaatttattgtaaaaagagaacatgcattaacatcaggcacgataaaagccatgttgagtggcccaggtcagtttgctgagaacgaaaccaatgaggtcaattttagagagataccttcacatgtgctatcgaaagtatgcatgtattttacgtacaaggttcgctacactaacagctccaccgagattcctgaattcccaattgcacctgaaattgcactggaactgctgatggctgcgaacttcttagattgttaaataaaataaattataataaactgttaactcttttcagtatttaatacctgtagttcagttagtaactttttcatatatagcatgttgcctgtatgcagttgaactatataaagttcattgcaaagcagattatcttgtttttttgcatagcaatcaaagttgaaatttgtttgctacatcaacaaattaaggacattttcacaaactgagaaataaacaaatatgccaaatcgtagtggttgctatcttgatggcttaatcgcatgatgttagtaatctgaattgggacactcgtcaggaaggggcagttggtcgggtaacacatcttcgcctggttagtgaatgctaagtttccacaggttcaccgagggatttggcggccaaaaagggcgcaaaggcggagcagtcgcccgcatcctccttggcattacgt

SEQ ID NO: 16536 - DNA, 625 bp, Homo sapiens
caaccccataggctaggtacgaggctgggtgttagctcgcctacaggtacggatctcccgcgcgtcgccgaaagcggctctgacccagcggaagtaattctttcgactgccccggaacccaccggagcaggcagctgggggtgggggggcggccctgggataggggctgtggcagtacgcggggacccggctgcggtggctgcgggactgacgagaaactactaaagttcctggggaagcaaagtagaatttcataagaacaaaatggatggagaggagaaaacctatggtggctgtgaaggacctgatgccatgtatgtcaaattgatatcatctgatggccatgaatttattgtaaaaagagaacatgcattaacatcaggcacgataaaagccatgttgagtggcccaggtcagtttgctgagaacgaaaccaatgaggtcaattttagagagataccttcacatgtgctatcgaaagtatgcatgtattttacgtacaaggttcgctacactaacagctccaccgagattcctgaattcccaattgcacctgaaattgcactggaactgctgatggctgcgaacttcttagattgttaaataaaataaattataataaact

SEQ ID NO: 16537 - DNA, 448 bp, Homo sapiens
agatttggcacgagtcggcacgaggcgggactgacgagaaactactaaagttcctggggaagcaaagtagaatttcataagaacaaaatggatggagaggagaaaacctatggtggctgtgaaggacctgatgccatgtatgtcaaattgatatcatctgatggccatgaatttattgtaaaaagagaacatgcattaacatcaggcacgataaaagccatgttgagtggcccaggtcagtttgctgagaacgaaaccaatgaggtcaattttagagagataccttcacatgtgctatcgaaagtatgcatgtattttacgtacaaggttcgctacactaacagctccaccgagattcctgaattcccaattgcacctgaaattgcactggaactgctgatggctgcgaacttcttagattgttaaataaaataaattataataaact

SEQ ID NO: 16538 - DNA, 452 bp, Homo sapiens
cttaatttgaaataacagccttaaatcctttacaagatggagaaactactaaagttcctggggaagcaaagtagaatttcataagaacaaaatggatggagaggagaaaacctatggtggctgtgaaggacctgatgccatgtatgtcaaattgatatcatctgatggccatgaatttattgtaaaaagagaacatgcattaacatcaggcacgataaaagccatgttgagtggcccaggtcagtttgctgagaacgaaaccaatgaggtcaattttagagagataccttcacatgtgctatcgaaagtatgcatgtattttacgtacaaggttcgctacactaacagctccaccgagattcctgaattcccaattgcacctgaaattgcactggaactgctgatggctgcgaacttcttagattgttaaataaaataaattataataaact

SEQ ID NO: 16539 - DNA, 370 bp, Homo sapiens
tactactactaaattcgcggccgcgtctgatgccatgtatgtcaaattgatatcatctgatggccatgaatttattgtaaaaagagaacatgcattaacatcaggcacgataaaagccatgttgagtggcccaggtcagtttgctgagaacgaaaccaatgaggtcaattttagagagataccttcacatgtgctatcgaaagtatgcatgtattttacgtacaaggttcgctacactaacagctccaccgagattcctgaattcccaattgcacctgaaattgcactggaactgctgatggctgcgaacttcttagattgttaaataaaataaattataataaactaaaaaaagtcgacgcggccgcgc

SEQ ID NO: 16540 - DNA, 839 bp, Homo sapiens
ataaatcgaattcacacttgcgtgtacttatactacctgttcaaaccggtcagtttgctgagaacgaaaccaatgaggtcaattttagagagataccttcacatgtgctatcgaaagtatgcatgtattttacgtacaaggttcgctacactaacagctccaccgagattcctgaattcccaattgcacctgaaattgcactggaactgctgatggctgcgaacttcttagattgttaaataaaataaattataataaactaaaaaacacccaaccagaaacccctcccaaattccacaacatcaatatttttttttcccctccccccaaaacccatctatacccataatttacggaggtttcccccctaaaaggagtaaataaatacgtctataaaaaaacactagggtacatttcatttttctgtttttttcccccaacacccctttacagcttgtacaaagattgtttttcttttacaaccgaacgcattttctgttcactacttacatccacactatgtcttccatgtaacatttcacaaccattgtgtttcacccacctaccctaccaggtttgtgggcccccttttatttttcccgtttcaccaacatctccacattgtttatcgcgttcactcactcctctctacttccttagtttacacatttccggccaactacaatcctgccgtggtttctttagtatataatacatggtcgtcccctctttacacaaccttgacaatagaaatttcccactaccgcatttccccagtttataaagttgattgtcacattactacctcttcaattactcctgcactaccccccccatat

SEQ ID NO: 16541 - DNA, 893 bp, Homo sapiens
  misc_feature (526)..(526): n is a, c, g, or t
ttgaggaaagaaaggatatgtgtaagtaagcaagtatagtttcaggaagtgataaatgtgaaaaaaatatagcaaggttaagggttagagtgactgggatggggtgtctaattttggtaggatcatcagggaaggaagacctctctgaggagttgatgttttacctggagacctaaatgatgaggatttaaaagcttttcggacaacagcaattacaaatgcaaagaccttgaggtaagagtgaacttgaccgatttcgaggaataccaaaaaggccagtgtgactggagcatagtgaaggaagagtggtgggagacaagatcagagtggtaagtagggaagtaaatcaaatgtccagttgagacatggtagcttgaactagaagtgtggagttgaaagtgagtagtagtctgatttggaatgtaatttgaagctggagccaaatgggttttgctttcttcccaggaaccaaacgaacaaaaaaaaatgttttttgaataacgaatcacttttccaaagtgctggnataacaggcatgaaccacaaatctggccagctatggtcatatttatgtgttaatgcatttcagctaaactgctgtcctagattctttattgttgttattaagtaagagcagaaaaagcccatccagtaatgcctgaatttcaagcctcagcgattaggaacataatagtacagtcactcaagatatatttattgagcatctacctaatcgccaggcactattctaggcctgctgtcaagaaacttgaggaaagaaaggatatgtgtaagtaagcaagtatagtttcaggaagtgataaatgtgaaaaaaatatagcaaggttaagggttagagtgactgggatggggtgtctatttgcagtaccatc

SEQ ID NO: 16542 - DNA, 1628 bp, Homo sapiens
caaccccataggctaggtacgaggctgggtgttagctcgcctacaggtacggatctcccgcgcgtcgccgaaagcggctctgacccagcggaagtaattctttcgactgccccggaacccaccggagcaggcagctgggggtgggggggcggccctgggataggggctgtggcagtacgcggggacccggctgcggtggctgcgggactgacgagaaactactaaagttcctggggaagcaaagtagaatttcataagaacaaaatggatggagaggagaaaacctatggtggctgtgaaggacctgatgccatgtatgtcaaattgatatcatctgatggccatgaatttattgtaaaaagagaacatgcattaacatcaggcacgataaaagccatgttgagtggcccaggtcagtttgctgagaacgaaaccaatgaggtcaattttagagagataccttcacatgtgctatcgaaagtatgcatgtattttacgtacaaggttcgctacactaacagctccaccgagattcctgaattcccaattgcacctgaaattgcactggaactgctgatggctgcgaacttcttagattgttaaataaaataaattataataaactgttaactcttttcagtatttaatacctgtagttcagttagtaactttttcatatatagcatgttgcctgtatgcagttgaactatataaagttcattgcaaagcagattatcttgtttttttgcatagcaatcaaagttgaaatttgtttgctacatcaacaaattaaggacattttcacaaactgagaaataaacaaatatgccaattcgtaggtggttttgccttatcctttgaatgtgacttaaaatcagcaatgatgatatagtaaatactgaaatttaggtgtaaatcaatacgttctacagggaaataatgaggctaagtatttttatgtttttagtggttttttagaaacctaatcttatagccgccattagcattactagagttatgcaaataattgcattataaacatgtttataacttagccaaaacattgatttttataactctccaagtatgagttgaaatttcttatgtcttttgataaactgcagtattctttaagtgtactttgtccttttgtttattgctacaatttaagaactttatttaaaaacaattttggaaggttactaggtacagcttttgcagaagaaactgaactgtagccagatggtcagcaagtaaactacatgacttagagttcttgtgcattatacattttgggtaattcaaagtactgtatttgcattgactataaagcgtcgtttgcaatatttattcttccttcatagtcccttgttgtgattatacttccagttgtttaaatgtattttaaaagactcactattaactttattcagatcttaaaagctacacctttttgaactattccagtctttctccatccaattagaatgttatggaataacatgtgaagagatacagtgaaaatcatattataatgcattgaagatatcctacatgaattatcttctattaaaatatgtcccaataaatatacccataatcagtgggtcttctactgaaatcaagct

SEQ ID NO: 16543 - DNA, 1767 bp, Homo sapiens
caaccccataggctaggtacgaggctgggtgttagctcgcctacaggtacggatctcccgcgcgtcgccgaaagcggctctgacccagcggaagtaattctttcgactgccccggaacccaccggagcaggcagctgggggtgggggggcggccctgggataggggctgtggcagtacgcggggacccggctgcggtggctgcgggactgacgaagtcttgctgtgtggcccaggctggagtgcccggctggtctcaaattcctgacctcaagtgatctccctcccaaagtgttgcgattgcaggtgtgagccactgcacctggctgctgagaaatctttgcctacagtgagggaaactactaaagttcctggggaagcaaagtagaatttcataagaacaaaatggatggagaggagaaaacctatggtggctgtgaaggacctgatgccatgtatgtcaaattgatatcatctgatggccatgaatttattgtaaaaagagaacatgcattaacatcaggcacgataaaagccatgttgagtggcccaggtcagtttgctgagaacgaaaccaatgaggtcaattttagagagataccttcacatgtgctatcgaaagtatgcatgtattttacgtacaaggttcgctacactaacagctccaccgagattcctgaattcccaattgcacctgaaattgcactggaactgctgatggctgcgaacttcttagattgttaaataaaataaattataataaactgttaactcttttcagtatttaatacctgtagttcagttagtaactttttcatatatagcatgttgcctgtatgcagttgaactatataaagttcattgcaaagcagattatcttgtttttttgcatagcaatcaaagttgaaatttgtttgctacatcaacaaattaaggacattttcacaaactgagaaataaacaaatatgccaattcgtaggtggttttgccttatcctttgaatgtgacttaaaatcagcaatgatgatatagtaaatactgaaatttaggtgtaaatcaatacgttctacagggaaataatgaggctaagtatttttatgtttttagtggttttttagaaacctaatcttatagccgccattagcattactagagttatgcaaataattgcattataaacatgtttataacttagccaaaacattgatttttataactctccaagtatgagttgaaatttcttatgtcttttgataaactgcagtattctttaagtgtactttgtccttttgtttattgctacaatttaagaactttatttaaaaacaattttggaaggttactaggtacagcttttgcagaagaaactgaactgtagccagatggtcagcaagtaaactacatgacttagagttcttgtgcattatacattttgggtaattcaaagtactgtatttgcattgactataaagcgtcgtttgcaatatttattcttccttcatagtcccttgttgtgattatacttccagttgtttaaatgtattttaaaagactcactattaactttattcagatcttaaaagctacacctttttgaactattccagtctttctccatccaattagaatgttatggaataacatgtgaagagatacagtgaaaatcatattataatgcattgaagatatcctacatgaattatcttctattaaaatatgtcccaataaatatacccataatcagtgggtcttctactgaaatcaagct

SEQ ID NO: 16544 - DNA, 1601 bp, Homo sapiens
acctcgagacggaagtgagcgacacactctgcgtcctcgcctcaccagagtcttgctgtgtggcccaggctggagtgcccggctggtctcaaattcctgacctcaagtgatctccctcccaaagtgttgcgattgcaggtgtgagccactgcacctggctgctgagaaatctttgcctacagtgagggaaactactaaagttcctggggaagcaaagtagaatttcataagaacaaaatggatggagaggagaaaacctatggtggctgtgaaggacctgatgccatgtatgtcaaattgatatcatctgatggccatgaatttattgtaaaaagagaacatgcattaacatcaggcacgataaaagccatgttgagtggcccaggtcagtttgctgagaacgaaaccaatgaggtcaattttagagagataccttcacatgtgctatcgaaagtatgcatgtattttacgtacaaggttcgctacactaacagctccaccgagattcctgaattcccaattgcacctgaaattgcactggaactgctgatggctgcgaacttcttagattgttaaataaaataaattataataaactgttaactcttttcagtatttaatacctgtagttcagttagtaactttttcatatatagcatgttgcctgtatgcagttgaactatataaagttcattgcaaagcagattatcttgtttttttgcatagcaatcaaagttgaaatttgtttgctacatcaacaaattaaggacattttcacaaactgagaaataaacaaatatgccaattcgtaggtggttttgccttatcctttgaatgtgacttaaaatcagcaatgatgatatagtaaatactgaaatttaggtgtaaatcaatacgttctacagggaaataatgaggctaagtatttttatgtttttagtggttttttagaaacctaatcttatagccgccattagcattactagagttatgcaaataattgcattataaacatgtttataacttagccaaaacattgatttttataactctccaagtatgagttgaaatttcttatgtcttttgataaactgcagtattctttaagtgtactttgtccttttgtttattgctacaatttaagaactttatttaaaaacaattttggaaggttactaggtacagcttttgcagaagaaactgaactgtagccagatggtcagcaagtaaactacatgacttagagttcttgtgcattatacattttgggtaattcaaagtactgtatttgcattgactataaagcgtcgtttgcaatatttattcttccttcatagtcccttgttgtgattatacttccagttgtttaaatgtattttaaaagactcactattaactttattcagatcttaaaagctacacctttttgaactattccagtctttctccatccaattagaatgttatggaataacatgtgaagagatacagtgaaaatcatattataatgcattgaagatatcctacatgaattatcttctattaaaatatgtcccaataaatatacccataatcagtgggtcttctactgaaatcaagct

SEQ ID NO: 16545 - DNA, 1742 bp, Homo sapiens
caaccccataggctaggtacgaggctgggtgttagctcgcctacaggtacggatctcccgcgcgtcgccgaaagcggctctgacccagcggaagtaattctttcgactgccccggaacccaccggagcaggcagctgggggtgggggggcggccctgggataggggctgtggcagtacgcggggacccggctgcggtggctgcgggactgacgagatcatcagggaaggaagacctctctgaggagttgatgttttacctggagacctaaatgatgaggatttaaaagcttttcggacaacagcaattacaaatgcaaagaccttgaggaaactactaaagttcctggggaagcaaagtagaatttcataagaacaaaatggatggagaggagaaaacctatggtggctgtgaaggacctgatgccatgtatgtcaaattgatatcatctgatggccatgaatttattgtaaaaagagaacatgcattaacatcaggcacgataaaagccatgttgagtggcccaggtcagtttgctgagaacgaaaccaatgaggtcaattttagagagataccttcacatgtgctatcgaaagtatgcatgtattttacgtacaaggttcgctacactaacagctccaccgagattcctgaattcccaattgcacctgaaattgcactggaactgctgatggctgcgaacttcttagattgttaaataaaataaattataataaactgttaactcttttcagtatttaatacctgtagttcagttagtaactttttcatatatagcatgttgcctgtatgcagttgaactatataaagttcattgcaaagcagattatcttgtttttttgcatagcaatcaaagttgaaatttgtttgctacatcaacaaattaaggacattttcacaaactgagaaataaacaaatatgccaattcgtaggtggttttgccttatcctttgaatgtgacttaaaatcagcaatgatgatatagtaaatactgaaatttaggtgtaaatcaatacgttctacagggaaataatgaggctaagtatttttatgtttttagtggttttttagaaacctaatcttatagccgccattagcattactagagttatgcaaataattgcattataaacatgtttataacttagccaaaacattgatttttataactctccaagtatgagttgaaatttcttatgtcttttgataaactgcagtattctttaagtgtactttgtccttttgtttattgctacaatttaagaactttatttaaaaacaattttggaaggttactaggtacagcttttgcagaagaaactgaactgtagccagatggtcagcaagtaaactacatgacttagagttcttgtgcattatacattttgggtaattcaaagtactgtatttgcattgactataaagcgtcgtttgcaatatttattcttccttcatagtcccttgttgtgattatacttccagttgtttaaatgtattttaaaagactcactattaactttattcagatcttaaaagctacacctttttgaactattccagtctttctccatccaattagaatgttatggaataacatgtgaagagatacagtgaaaatcatattataatgcattgaagatatcctacatgaattatcttctattaaaatatgtcccaataaatatacccataatcagtgggtcttctactgaaatcaagct

SEQ ID NO: 16546 - DNA, 1663 bp, Homo sapiens
caaccccataggctaggtacgaggctgggtgttagctcgcctacaggtacggatctcccgcgcgtcgccgaaagcggctctgacccagcggaagtaattctttcgactgccccggaacccaccggagcaggcagctgggggtgggggggcggccctgggataggggctgtggcagtacgcggggacccggctgcggtggctgcgggactgacgagtgagtctcgggctggggcggaaacggagctccgggaaactactaaagttcctggggaagcaaagtagaatttcataagaacaaaatggatggagaggagaaaacctatggtggctgtgaaggacctgatgccatgtatgtcaaattgatatcatctgatggccatgaatttattgtaaaaagagaacatgcattaacatcaggcacgataaaagccatgttgagtggcccaggtcagtttgctgagaacgaaaccaatgaggtcaattttagagagataccttcacatgtgctatcgaaagtatgcatgtattttacgtacaaggttcgctacactaacagctccaccgagattcctgaattcccaattgcacctgaaattgcactggaactgctgatggctgcgaacttcttagattgttaaataaaataaattataataaactgttaactcttttcagtatttaatacctgtagttcagttagtaactttttcatatatagcatgttgcctgtatgcagttgaactatataaagttcattgcaaagcagattatcttgtttttttgcatagcaatcaaagttgaaatttgtttgctacatcaacaaattaaggacattttcacaaactgagaaataaacaaatatgccaattcgtaggtggttttgccttatcctttgaatgtgacttaaaatcagcaatgatgatatagtaaatactgaaatttaggtgtaaatcaatacgttctacagggaaataatgaggctaagtatttttatgtttttagtggttttttagaaacctaatcttatagccgccattagcattactagagttatgcaaataattgcattataaacatgtttataacttagccaaaacattgatttttataactctccaagtatgagttgaaatttcttatgtcttttgataaactgcagtattctttaagtgtactttgtccttttgtttattgctacaatttaagaactttatttaaaaacaattttggaaggttactaggtacagcttttgcagaagaaactgaactgtagccagatggtcagcaagtaaactacatgacttagagttcttgtgcattatacattttgggtaattcaaagtactgtatttgcattgactataaagcgtcgtttgcaatatttattcttccttcatagtcccttgttgtgattatacttccagttgtttaaatgtattttaaaagactcactattaactttattcagatcttaaaagctacacctttttgaactattccagtctttctccatccaattagaatgttatggaataacatgtgaagagatacagtgaaaatcatattataatgcattgaagatatcctacatgaattatcttctattaaaatatgtcccaataaatatacccataatcagtgggtcttctactgaaatcaagct

SEQ ID NO: 16547 - DNA, 1574 bp, Homo sapiens
caaccccataggctaggtacgaggctgggtgttagctcgcctacaggtacggatctcccgcgcgtcgccgaaagcggctctgacccagcggaagtaattctttcgactgccccggaacccaccggagcaggcagctgggggtgggggggcggccctgggataggggctgtggcagtacgcggggacccggctgcggtggctgcgggactgacgaatggagaggagaaaacctatggtggctgtgaaggacctgatgccatgtatgtcaaattgatatcatctgatggccatgaatttattgtaaaaagagaacatgcattaacatcaggcacgataaaagccatgttgagtggcccaggtcagtttgctgagaacgaaaccaatgaggtcaattttagagagataccttcacatgtgctatcgaaagtatgcatgtattttacgtacaaggttcgctacactaacagctccaccgagattcctgaattcccaattgcacctgaaattgcactggaactgctgatggctgcgaacttcttagattgttaaataaaataaattataataaactgttaactcttttcagtatttaatacctgtagttcagttagtaactttttcatatatagcatgttgcctgtatgcagttgaactatataaagttcattgcaaagcagattatcttgtttttttgcatagcaatcaaagttgaaatttgtttgctacatcaacaaattaaggacattttcacaaactgagaaataaacaaatatgccaattcgtaggtggttttgccttatcctttgaatgtgacttaaaatcagcaatgatgatatagtaaatactgaaatttaggtgtaaatcaatacgttctacagggaaataatgaggctaagtatttttatgtttttagtggttttttagaaacctaatcttatagccgccattagcattactagagttatgcaaataattgcattataaacatgtttataacttagccaaaacattgatttttataactctccaagtatgagttgaaatttcttatgtcttttgataaactgcagtattctttaagtgtactttgtccttttgtttattgctacaatttaagaactttatttaaaaacaattttggaaggttactaggtacagcttttgcagaagaaactgaactgtagccagatggtcagcaagtaaactacatgacttagagttcttgtgcattatacattttgggtaattcaaagtactgtatttgcattgactataaagcgtcgtttgcaatatttattcttccttcatagtcccttgttgtgattatacttccagttgtttaaatgtattttaaaagactcactattaactttattcagatcttaaaagctacacctttttgaactattccagtctttctccatccaattagaatgttatggaataacatgtgaagagatacagtgaaaatcatattataatgcattgaagatatcctacatgaattatcttctattaaaatatgtcccaataaatatacccataatcagtgggtcttctactgaaatcaagct

SEQ ID NO: 16548 - DNA, 1090 bp, Homo sapiens
  misc_feature (837)..(837): n is a, c, g, or t
caaccccataggctaggtacgaggctgggtgttagctcgcctacaggtacggatctcccgcgcgtcgccgaaagcggctctgacccagcggaagtaattctttcgactgccccggaacccaccggagcaggcagctgggggtgggggggcggccctgggataggggctgtggcagtacgcggggacccggctgcggtggctgcgggactgacgagaaactactaaagttcctggggaagcaaagtagaatttcataagaacaaaatggatggagaggagaaaacctatggtggctgtgaaggacctgatgccatgtatgtcaaattgatatcatctgatggccatgaatttattgtaaaaagagaacatgcattaacatcaggcacgataaaagccatgttgagtggcccaggtcagtttgctgagaacgaaaccaatgaggtcaattttagagagataccttcacatgtgctatcgaaagtatgcatgtattttacgtacaaggttcgctacactaacagctccaccgagattcctgaattcccaattgcacctgaaattgcactggaactgctgatggctgcgaacttcttagattgttaaataaaataaattataataaactgttaactcttttcagtatttaatacctgtagttcagttagtaactttttcatatatagcatgttgcctgtatgcagttgaactatataaagttcattgcaaagcagattatcttgtttttttgcatagcaatcaaagttgaaatttgtttgctacatcaacaaattaaggacattttcacaaactgagaaataaacaaatatgccaacatcnataacaccggtgtttatcgatgccactctcttaaggtagcccaccgtggactaggtgtttatcgatgccacagaaatctgggatatatgtttcttggggatcaccagaaaatgtgttggtgcttgaggggaaatgtcatggaaagcaaggcaccggtcatcctcaaaatgattttggctggtatttccctgcggatgatcttccccaagatcgtgtcgccacccggccgagcgacctgtgcatccgataaaca

SEQ ID NO: 16549 - DNA, 859 bp, Homo sapiens
caaccccataggctaggtacgaggctgggtgttagctcgcctacaggtacggatctcccgcgcgtcgccgaaagcggctctgacccagcggaagtaattctttcgactgccccggaacccaccggagcaggcagctgggggtgggggggcggccctgggataggggctgtggcagtacgcggggacccggctgcggtggctgcgggactgacgagaaactactaaagttcctggggaagcaaagtagaatttcataagaacaaaatggatggagaggagaaaacctatggtggctgtgaaggacctgatgccatgtatgtcaaattgatatcatctgatggccatgaatttattgtaaaaagagaacatgcattaacatcaggcacgataaaagccatgttgagtggcccaggtcagtttgctgagaacgaaaccaatgaggtcaattttagagagataccttcacatgtgctatcgaaagtatgcatgtattttacgtacaaggttcgctacactaacagctccaccgagattcctgaattcccaattgcacctgaaattgcactggaactgctgatggctgcgaacttcttagattgttaaataaaataaattataataaactgttaactcttttcagtatttaatacctgtagttcagttagtaactttttcatatatagcatgttgcctgtatgcagttgaactatataaagttcattgcaaagcagattatcttgtttttttgcatagcaatcaaagttgaaatttgtttgctacatcaacaaattaaggacattttcacaaactgagaaataaacaaatatgccaaaaaaaaaagaaaaaattctacagggct

SEQ ID NO: 16550 - DNA, 1886 bp, Homo sapiens
caaccccataggctaggtacgaggctgggtgttagctcgcctacaggtacggatctcccgcgcgtcgccgaaagcggctctgacccagcggaagtaattctttcgactgccccggaacccaccggagcaggcagctgggggtgggggggcggccctgggataggggctgtggcagtacgcggggacccggctgcggtggctgcgggactgacgaagtcttgctgtgtggcccaggctggagtgcccggctggtctcaaattcctgacctcaagtgatctccctcccaaagtgttgcgattgcaggtgtgagccactgcacctggctgctgagaaatctttgcctacagtgagggaaactactaaagttcctggggaagcaaagtagaatttcataagaacaaaatggatggagaggagaaaacctatggtggctgtgaaggacctgatgccatgtatgtcaaattgatatcatctgatggccatgaatttattgtaaaaagagaacatgcattaacatcaggcacgataaaagccatgttgagtggcccagagagacagagtctcattctgttgcccaggctggagtgcaatggtgcggtctcagctcactgcaatctccgcctgctgggttcaggcaattctcctgcctcagagtagctggaattacaggtcagtttgctgagaacgaaaccaatgaggtcaattttagagagataccttcacatgtgctatcgaaagtatgcatgtattttacgtacaaggttcgctacactaacagctccaccgagattcctgaattcccaattgcacctgaaattgcactggaactgctgatggctgcgaacttcttagattgttaaataaaataaattataataaactgttaactcttttcagtatttaatacctgtagttcagttagtaactttttcatatatagcatgttgcctgtatgcagttgaactatataaagttcattgcaaagcagattatcttgtttttttgcatagcaatcaaagttgaaatttgtttgctacatcaacaaattaaggacattttcacaaactgagaaataaacaaatatgccaattcgtaggtggttttgccttatcctttgaatgtgacttaaaatcagcaatgatgatatagtaaatactgaaatttaggtgtaaatcaatacgttctacagggaaataatgaggctaagtatttttatgtttttagtggttttttagaaacctaatcttatagccgccattagcattactagagttatgcaaataattgcattataaacatgtttataacttagccaaaacattgatttttataactctccaagtatgagttgaaatttcttatgtcttttgataaactgcagtattctttaagtgtactttgtccttttgtttattgctacaatttaagaactttatttaaaaacaattttggaaggttactaggtacagcttttgcagaagaaactgaactgtagccagatggtcagcaagtaaactacatgacttagagttcttgtgcattatacattttgggtaattcaaagtactgtatttgcattgactataaagcgtcgtttgcaatatttattcttccttcatagtcccttgttgtgattatacttccagttgtttaaatgtattttaaaagactcactattaactttattcagatcttaaaagctacacctttttgaactattccagtctttctccatccaattagaatgttatggaataacatgtgaagagatacagtgaaaatcatattataatgcattgaagatatcctacatgaattatcttctattaaaatatgtcccaataaatatacccataatcagtgggtcttctactgaaatcaagct

SEQ ID NO: 16551 - DNA, 805 bp, Homo sapiens
caaccccataggctaggtacgaggctgggtgttagctcgcctacaggtacggatctcccgcgcgtcgccgaaagcggctctgacccagcggaagtaattctttcgactgccccggaacccaccggagcaggcagctgggggtgggggggcggccctgggataggggctgtggcagtacgcggggacccggctgcggtggctgcgggactgacgaatggagaggagaaaacctatggtggctgtgaaggacctgatgccatgtatgtcaaattgatatcatctgatggccatgaatttattgtaaaaagagaacatgcattaacatcaggcacgataaaagccatgttgagtggcccaggtcagtttgctgagaacgaaaccaatgaggtcaattttagagagataccttcacatgtgctatcgaaagtatgcatgtattttacgtacaaggttcgctacactaacagctccaccgagattcctgaattcccaattgcacctgaaattgcactggaactgctgatggctgcgaacttcttagattgttaaataaaataaattataataaactgttaactcttttcagtatttaatacctgtagttcagttagtaactttttcatatatagcatgttgcctgtatgcagttgaactatataaagttcattgcaaagcagattatcttgtttttttgcatagcaatcaaagttgaaatttgtttgctacatcaacaaattaaggacattttcacaaactgagaaataaacaaatatgccaaaaaaaaaagaaaaaattctacagggct

SEQ ID NO: 16552 - DNA, 764 bp, Homo sapiens
caaccccataggctaggtacgaggctgggtgttagctcgcctacaggtacggatctcccgcgcgtcgccgaaagcggctctgacccagcggaagtaattctttcgactgccccggaacccaccggagcaggcagctgggggtgggggggcggccctgggataggggctgtggcagtacgcggggacccggctgcggtggctgcgggactgacgaagtcttgctgtgtggcccaggctggagtgcccggctggtctcaaattcctgacctcaagtgatctccctcccaaagtgttgcgattgcaggtgtgagccactgcacctggctgctgagaaatctttgcctacagtgagggaaactactaaagttcctggggaagcaaagtagaatttcataagaacaaaatggatggagaggagaaaacctatggtggctgtgaaggacctgatgccatgtatgtcaaattgatatcatctgatggccatgaatttattgtaaaaagagaacatgcattaacatcaggcacgataaaagccatgttgagtggcccaggtcagtttgctgagaacgaaaccaatgaggtcaattttagagagataccttcacatgtgctatcgaaagtatgcatgtattttacgtacaaggttcgctacactaacagctccaccgagattcctgaattcccaattgcacctgaaattgcactggaactgctgatggctgcgaacttcttagattgttaaataaaataaattataataaact

SEQ ID NO: 16553 - DNA, 739 bp, Homo sapiens
caaccccataggctaggtacgaggctgggtgttagctcgcctacaggtacggatctcccgcgcgtcgccgaaagcggctctgacccagcggaagtaattctttcgactgccccggaacccaccggagcaggcagctgggggtgggggggcggccctgggataggggctgtggcagtacgcggggacccggctgcggtggctgcgggactgacgagatcatcagggaaggaagacctctctgaggagttgatgttttacctggagacctaaatgatgaggatttaaaagcttttcggacaacagcaattacaaatgcaaagaccttgaggaaactactaaagttcctggggaagcaaagtagaatttcataagaacaaaatggatggagaggagaaaacctatggtggctgtgaaggacctgatgccatgtatgtcaaattgatatcatctgatggccatgaatttattgtaaaaagagaacatgcattaacatcaggcacgataaaagccatgttgagtggcccaggtcagtttgctgagaacgaaaccaatgaggtcaattttagagagataccttcacatgtgctatcgaaagtatgcatgtattttacgtacaaggttcgctacactaacagctccaccgagattcctgaattcccaattgcacctgaaattgcactggaactgctgatggctgcgaacttcttagattgttaaataaaataaattataataaact

SEQ ID NO: 16554 - DNA, 718 bp, Homo sapiens
caaccccataggctaggtacgaggctgggtgttagctcgcctacaggtacggatctcccgcgcgtcgccgaaagcggctctgacccagcggaagtaattctttcgactgccccggaacccaccggagcaggcagctgggggtgggggggcggccctgggataggggctgtggcagtacgcggggacccggctgcggtggctgcgggactgacgaagataggatctcactgtgttgtccaggctggtctcagtctcctgggttcaggcagtactcctgcctcagccatccaaagtgctgggattacaggaaactactaaagttcctggggaagcaaagtagaatttcataagaacaaaatggatggagaggagaaaacctatggtggctgtgaaggacctgatgccatgtatgtcaaattgatatcatctgatggccatgaatttattgtaaaaagagaacatgcattaacatcaggcacgataaaagccatgttgagtggcccaggtcagtttgctgagaacgaaaccaatgaggtcaattttagagagataccttcacatgtgctatcgaaagtatgcatgtattttacgtacaaggttcgctacactaacagctccaccgagattcctgaattcccaattgcacctgaaattgcactggaactgctgatggctgcgaacttcttagattgttaaataaaataaattataataaact

SEQ ID NO: 16555 - DNA, 1197 bp, Homo sapiens
atagggacaaaatcttgctctgtcaccaaggctggagtgcagtggctgcatcatagctaagtgcagcttcgagctcctgggctcaaaccatcctcccaccatagcctcccgagtagccggctcgtgccgaattcggcacgagctgatggctgcgaacttcttagattgttaaataaaataaattataataaactgttaactcttttcagtatttaatacctgtagttcagttagtaactttttcatatatagcatgttgcctgtatgcagttgaactatataaagttcattgcaaagcagattatcttgtttttttgcatagcaatcaaagttgaaatttgtttgctacatcaacaaattaaggacattttcacaaactgagaaataaacaaatatgccaattcgtaggtggttttgccttatcctttgaatgtgacttaaaatcagcaatgatgatatagtaaatactgaaatttaggtgtaaatcaatacgttctacagggaaataatgaggctaagtatttttatgtttttagtggttttttagaaacctaatcttatagccgccattagcattactagagttatgcaaataattgcattataaacatgtttataacttagccaaaacattgatttttataactctccaagtatgagttgaaatttcttatgtcttttgataaactgcagtattctttaagtgtactttgtccttttgtttattgctacaatttaagaactttatttaaaaacaattttggaaggttactaggtacagcttttgcagaagaaactgaactgtagccagatggtcagcaagtaaactacatgacttagagttcttgtgcattatacattttgggtaattcaaagtactgtatttgcattgactataaagcgtcgtttgcaatatttattcttccttcatagtcccttgttgtgattatacttccagttgtttaaatgtattttaaaagactcactattaactttattcagatcttaaaagctacacctttttgaactattccagtctttctccatccaattagaatgttatggaataacatgtgaagagatacagtgaaaatcatattataatgcattgaagatatcctacatgaattatcttctattaaaatatgtcccaataaatatacccataatcagtgggtcttctactgaaatcaagct

SEQ ID NO: 16556 - DNA, 1197 bp, Homo sapiens
caaccccataggctaggtacgaggctgggtgttagctcgcctacaggtacggatctcccgcgcgtcgccgaaagcggctctgacccagcggaagtaattctttcgactgccccggaacccaccggagcaggcagctgggggtgggggggcggccctgggataggggctgtggcagtacgcggggacccggctgcggtggctgcgggactgacgagaaactactaaagttcctggggaagcaaagtagaatttcataagaacaaaatggatggagaggagaaaacctatggtggctgtgaaggacctgatgccatgtatgtcaaattgatatcatctgatggccatgaatttattgtaaaaagagaacatgcattaacatcaggcacgataaaagccatgttgagtggcccaggtcagtttgctgagaacgaaaccaatgaggtcaattttagagagataccttcacatgtgctatcgaaagtatgcatgtattttacgtacaaggttcgctacactaacagctccaccgagattcctgaattcccaattgcacctgaaattgcactggaactgctgatggctgcgaacttcttagattgttaaataaaataaattataataaactaaaaaagaaaagagagacaacacgaaagagacaaaagaagaaaggaacaggcgaagcagcgaaacagacacagcgcagcagcccagggcagcacgccacccgcgcccgcagccggccacccggcgaagcggaggacggaaggcggacaacggaagagaccggggcacacacccgacgcgacgcgccccaaacggcgcgagcccgccgaagcacggcgccacggagaagcgacatgaagaggagacaaaacagagaagtggtgatgaatccgagatcatcgcgtgagacgggaaggatataatacagatctgacggaacagaacataaaatagagtggatgcgaagagcaaacaagcatgtagatacggaggcaagaacacaaaagcgagaccgagcgatcagcgaccagaaccatagtcagagagccagaggacagacacacagagcaagccgccatagatgacaagagcctacatgaagataacgtgaaaaagacccgtgttgacagacagacaggagcacgacggactgcgacgtgcggagaagaaaacaaaacaaaaaacacatagcgg

SEQ ID NO: 16557 - DNA, 762 bp, Homo sapiens
caaccccataggctaggtacgaggctgggtgttagctcgcctacaggtacggatctcccgcgcgtcgccgaaagcggctctgacccagcggaagtaattctttcgactgccccggaacccaccggagcaggcagctgggggtgggggggcggccctgggataggggctgtggcagtacgcggggacccggctgcggtggctgcgggactgacgagaaactactaaagttcctggggaagcaaagtagaatttcataagaacaaaatggatggagaggagaaaacctatggtggctgtgaaggacctgatgccatgtatgtcaaattgatatcatctgatggccatgaatttattgtaaaaagagaacatgcattaacatcaggcacgataaaagccatgttgagtggcccaggtcagtttgctgagaacgaaaccaatgaggtcaattttagagagataccttcacatgtgctatcgaaagtatgcatgtattttacgtacaaggttcgctacactaacagctccaccgagattcctgaattcccaattgcacctgaaattgcactggaactgctgatggctgtaatcccagcactttcagaggacgaggcgggtagatcacttgaggccaggagtttgagaccagcctggccaccatggcaaaaccccatctctaccaaaaatgcaaaaattagctaggccatggtggcacacgcctgtaatcccagctacttgtgaggctgaggcatgagaatcgcttga

SEQ ID NO: 16558 - DNA, 607 bp, Homo sapiens
caaccccataggctaggtacgaggctgggtgttagctcgcctacaggtacggatctcccgcgcgtcgccgaaagcggctctgacccagcggaagtaattctttcgactgccccggaacccaccggagcaggcagctgggggtgggggggcggccctgggataggggctgtggcagtacgcggggacccggctgcggtggctgcgggactgacgagaaactactaaagttcctggggaagcaaagtagaatttcataagaacaaaatggatggagaggagaaaacctatggtggctgtgaaggacctgatgccatgtatgtcaaattgatatcatctgatggccatgaatttattgtaaaaagagaacatgcattaacatcaggcacgataaaagccatgttgagtggcccaggtcagtttgctgagaacgaaaccaatgaggtcaattttagagagataccttcacatgtgctatcgaaagtatgcatgtattttacgtacaaggttcgctacactaacagctccaccgagattcctgaattcccaattgcacctgaaattgcactggaactgctgatgggagcaaaactgcggggtaccgagctcg

SEQ ID NO: 16559 - DNA, 883 bp, Homo sapiens
caaccccataggctaggtacgaggctgggtgttagctcgcctacaggtacggatctcccgcgcgtcgccgaaagcggctctgacccagcggaagtaattctttcgactgccccggaacccaccggagcaggcagctgggggtgggggggcggccctgggataggggctgtggcagtacgcggggacccggctgcggtggctgcgggactgacgaagtcttgctgtgtggcccaggctggagtgcccggctggtctcaaattcctgacctcaagtgatctccctcccaaagtgttgcgattgcaggtgtgagccactgcacctggctgctgagaaatctttgcctacagtgagggaaactactaaagttcctggggaagcaaagtagaatttcataagaacaaaatggatggagaggagaaaacctatggtggctgtgaaggacctgatgccatgtatgtcaaattgatatcatctgatggccatgaatttattgtaaaaagagaacatgcattaacatcaggcacgataaaagccatgttgagtggcccagagagacagagtctcattctgttgcccaggctggagtgcaatggtgcggtctcagctcactgcaatctccgcctgctgggttcaggcaattctcctgcctcagagtagctggaattacaggtcagtttgctgagaacgaaaccaatgaggtcaattttagagagataccttcacatgtgctatcgaaagtatgcatgtattttacgtacaaggttcgctacactaacagctccaccgagattcctgaattcccaattgcacctgaaattgcactggaactgctgatggctgcgaacttcttagattgttaaataaaataaattataataaact

SEQ ID NO: 16560 - DNA, 673 bp, Homo sapiens
  misc_feature (448)..(448): n is a, c, g, or t
  misc_feature (520)..(520): n is a, c, g, or t
caaccccataggctaggtacgaggctgggtgttagctcgcctacaggtacggatctcccgcgcgtcgccgaaagcggctctgacccagcggaagtaattctttcgactgccccggaacccaccggagcaggcagctgggggtgggggggcggccctgggataggggctgtggcagtacgcggggacccggctgcggtggctgcgggactgacgagaaactactaaagttcctggggaagcaaagtagaatttcataagaacaaaatggatggagaggagaaaacctatggtggctgtgaaggacctgatgccatgtatgtcaaaaattgggatattcatccttgattgggccatgaaactttattggttaaaaacacggagaacaattgccattaagcattccagggcacggactaaaaagggccccatgttgggagtgggccccaanggtcaggtttggctgaggaacggaaagcccaatgagcgtcaaccttttagcaggagattacccttcgacatngttgcttattccggaacaggcttattgcaattgttcattctttaccgttacccaagggttccggcttacaaactaaaccaagcttcccaccggaagaattccgtgaaaatttccgcaaatttggcgaccctgaacattggccactggaaactg

SEQ ID NO: 16561 - DNA, 451 bp, Homo sapiens
gcatctttagtgtgctgggctcaactgggccaggaatggctaagaggctcactcacagagtggcctgggctcctcccctaaccccacagaatcagaacttccaggcctgggaactgcatttttaagagacagggtctcgatgtgtcacccaggttggagtgcagtgccacagttatagctcactgcagcctcaaactcctcgattcatgtgatccttctgcctcagccacccaggtagataggactacaggttacagatatatgccaccatgcctagctaattgttgtattttttgtagagacaaggtctcactttgttgcccagactggtctcaaactcctggccttaagtgaccctcctgcctgggcctcccagagtgctgagattccaggtatgagccactgcgcccagctgtaatctttgttcataataaactttccagccatctga

SEQ ID NO: 16562 - DNA, 462 bp, Homo sapiens
  misc_feature (4)..(4): n is a, c, g, or t
tctntccctcggttcaaagacatcatatttgcaataaagaaaacattaaatatttagtttggacttgaatatcaagtcgttgaaatttatttgaaatacttgctggcactgcacctggattcgtactgcaagacctgactattcataacggaaaccgatctcttagcgaacattcgttacttgggtcacctgattcatccaaaatattccagatacgcagcctggaacccagcaggaatgggggtcctcagcagaaatctttcagagagaggcccctcttctcaggtgcggagggatgaggaggaatcctgtagtcccaagtcacaaaaggaggatgttgactcttcagcaaacaccggagcctgaaaacaaaacaaaacaaaacaaaaaaacaatgaacttcaacgtaagggatgcttactagctcccagggttgaaataaagccgagactagacatcagt

SEQ ID NO: 16563 - DNA, 485 bp, Homo sapiens
tcctgtctcagcctcctgagtagctgggactacaggcgcctgccaccacacccagctaacttttgtatttttagtagagatggggtttcaccttgttggtcaagctggtctcaaactcctgacctcaggtgatccactcgcctctgcctcccaaagtgctgggattacaggcgtaagccaccacacccagcccaaaaaatgtttgtgcacagaactgtggatgtttgtcacagaactttccaaataaagaagttctgataaaagagaagatatttctcatttccataatctttaaggtgtgggggatacgtaatctggacttctcaaatggatgatttctaaatacgcgtcagatgaagtgattctaactttctctgtagtaatatcttattttgttttattcaaaaacaataaaccatgtagatttatttaggcaaaaaaaaaaggggggggcccggttaccccatttcgccctttagttgagt

SEQ ID NO: 16564 - DNA, 440 bp, Homo sapiens
acagcatgtaaatgggagtcagccaatttagaagatttccaaacaagagtcactgcttctcacatcctctgtctactctgaaactgccatgagctctttcaggagctcctgggtgctgcaggcccagatgagcaaacacacccagcccaaaaaatgtttgtgcacagaactgtggatgtttgtcacagaactttccaaataaagaagttctgataaaagagaagatatttctcatttccataatctttaaggtgtgggggatacgtaatctggacttctcaaatggatgatttctaaatacgcgtcagatgaagtgattctaactttctctgtagtaatatcttattttgttttattcaaaaacaataaaccatgtagatttatttaggcaaaaaaaaaaggggggggcccggttaccccatttcgccctttagttgagt

SEQ ID NO: 16565 - DNA, 878 bp, Homo sapiens
agtatttaaggccaggagtacaagaccagcctaggcaatatagtgatagcccatctctaaaaaaatttcaaaactaacctgatatggtggtgcacacctgtagtcctaactttttgggaggctgaggtggaaggatcccttaagctcataaggttgaggcttcagtgagctatgatggcaccacttcactactgcttgggccatagagtgagaccctgtctcttaaaataagggaatggaattgccgagtcatgcataacctctgtgttcaatcctttggggaactgccatactgttttcaaactggctagatcattttacattcccttttgtgtgtatgaagattccagtctctccacattctcatcagcacttatcttactttctgattctagccatcccaatgggtatgaagtggtatgtatctcattgtggttttgatttggatttccttgatgactaatgatgttatacatcttttcatgtgctaattggccgtttactgtacatttttcagaaatgcctatttataatagttcctttgctcattttaaagtacacttgtcttgttactcagttgtaagtgttctttatatattctagatacaagctccttattggatacatgatttgcaaatattttctccttaagtttttttatttttttaattgcattgttttaagggcatttgtgttggaaaaatattttaaaaccttagaaataattttctgaaagcaaatattgacttatacaatagtaatagtaaatgatttcattgactgtacttccagtaaacctcttgttggaaaggtggtatgaataactattatgaaggtaaaaagaaataaaatgaaaattggatgcctgctagttaaaa

SEQ ID NO: 16566 - DNA, 751 bp, Homo sapiens
agtatttaaggccaggagtacaagaccagcctaggcaatatagtgatagcccatctctaaaaaaatttcaaaactaacctgatatggtggtgcacacctgtagtcctaactttttgggaggctgaggtggaaggatcccttaagctcataaggttgaggcttcagtgagctatgatggcaccacttcactactgcttgggccatagagtgagaccctgtctcttaaaataagggaatggaattgccgagtcatgcataacctctgtgttcaatcctttggggaactgccatactgttttcaaactggctagatcattttacattcccttttgtgtgtatgaagattccagtctctccacattctcatcagcacttatcttactttctgattctagccatcccaatgggtatgaaagtgagatacttaacacccactagcatagccaaaataaaaaagatggataggctgggcacagtgactcatgcctgtaatcccaggcctgagttgggaggccaaatctgggaggattgcttgaacccaggaatttgagacctgtgcaacatagtgagacccagtctctaccaagaaataatttaaaaattagctgtgcatggtgtcgcatgcctgtagtctcagctactctggaggctgaggtggaaggattgcttgggcccaggaagtcaaggccacagtcacctgtgattgcatcactgcattctagcctgggcaacagagctgagaccctgtctc

SEQ ID NO: 16567 - DNA, 593 bp, Homo sapiens
attattttgaccagaaagtctgatctcccagcaggatcaacttttccttcctttgtctttctttctttcagccttactttgacattcagctgatcattccctgtcttatcttgcttgtgctcaccgctgtctgtccttttacgtgtggaggtcagaaacgtgtctggttcgtgtacatcacctcagcaccctgcacaggggatggcacaaaacagccactcaaaaagtaattgttgattacaattgatctgaccatttcttttggtgacccttttgtctttgtggtagaccaaagtcatgatctttgatccctcctgccatgttctcagaagccttgtgcttgggatttggacaaagtgaccctttttatagaggttatttttttcccattcctccagctccttctttgctgtttttctagtgcccatagtagcagatgcacatacttcaacaccctttcctaaaaattctgagctacccatacattattttattgttaaattgaaatggaaatttgctttgataagaatctctcagtaagagtctattatccgtgttatagatgtatctcctaccgtgcaaatgttagtttt

SEQ ID NO: 16568 - DNA, 162 bp, Homo sapiens
aaattgactgcaatggactatttaagcaccattctttcccctcccccatttttaaattttcgagacaaggtcaggctctgtcagccaggctggagtacagtggtgagctgagattgcgccattgcactccagcttgggcaacaagagtaaaactttgtctca

SEQ ID NO: 16569 - DNA, 277 bp, Homo sapiens
tatcaaaaacctctctgtcacacttacacacaaaagcctacaacacccccctccccccccacacacacaccctgaaggcttggactgaagagtgaaaaagagtccaacttgtagcaatctgtgggggtagatggaagagatggaagcagagatgcagtggctccagcataagaacttctttggtaacatctctgcatatcgcaagggctgcattgtgcaggacttgtaagaatgtaggcatttggatgtcattctaattggaatcggaaacaaatgg

SEQ ID NO: 16570 - DNA, 532 bp, Homo sapiens
gtattatttcactatgtaattagcataaaaattattactgaagtatgttatatatatgtatttgtgctaagcctcccaaatctggtatgtattttacacccactgtacatcttgattcagagtagctacatttcaaatgctcagtggccatataaagctagtggctactatgttgaacagtaaaggtagtacaaattcccaatgctcactttttcaatataaatgtaaatatgtatttagaagtagtcttaggctgggtgtggtggttcacgcctgcaatcccagcactttgggaggtgaaggtgggcggatcactcgaggccaggagtttgagaccagcctggccgacacagtgaaaccctgtctctaataaaaatagaaaaaattagctaggcatggtggtgcacacctgtaattccagctacttgtgaggctgaggcatgagaatcgcttgaacccaggaggccaaggttgtagtgaactgagatggcgccactgtattctagggcgacagagtgagactccgtctaag

SEQ ID NO: 16571 - DNA, 371 bp, Homo sapiens
catatctgagcctgtgtcttcttgttcccaaactcaaggaaataagtgatttagcagaaactaataaaaaacttggatctactgatattttaatctgtcttgaatatgtattttgttattttaatcaccaaaaatctggtaagggaattatgttacagagagaatttaataataactgtttcaaatgcctcatgttctcacttattcgtaggagctaagcgatgggtacacatggatgtacagagtggaatgatggacattggagactgtaaaatttaggagagtaggatggaggtgatagatgagaaattacccattgggtacaacttaaccgattcaggtgatgattacactaaaagtccagacttcac

SEQ ID NO: 16572 - DNA, 211 bp, Homo sapiens
agacacggggtttcaccatgtcggccaggctggtctcgaactcctgacctcaggtgatccacccgccttggcctcacaaagtgctgggattacaggcgtgagccactgcgcctagcctagagtacagactattaagtgaaatatgtttgcttactctaacaaccaaataaatctgatttaatttcaaagtaactgctttcaaactggcaag

SEQ ID NO: 16573 - DNA, 393 bp, Homo sapiens
cgaaagcacacgtggaatggctgagctccccatctgtgtaaagtttccaaggttcccgccccgggccgtgtgtgctgtccgccatgctccggccggtggtgtccagccccagggcgctgtgagcctgcatccctgccggaagagcccttccatggaggcagggcacagtgctcctaagaggcaggtgaacaagtagcaaatcctcaagaaatgctacaagcaagcacgccgccctcaggccaggcatcacggtgggtgaaatagaacgcaggcgaggatgttcagaaagaggccttttctgtggagtaagtttggcagtactcatcaaagcacattaaaaccacatattctttttgtgtgtgtgtgttcccgagacggagtcttgctctgtcg

SEQ ID NO: 16574 - DNA, 439 bp, Homo sapiens
atttcataaagaagaagggtatcagtgtaaacttctaaatgcaggacaaaatgcatgattggggatggagattggagtggacttgttcaaagagcagcagcaaatgagacattaaaggaatacataggaagccacttccaagtacttccatttttctttagttgtgattgtgagatggttccctactagttagagaaggaaaattttaaaatgctttgctaaacagatgatccttaaattggtcactgtataccgtgatgcagcctaatcaaaatggtattcctttgagtgagtgagccacagagactctcgccaaccccttgtgcagctttctattaacagtataaatactccattgttgtaaagcagtttatggttaacaaagcgctgtcacagacacgttatcttagttttgcagattgcctttgtacatgttatt

SEQ ID NO: 16575 - DNA, 360 bp, Homo sapiens
cctagaacaaccccttgggtttctctatcatattgacggtggtgttggtttctcgtgatacgtttaaatattcctccatttcttgctgcttcctatgaacttgtaattgaattcagaggagaggttggcaaaaggcggatagtaagcaccttatgcctttgggtccacgaggtctcagatggctgagttcagccttagtcacctcatgtcccatgttagctgttccttctctactctgtcctggttccaagccccagcctatttctgaaaagttaagtggtcagctgcatagatgaccatttagagggtgtagatttactctgaaatcccagagggttgtgctctgagtcttatcagtgc

SEQ ID NO: 16576 - DNA, 480 bp, Homo sapiens
ccagaaaggtcaggaatacttattgaatctaactttgtttttgttttgtttttttccttatgattaaaggtgggatgagagaaaattaaatgacacacacatgctaaaatatcaaggttccagatatgtcttgagaggggttgttgcagctgcaaaggagaagtgtatagtgataatgagtaaagatgcatgtgcagtttgttctattttaaggcaaaagttatatcagggatttttttcttagaaaggtgttgcagagatgtctggtacctagtttaaaaatgattccataatatgtagacttgggcagttcctttgggaggcacctccctctcaaaatttgaagattgtgcttggaaattactttacatgtatttgggctgtatgtcaatttgtacgaaattagactttcagaaaagtttatactggaaggttaataatttgtatctactgaggacttagagctagcaggcaaaatga

SEQ ID NO: 16577 - DNA, 510 bp, Homo sapiens
ataagatgtttgctggagaaacctattgtttactgaaagcactcaatgaagtcaaattactgaagcttttgcctacatcttggtcttttatgattaaaggtgggatgagagaaaattaaatgacacacacatgctaaaatatcaaggttccagatatgtcttgagaggggttgttgcagctgcaaaggagaagtgtatagtgataatgagtaaagatgcatgtgcagtttgttctattttaaggcaaaagttatatcagggatttttttcttagaaaggtgttgcagagatgtctggtacctagtttaaaaatgattccataatatgtagacttgggcagttcctttgggaggcacctccctctcaaaatttgaagattgtgcttggaaattactttacatgtatttgggctgtatgtcaatttgtacgaaattagactttcagaaaagtttatactggaaggttaataatttgtatctactgaggacttagagctagcaggcaaaatga

SEQ ID NO: 16578 - DNA, 488 bp, Homo sapiens
agagaaagctgggattgccagagaccactggctctctgggtggcttggatccaaagtcagaggagaggcagctggttgtggctcggtgattgggtgacccccttccctctgaccacaggcaggtgagcacagtcctgctttagccggggtccctcatggtggtctggtcctatactcttcctgtagtgcttggttagagtcgggcgggggttggctgcacatttatgcagtggccttttgacccttcagggtggtggtagtcttcaccttgagcttagcctgtgtttgatgagcacattgcagaccattaaattcacaaaccatttcattcttaactccccactacctcttattttttaaccacgacattgtgggaaatgtttgtcactccaaaactgtggaattttgccattctaaaattgtagcagctttggggaaattacttttataaaattacttttataaactccctggattgaaaaaataat

SEQ ID NO: 16579 - DNA, 447 bp, Homo sapiens
tgtggtggtgcacacctgtagtcccagctacttggaaggctgaggcaggaggatcacctgtgcccaggaattggacaccagtctgggcaacatagcgaaaccccatgtctctagagggaaacaaaacaaaaccgaagaatggaatagatctacatatactgatagggaaatgtctccaagatacccatgtggggaggaaaaggtgcagagcattgtgcagtccatgcacccattagtacataaaaatgaaaggtgcattttaatttaatctctcagcagaaggactgataattaagggacaatttttcagtgtataccttttagcattgttttaatatgtgtattactttgcaatgaatacatgtaattaaataaaaagccacatacatacacatacaaatgtgtgtaaagtgtccggaacagaataataacagctaacatttattg

SEQ ID NO: 16580 - DNA, 462 bp, Homo sapiens
atacataaaagtaataatgattttataatctaattaaaaattaataaattcacaaatttgatctaagttatttttaacaacaataaaaacatcatatataaaatctctccaaagcatacttgtctgcacaacattcactgcctgtttttctgtatgcagtggccttaagagacagggtagagagaagagaccaactgaattctataatcaaagttttttttacatctgtcctttcttccatgccttctctttttagaagtgtgctcacattgactgtacgcttcctgagggaagaggtctcatggtttgataatttcttcttcttttttcctctatagattcaggaatttgagataattcccaccttctattcaaggaagctatttattgaataggttctcaataaagtgtttttgattattgaaggaatgaacacaatacatataaaaaagctattttttt

SEQ ID NO: 16581 - DNA, 384 bp, Homo sapiens
agttttgcttctttgggtatgtggcacataatagatgcactaaataccatttcataagaatggccccaagaggcttctagctcgagaaacagacaaaccttgcaaactgtgatgaacataaccatttcagtgaggtggatttttaaaaactctaatccaaagcaaataatcactgctggcagttattcttctgtacttagattgataataaatattcttaaaatgcttaaaatgatctagagatgactggcaatttgtaccaaagttaatttacaacactgttttagtatattaaatggcagggtttttgctagcctgacgtttgatgtctttcttttaacatattcaatatctggggcacttcgtggaaatcctgttttctag

SEQ ID NO: 16582 - DNA, 870 bp, Homo sapiens
ttcctgtgcaggcttgtcacagtttggcttcatttggaggctggcaccagacccccgggctctgcgttgtatgtcttttgacctcaaatgagggggagagacgtggtgtttcccacagatagtgagtagtgagccacctggaatacttgttctgtgggatgttaatggtcgtttcatgaaaaggattttgtggtcatgtaagtttagcaaatgccaaagcaagccgagtgaaaggtgttgttatcatctctcctaagccgcttttctttgctgacctgctgagggagtctgcaagaggcgggggaggaaatgccccttcctgagcttgcctgcacccagcaccctttccatggaacacctcccaaggccagtatacgaaggatgatgctttgggagtgtggtgtctggcaacctgcgtctgccactttctgggcatgcacgtctggcacgtcttccttggccaagtagtgctggaagaagacacagggctggatgacaacccctgatgccaggcaagggccacgctagctgtcctcagctttatcagcaacacccttgtctctaggagtcccagccctcagccctttcctaaatgatgggaagtaattaaacagttcatgcatatccctacatttcagaaatcacacagagcccagtggtagttggtgcttggctctgagacctcagtcatactgtgtaagtttctgctggtttgaaggatggctggagactagtaaagtagcaggaaggctgattccactgggaactcccccagactttccatctgattccaccgtgaatgccatgacacttttgtattgttgttttaatgatacttagggataattgttgattcacatgcagttgtaa

SEQ ID NO: 16583 - DNA, 292 bp, Homo sapiens
cagtggaaatagatgtaacactatcgtttatccacaaaagcctcagtggtaacagaggctctacttcctaccttccacactttaaccaaagcaaaagtttacaacaaatagtacaaatggtgggcgaaatgacagagggagagagcagaagggtgataataaccccactgagtgatattaattaaattaaataaataaagcctaaggaaggtctttgtggtacccaactgccataacgttgattaaccctgctgtgtttcagcacgaggtcatgtaaaccctttgacaccat

SEQ ID NO: 16584 - DNA, 223 bp, Homo sapiens
gcagtttttggggttactcgtgattgctcctcggtccagagttcaggcagcaatctgagccactcaactgctcttctttacccctctacctctgcagttcattgggggacagagctgggccaggatcctgggacagaaggaggaggcgggcccaggaaagtccacttggggtaacacacaatttgtacataaaaaagaaatgttcacctctttgtatgtaccg

SEQ ID NO: 16585 - DNA, 427 bp, Homo sapiens
catagtacctactttgctgtgttctagggaaaactaaatgagatcatgcctagaaaatattctgtggcacatagtagcaccttaagaaattgtacccatcattattgtttttaggtttgtagagagtggcttaaaggtgggaagtgggggctgggcatggtgactcatgcctgtaatcccagcactttgggaggccaaggcgggcagatcacctgaggtcaggagttcgagaccagcctgaccaatatgatgaaaccccatctctactaaaaatacaaaaattagccgggcgtggtggcatgcacctgtaatctcagctactcgggaggctgaaacaggagaattgcttggacctgggaggcagaggttgcagtgagctcacaccattgcattccagcctgggcaacaaagcgagactccatctcaa

SEQ ID NO: 16586 - DNA, 122 bp, Homo sapiens
ttagtaattaaaggaaggtctgaatccacagacatagcaaagatggaggattatatatatataagggtaatagagagggacactgacattaaaaggaaatgtgtagccattactgtgccaga

SEQ ID NO: 16587 - DNA, 602 bp, Homo sapiens
tcagactagttcaaaaaaaataattcattgacctattaattaactttaatgtatagatcagctttcactggattttgcttcagtaacaacactctgtccccaaaatctcagtatcttacatgtataaaggtttatttcttacccacaatacatgccattcacagagtaggaagcctgcagttctcctctatatcagtttacatttctgaaccaggttgatggaatcacctctttctagtagaagagggtaaaaggcagctctgaaagcacacactcattcttccagttcctgctcagtggcagcatgtatcacttcagctgacaatggccaaatgtttacatcagtttccattggccaaaccagtcataaggtcaaatccagtattaactgtggtgacaggaattagcaatggagccagtctcagtttcctgatgtggaaagtctgcgggttaacctgtctcttagttctcttccattctatggctctgattttaaagtgttctttcctacctctgaatcagttaggatgttttggttacaagtcacagaaaaccctgactcaagagttttaaacaataagggggtttattttctgacatgg

SEQ ID NO: 16588 - DNA, 379 bp, Homo sapiens
tgtctcactgatccatgatttattactaagtgttgtttctctctgagcctatctgcatcactctaaagtcttcttttatcaccctcagacctcagagctctggttcccagaaaaatcatacagcaaataattttatctatggttcccagtaggtgctgaagtctgaactgtgtgaatgcatagagggccagaaatcctggatcctggaaacagatagcaggatagtttgggggcatggtaaatatgcctcagccagtttcatcctagaggtatttcaagaccagacagtattgctatggcaactaagttgtgtgttaaaaatacaggaggggcactagaattcagatgttctttggaaaagcaggaaaagttaaatgcc

SEQ ID NO: 16589 - DNA, 557 bp, Homo sapiens
gggtgaggcgcgcggggtccgggctgcggcttcccggtgcggccgcagtgggcaggctcgaggcgtctgccgcacctcagcccacgacctgccccgctgggaggtgcgggccgctggccaggccctgaccgcaacctggcccagaggccccagccctcaggcaaggttctccggtgaagccacagcctggccacctgtcttgatctccccaccgagaaggccccgcccctcccgctgcagccccacagcatgcagccccaggagagccacgtccactatagtaggtgggaggacggcagcagggacggagtcagcctaggggctgtgtccagcacagaagaggcctcacgctgccgcaggatctcccagaggctgtgcacgggcaagctgggcatcgccatgaaggtgctgggcggcgtggccctcttctggatcatcttcatcctgggctacctcacaggctactatgtgcacaagtgcaaataaatgctgccccgcatgcacgcggggggctggccgcacacgtgagagcacaggcctggagacaaaaaaaaaaa

SEQ ID NO: 16590 - DNA, 452 bp, Homo sapiens
cgcctgccctaacccctgctaccggccccatcaccctccaccccatcctggctgggagcccacggtccagcagctcagcaaaccgcagcctttggccttccctctggttggctgtgggcggggagagcttcctcttgactccagcagagcgcccaggcccctccccctgacccagaccaacggccacagtccacttagggggcccctcatgcggccctggcctggggctcacctccagttggttctcaccccaggatctcccagaggctgtgcacgggcaagctgggcatcgccatgaaggtgctgggcggcgtggccctcttctggatcatcttcatcctgggctacctcacaggctactatgtgcacaagtgcaaataaatgctgccccgcatgcacgcggggggctggccgcacacgtgagagcacaggcctggagacaaaaaaaaaaa

SEQ ID NO: 16591 - DNA, 778 bp, Homo sapiens
gggtgaggcgcgcggggtccgggctgcggcttcccggtgcggccgcagtgggcaggtgcgactgtgcgcggcctcgctggctgagaactggcgggggtgggggcgtgccctggactgacccccaccggcctaacccgcggtgcggggccagggccggaactgcccgcccggctccttgcccggctccttgtggctgctggggacccccgacaccagccactttcccttcccggcccttagcaagatcggcttctccggtcacctttatttttttaggctcgaggcgtctgccgcacctcagcccacgacctgccccgctgggaggtgcgggccgctggccaggccctgaccgcaacctggcccagaggccccagccctcaggcaaggttctccggtgaagccacagcctggccacctgtcttgatctccccaccgagaaggccccgcccctcccgctgcagccccacagcatgcagccccaggagagccacgtccactatagtaggtgggaggacggcagcagggacggagtcagcctaggggctgtgtccagcacagaagaggcctcacgctgccgcaggatctcccagaggctgtgcacgggcaagctgggcatcgccatgaaggtgctgggcggcgtggccctcttctggatcatcttcatcctgggctacctcacaggctactatgtgcacaagtgcaaataaatgctgccccgcatgcacgcggggggctggccgcacacgtgagagcacaggcctggagacaaaaaaaaaaa

SEQ ID NO: 16592 - DNA, 744 bp, Homo sapiens
gggtgaggcgcgcggggtccgggctgcggcttcccggtgcggccgcagtgggcaggtgcgactgtgcgcggcctcgctggctgagaactggcgggggtgggggcgtgccctggactgacccccaccggcctaacccgcggtgcggggccagggccggaactgcccgcccggctccttgcccggctccttgtggctgctggggacccccgacaccagccactttcccttcccggcccttagcaagatcggcttctccggtcacctttatttttttaggctcgaggcgtctgccgcacctcagcccacgacctgccccgctgggaggtgcgggccgctggccaggccctgaccgcaacctggcccagaggccccagccctcaggcaaggttctccggtgaagccacagcctggccacctgtcttgatctccccacagcatgcagccccaggagagccacgtccactatagtaggtgggaggacggcagcagggacggagtcagcctaggggctgtgtccagcacagaagaggcctcacgctgccgcaggatctcccagaggctgtgcacgggcaagctgggcatcgccatgaaggtgctgggcggcgtggccctcttctggatcatcttcatcctgggctacctcacaggctactatgtgcacaagtgcaaataaatgctgccccgcatgcacgcggggggctggccgcacacgtgagagcacaggcctggagacaaaaaaaaaaa

SEQ ID NO: 16593 - DNA, 1170 bp, Homo sapiens
ctgcatactttatattattaatttgtgtaatcctcctaacaaccctctgaggaaggtactcttatgattcccattttacaaataaagaaactgagactaagtgactcactcaaggtgtagcaggtagaaagtagtggaattaggatatgagttcagactccagaccctgttattagcccctgtctttggctatggattagtaaaggagagcacagccaagggtgggacaggcagctgtagtcctctggaccagcttcacatggatggggctgcattgttacaggtggcctaactcagacatggaaactgagtcgctgctgcccaactcatgccatgaaaccattttggcctgcacagcttataacagcactctagctctagctatgacactttatggtgttagtgggtttttttggtggttggtatggaggaggggctgggctacaagttttagattatgtttcttattgcgggtttttaaaaattcttgaattaggcctatttgctcttttgttctctattgagttagcaaattcagtttttccaagatgccctgaaagtatgatcatacatgtatacgaaatggtccttgggtccagctggcaactcctgtgcacccccgacctggattctgccttccttgaagtgagccttggaagaaacaagtgctcatgctccctgacattattagctgccacgatgaagcctcagtcccaaacaccccagcttcctgtctaactcaagagctaatcctgtgtttaaatcttaagagtgtttagatcttaggccatgccatgaattcccctggttgactgcatttgtgaaaatgagcttcccattattggctcttaagtaatggagatgagggggagtcctgctacacagataagtgcatcataaagttacataattaaaataactgagctctggcctatcaacaggcccatcagcagtccagaatagagtctagaaatggacacaaattaaatgagagtttgaaatatgataaaggtagcagttgaaattagtagagagatgatgatgtactcaaataaatagtgttggacaactggacaaatatatgggaaaccaaattggatttaattactctgtcaaaatcccgataaagcaaggatttaaatgtaaaaaatgaaataaaaaatgatagaa

SEQ ID NO: 16594 - DNA, 395 bp, Homo sapiens
cagggcatagtaaacctccagaaaaatattttttgagtaaaatgattgaggaaataagggcccagaggcaatagaaaagaactgggtctggagtcctgtggaagactggctgtggaacaggaatgaaaagctggtgctgatgcaggaagaaagcactaggctgctttcacaagtaatccagttcataagtggagaagacagagaatggaggaattccatatctgataaaggaggaaacaaggttatccactgtgagtgaggcagagtagggttagtggtttgtgggaaatgacttggagatgtgataaagatagctaattaagagccaagaaaaaaccatgtgtagctgttgaagatcctacagagacaaacactgggaagtggtacctggcctc

SEQ ID NO: 16595 - DNA, 958 bp, Homo sapiens
gaaaggaacattatttgtgacactgtgcagtgtatgagatgaagtgatgtaaaacatggggctactgttttctctccatctcccctcgccttgcctcgcctcacctcacctctcctctcttgtcctcttgttccctcccctcctcttccctcctctcctcccttctcttctcctcttctctcctttctcctatatttcctctccaaggcactgttttttgaagattcagctgccagggtaatggcaatgggtaaggtgtgaaggaagagtgagtcattccctttaatccttgctgacagttgcacagcactcagaccagccttgacttccctgacctcttgaactgtgagggtaaaggtgaaaatagaccatcaggtcagcccgctgctatctcaggcgggctggcgataattaccagtagggagcattttgcatccattagagatgaactggggaagagggacagattggatcaagtctaaatgtattttgagacacaaacatgctctcaagttggagaaaaatatttttttttctaattctccaagaaattttgtatgtctttgtttcaaatgggaaaaaaaaaaatggacacacgtccatcaggaatcaccatctttacattgtcagaataattctgtttaagttgttcttttcaaaggacaagaagaccttcctttgcacatactgtcctttaggggatttcctttctctgaatcttgttctcctgttataaacttgtttgactacacttcaaactaggccatcctcaaatacttggctcaaaatggatttctctcttggatgcagaagaaaaatgactacatttctgcatatttctcctgatttttattctttcccaaaaaaacagatgttattcagaccaaagtggttaccatagcatctccttattttaaaagttttatgtattactttattaaaggaagttttcataacg

SEQ ID NO: 16596 - DNA, 378 bp, Homo sapiens
caacacacatgtgtgtatgcacagactcactagcaagcaccaagaatcaggtgctgggctacagcctccatggttcaagctgtctagtaaccatagcaattgccgctgtcctcgtggcaaatgagatcacccagtacacacttgctccaagatttgagttacaagagatgaggcattttccacagagggccattaagtttggaattccctttccctggtctgacataaccctagagtattcatcttctgggtccttgcaaactacatcaagttgagttagccagtcatgattggtaagaaatcctaacaggcaggaagaaagtgctaaattaacttctacatgtgagcaattcgcaattttgtgggtggatttttttt

SEQ ID NO: 16597 - DNA, 433 bp, Homo sapiens
tagcagcacaggttcagcttttggctcctggggccaatggtccctgtaagtttgttgaaagcatcagtgccaaataaaacatggccttttaaagcaccgaattacgtgagcgcagagctgttaaaatcagtgtagcaaaaatccagctgggtttggccgtcgccacaaagtacaaaatgatgatcatttgtactgccaagacccagggttctccagatgtggtggactgagcagagttacttggatatacattcagttgcccattctttaaaataaggaatctgctattaagaagtgtatgaggctgggagcagtggctcacgcctgtaatcctaacactttgggaagccgagatgggtggatcacttgaggtcaggagtttgaaaccaacctggccaacatggtgaaaccccatctctactaaaaagtacaa

SEQ ID NO: 16598 - DNA, 366 bp, Homo sapiens
ccttgggcctgtcttgacttccttgaaatgtctcttttacctggcctccttctcatggctgtcatcaagcagccctgttgatcatgttcctgaggaaggacagaatggggttggggagattaatttgtcacccaggctggagtgcagtgacgcgatctcgactcactgcaacctctgcctcccgggttcaagcaattctcttcttcctgttggtgaatttctcccaggaggcatgagccaagatcctgtttcatgggtttctgggtataccccttgaaacaccagagtcaggagtcaggaacaacacctagtgtattagttggttttcacactgctgtaaataactgcccgagactggataattta

SEQ ID NO: 16599 - DNA, 378 bp, Homo sapiens
cacacacccctgacccccagcagcgtcctgaccccaggccgtcagtccacatgcaggcgtcgggtgcacatcagtgagggaaggaaggaacacaaggccaatgccgatcacaaaactgccccgagaaaacggagagaagcccctccattcagggagttccattcccaggatgtggcatcagagaaggaccgcccagatgcccggacccctgaacttctccccagcactgacagctgcaagcctggccacactcacagcacggagccccgcctgacgccgcggtcgcttgacttcacaatcacaggagcgtgacgcctacagcctaatgttgccgtgtagggcacagacttcttaaaaagaatcttcaggggatgtcgc

SEQ ID NO: 16600 - DNA, 287 bp, Homo sapiens
  misc_feature (239)..(239): n is a, c, g, or t
  misc_feature (260)..(260): n is a, c, g, or t
cccaccccagaccaaccacgaagaacccagcagaagcagaaaccacaaaacggcaaagctccctgctccttcaatagacagaagcacgaaacctcccctagatcgttcattagctccgtttgatagagaacccttcacactaggaaagaaaccaccattttttgacaagccctcgattccagcgggaaggtcactcggggagcatttacccaagattcaaaagcctcctttaccaccgnccacggaaagacatgaaaggngcagccccctgccaggggaagaagcca

SEQ ID NO: 16601 - DNA, 357 bp, Homo sapiens
ctccatctcaaaaaaaaaaaaaaaagaaaagaaaagaaaagtaacacttgttaaagaacatgtcaggctaaaaaaagaaggcattatttcaaaaatgtttatattacaataattaagatttttaggcttttaattggtacttttttcctttaacacacagagttttaatttaagtaaaacaagaaatcagacactatgattcctaaaaaaaatttactaatgcttttctagaaatagaattgttcctaagtttttctggtaacatctaggtgtagactgtgggctaaagtttaggcaaaagataaatttgagagatggtaattaagactgtaaaaagcaaatgaggtctctgtggga

SEQ ID NO: 16602 - DNA, 604 bp, Homo sapiens
tctccagagaccatttgtgggtatattttatattttaaaaataaagattttaaatggatatcaatgtttaatattcaaaacatgcacaatataatatcaaatttaaccttaatactttacatgaatatgagtcacttttggcttttctaagtccagcctcccattcttaattgacttggtttcaggtacatgacatgtatctaaatataaagtactgttatagtagaggtaggtggaattctaatattccctgctctttagatttatattttatttaatataaagtttattatttataccctttttaatgcaaagctaatatttagttatatgtatgatttttaataaaaattactttactttttcctatgaatttaaaacatttgatgttggcattttatacaggcaggttgccaaatttaattatgttacactaagttaaacacagcacttaattacctcaaatccagatttctcttaatctgtgtgtacataaaaggaataagtccaaattaatttatagtttagtgttgcactataggtaatattcttttgttatttctagtttttatggaatccttttctttcaagattctaaataata

SEQ ID NO: 16603 - DNA, 922 bp, Homo sapiens
attcaccgcctgtctttcctgaacacctcaccatgtgtacgggaaaatgtgcccgctgtgtggggctctccctcattaccctctgcctcgtctgcattgtggccaacgccctcctgctggtacctaatggggagacctcctggaccaacaccaaccatctcagcttgcaagtctggctcatgggcggcttcattggcgggggcctaatggtactgtgtccagggattgcagccgttcgggcagggggcaagggctgctgtggtgctgggtgctgtggaaaccgctgcaggatgctgcgctcggtcttctcctcggcgttcggggtgcttggtgccatctactgcctctcggtgtctggagctgggctccgaaatggacccagatgcttaatgaacggcgagtggggctaccacttcgaagacaccgcgtaaggtttagcctgtattcgtgtcctccattctctgcctcttccctcccgcccttcccccgtggactgggacacctgggcgggactcgacttcgagggcactcgctccacgtgggctacctgggccttagcaaatcccctgggacgtattcttgggggcggggtgcgcacgcgcacgctgccttctcccacgtggcctcacccctcccacaggggagcttacttgctcaaccgcactctatgggatcggtgcgaggcgccccctcgcgtggtcccctggaatgtgacgctcttctcgctgctggtggccgcctcctgcctggagatagtactgtgtgggatccagctggtgaacgcgaccattggtgtcttctgcggcgattgcaggaaaaaacaggacacacctcactgaggctccactgaccgccgggttacacctgctccttcctggacgctcactcccttgctcgctagaataaactgctttgcgctctc

SEQ ID NO: 16604 - DNA, 709 bp, Homo sapiens
attcaccgcctgtctttcctgaacacctcaccatgtgtacgggaaaatgtgcccgctgtgtggggctctccctcattaccctctgcctcgtctgcattgtggccaacgccctcctgctggtacctaatggggagacctcctggaccaacaccaaccatctcagcttgcaagtctggctcatgggcggcttcattggcgggggcctaatggtactgtgtccagggattgcagccgttcgggcagggggcaagggctgctgtggtgctgggtgctgtggaaaccgctgcaggatgctgcgctcggtcttctcctcggcgttcggggtgcttggtgccatctactgcctctcggtgtctggagctgggctccgaaatggacccagatgcttaatgaacggcgagtggggctaccacttcgaagacaccgcgggagcttacttgctcaaccgcactctatgggatcggtgcgaggcgccccctcgcgtggtcccctggaatgtgacgctcttctcgctgctggtggccgcctcctgcctggagatagtactgtgtgggatccagctggtgaacgcgaccattggtgtcttctgcggcgattgcaggaaaaaacaggacacacctcactgaggctccactgaccgccgggttacacctgctccttcctggacgctcactcccttgctcgctagaataaactgctttgcgctctc

SEQ ID NO: 16605 - DNA, 1189 bp, Homo sapiens
agggattctcagagggatctgtgactcaaaaaaagttgaggatcattgcttagccgggctctcatctcctgaatcagggatccagcacagcacaggaaatagaagtcagaaatagagaaagattgtatgggggaaggaaatgtgaagtgctgagatggtgccacagcatctttgggtccagagttctctctcagcttaggtaagaccatgtctgagatggaagagagaggggtagaaggagagcaggatggaatgtcctcagaaaggttctgtcaagcaggggtaggcagaaggtaggcagagtcaaattcttctccaatctgaagtagctcacagattgttccaccaatctgtgcaacctctctctaacctaggaggttgttgaggttagaacccagaaaagaactaggaaatgtgaagcctccatttcagagaatcctttgctggaagccaggcatttcactgaagtccatttactccctggaatttctgctcctttctatcagtccctgaggcagaggctgtaaggacattgggagaggggactgagaagaaagagtaaaaacaaagaaaaaccccaacatcctgaatcaggtgcattagagttaatgaagaatgtaaggaccaataacttagcccagtccccactgaaagttcagagtggatgcattggaagatttctcctttcttacaggtcgtgtcctgcaactgaaaggccctgggagagagagccgtgagggcatggcagtgaggatggcagtgtggtggaaagggggagttttcaatcagacagccatgagctcaaatagctagttactatttactaactagctctgtgcacttgagcacttactctctttgacctttagtttcaccagctaagatgcctctctactttatagggttgatgtaaggattaaataagaaaatatatataaagccactgacatagaataggccctcaataaatgttattttcttctctttgaactgctgtcccaccctgggcagagcctccattagattgtccccatgatgtggtaccatacatccctgcacatgggccacaaaacttctgcatacacaccacccactcatgtccttggctgcatttgcacactcatcagcacacacacagcagcctgtgccatcacagctgagctgagggcagtcttcccgacaggtaaga

SEQ ID NO: 16606 - DNA, 2036 bp, Homo sapiens
aggtagacattgataaatgtttctgatttacatttgttggaaatattatgactgttcacatctcaataggttgatttttctgtgttgtccaagttatagatttctaatgctaagtacagttccatgttggtagtgtgcgtagcacagtaagatgtttgtggtgccagtgggcttgtgtttatattgtgtagatgttctggaattccagctctagagaagatgtaaattaatagaaatcaccacttaataatatgtacacaggattgatattatgtggaagcatgattcaggaaagtagatgacttattcataaatatgaagcactgttacatgtaaggccatgttctagccacagtgaatgatagaaaaaggaaggaaggggcatggtgcctgggctcaaggaactcacagtttgatagaggaagcatcacagcaaaagttggggccacttacaccatggcagttacagaaggccaggagctcagtcatgagaacatcaccttcccctgcagaagagttgcgctaagttgcccagaatcatattctgtaccttcatctctcaaccttccccagtggcaggaaagggtcaagcaagacccattccctctctagtgggacaaactgattctgtttaactctcatatgcctgggagcaagctgaggtggaatttgggttcccctatctctactcctaattgtaaatgggctgtctagacatgtgttacattaatttgatgaactttgttctgaagaaatggaaggtctcccccccattttagaccaacactacctgtctccctgcattttatttgttttcacctggtacatgtaagtcaaaatgaataatcatgttctgaccaatgtgtcttttagatcacataacattgcctttatgaagattcatagaaaaaggtttttttatctagatctcagtgccaaggaaagctctgatcctaagcgcagtatgtgtacacacacacgtctacatgtgtgtgtagatctgtatgtatgtattacaaacactgtgatttttgtaacttaagctgctttttctctctttgttctggctgctggaaagttcaacaaaacttacagcccacctcaaccaactaccccaacctatatttatttaatttcatcttatttccttgtaaattgtgtcaaatcctgtttttgaaaagcagcatagactgacaacttttcactatcatcttatcgaaggcattttggaaactggggtcgtatgtcccacctaggcttgctttgttactgccacaaatacctccagttcttaccagtgatgttattatgcattcaacctaattcattcatctggaaagaaacagttttttaaaaagggaaacctcacacgtaaatggctcagggcagcctggccttggtggaatgagcatgagactggaagctgaaagaagcaagttttaatcttgtcactaaatgagtgttgtttgacacatcatagcctctctgggcctcggctcctcatctgaagagaagttgaacttaactgctaagttgctctggctctaatgtttcatgaggctgtggagcgtgatatagatgcggaagaggttagaagaccaggctgccggcccagctgtcctgtgcctgccacatctggccataccaaatccatcgcatgcttcaggaaagggaggggatgctgtgacagcaaactcagcccaggagcttgttggggaaggagaaagggcaagtccctcgtggtccacagcaggcaccccccaagcacctcgataaccagtggcaggtaggctgaagtgaaggaagcctctgtcaggaggtctggcgcccagtgacagacaagacagctgtgagggagctggggcagccctggctaaaggaatgtctgagtaacttgtgaaactggaagcctctgcctctgaatgcattccaagacctggtgcaaatggatgtccattcattgttttgtatcagtgttcacttagatgtcttcttgaaaacttgtttgtggaataaatgtctaaaataaatggctc

SEQ ID NO: 16607 - DNA, 1175 bp, Homo sapiens
gagcgtgaaggcctgggcgagcggaagggtgggagagaggggctaggccggggagggaagcgctggggccggggccggctttccaggagccggcgggagcggggtgcgtaagaggcgggcgaggaagaaccggcgggcaacgggaagggcagaggtggatctctccctcagcgacccctctcgccgagtgaagggtcgagggtttggggcacaaagggcgcagaacgttttttcctgtgagaggaacattaagactcctgggagggctggggctaacgcctccgagagccccacctggtcagcctagggttagacgtgtagccagggtgctgggagggggccgctgctgggccccagatagaggggtagaggccgctcaatcacggagccaggccccacctgctgtagaaaccgccaccgagagccggccgggcttgctgcacgctctggattccgcctgcctataggcgaggcacaagggactgcgagaccaggcctgaaggcagagaggtcagcaggctcgggggcctctgctccagcggacaacaagcgcaccgggcgggaacggccgcctccccaggcgctgcagcctagctctcatgtgacccacggaacttagcccctctgttctgtttgcatacctgcaaattgtgggcattcacgccgggactgccaactcaccaggttatttatagtgacaagagagtgagacagtgggcttgaaagtgttttccagaccaaggctctgtcccacatataggtggattaactgtctggcaaaggcaggaatccattgaagaggccatctccacattcagaaccaagaatgtggcagaaagaatgttctaggacttccaagcctcgtcattaagcaaaagcattaagcaaaccccacagcttctgctttgtactctggaaaatgccagccacccatgaggagagaccaccctgctagccacagggagaggctatgtgaaaagaaagagatgcctggccagctctagctcttcagctcatcccagctgagctaccagacacatgagtggaaaagcccttaggaagttccagctccagcagacaccatactgaacagaggagagataagccatccccacggagcactgccaaaatgacggcattgtgaacaaataaatgatcattgttttaaggcaaaa

SEQ ID NO: 16608 - DNA, 1103 bp, Homo sapiens
gagcgtgaaggcctgggcgagcggaagggtgggagagaggggctaggccggggagggaagcgctggggccggggccggctttccaggagccggcgggagcggggtgcgtaagaggcgggcgaggaagaaccggcgggcaacgggaagggcagaggtggatctctccctcagcgacccctctcgccgagtgaagggtcgagggtttggggcacaaagggcgcagaacgttttttcctgtgagaggaacattaagactcctgggagggctggggctaacgcctccgagagccccacctggtcagcctagggttagacgtgtagccagggtgctgggagggggccgctgctgggccccagatagaggggtagaggccgctcaatcacggagccaggccccacctgctgtagaaaccgccaccgagagccggccgggcttgctgcacgctctggattccgcctgcctataggcgaggcacaagggactgcgagaccaggcctgaaggcagagaggtcagcaggctcgggggcctctgctccagcggacaacaagcgcaccgggcgggaacggccgcctccccaggcgctgcagcctagctctcatgtgacccacggaacttagcccctctgttctgtttgcatacctgcaaattgtgggcattcacgccgggactgccaactcaccaggttatttatagtgacaagagagtgagacagtgggcttgaaagtgttttccagaccaaggctctgtcccacatataggtggattaactgtctggcaaaggcaggaatccattgaagaggccatctccacattcagaaccaagcttctgctttgtactctggaaaatgccagccacccatgaggagagaccaccctgctagccacagggagaggctatgtgaaaagaaagagatgcctggccagctctagctcttcagctcatcccagctgagctaccagacacatgagtggaaaagcccttaggaagttccagctccagcagacaccatactgaacagaggagagataagccatccccacggagcactgccaaaatgacggcattgtgaacaaataaatgatcattgttttaaggcaaaa

SEQ ID NO: 16609 - DNA, 604 bp, Homo sapiens
cagcttaagcagcaatatgctgagcggtgaggctgtgttgatgaagaaggaagcagcatcatacctggcatggaagctgtcaggaggtggaggttggggagaaaagagataatggtatggtgagatgtctactgaactgctcctgccaaggcccctccccatgtactctcaacgaaagttgcagagccacctctcaacaacccatgaagtgtctggagctccaccctctgctcaagaggaacggcacatgacccaggcctatgccaatcagcatttcacattcctcatggttggttcaaaggtgcaagaagagttgttgatttttcagcctgtccagctttgtagttgctgttaagatagaatggacttccaagctccttacgtgcagaagcagaaaccagaggtcctatcaaaatagttttaaattgtattaaacatacacaaaagtagagcaatgtgctgaatccctatgtatccatcacctaggttcaataattattataattttgctaattttgagaagcagtttaaaaactcatagagaccagtgcttaacagttaaaaaaacagggagttaaaatcgtcattcaaataatttgggagg

SEQ ID NO: 16610 - DNA, 706 bp, Homo sapiens
cgcagtgccggcgtcatggcggcctccgcgcacggctctgtctgggggccgttgcggcttggcatccccggcctgtgctgccgccggccgcctctgggtctgtacgcgcgcatgcggcggctgcccgggccggaggtgtctgggcggagcgtggctgcggccagcggaccgggcgcctggggcactgaccactactgcctggagctgctgcggaaacgggattatgaaggttatttatgctccctgctgctccctgcagaatcccgaagctctgtttttgcactgagggcctttaatgtggaactggctcaggctgattactcttgctgctgtcttgctgtactgtatgccactgggatctgaacactaaacattgctaagaaacccacccaccaccaggatatttggaagtaacttcacatatggaaaagttaaagactcagtctctgagaaaacaattggactgatgcgaatgcagttttggaaaaaaactgtggaagatatatactgtgacaatccaccacatcagcctgtggccattgaactatggaaggttgtcccagctttggacagcggaaactccttcacagcggctgctatgtccttgtgacacgcttccgtcattttttggagcactttcttattttctgacacaataagatattctaggatccttttgaatctctcccctgcctcacctttggaa

SEQ ID NO: 16611 - DNA, 1941 bp, Homo sapiens
caaaaaaataaacttaacattgatgcagtacttttatttgatctaccatctggtttccagttttctcaaatgacccagtaaggtcttttatggcattttttcccccttctgtatgggatctaatctaggatcatgtattacatttagttttctgtctctttagcctcctttattctggaacatttccatagcctttctttgcgttttgtgacattgacatattttaagcaatactattccttttaagaattaaaatgtttctcatttggggtttattttatttttcatcaggtttatattaaacttatggattcctagcgtaatattacctaagtggtctgtgtcctcttcagagtcagaaggaggcatgaaatatccgtctgactcccagcagtaatgttaattttagtcactgagtcaagatgttaatactttttcccttgctactaataagcagcctgtgaggagaccttttaagaccatgttcctcatcaaaatttacctcctagatttagcttgtgttggtgattcttgcctgaacctaagaaggccattttttttttttttagatggagtttcgctcttgtcgcccaggctagagtgtggtggtgtgatcttggctcactgcaacctctgcctctcaggtttaagcgattctcctgcctcagtctcctgagtagctgggattacaggcacccaccaccacacccggctaattttttgtatttttagtagagacggggtttcatcatgttagccaggctggtcttgaactcctgacctcaggtgatccaccctccttggcctcccaaagtttaaggtttacagatgtgagtcaccgtgcctgaccagaaggccattcttagtagtgagtgagggagacaatctaataatcttctttttaaaaattacttaaagaatgaatgaatgaatttatttaaaagtacatgcagtaaaattctctctttgttgtgttctataggttccaaaaaatgtagtcatgtatttatcaccatagtcataatacagaacagttacattaactcaaaaaattccctcaaagatactgattttttagacagtagacaatgcatttgctaaagtttttaaaccctgtttataggttaaagactcagtctctgagaaaacaattggactgatgcgaatgcagttttggaaaaaaactgtggaagatatatactgtgacaatccaccacatcagcctgtggccattgaactatggaaggctgttaaaagacataatctgactaaaagatggcttatgaaaatcgtcgatgaaagagaaaaaaatctggatgacaaagcatatcgtaatatcaaggaactggaaaattatgctgaaaacacacagagctctcttctttacttaacactagaaatattgggtataaaggatcttcatgcagatcatgctgcaagtcatattggaaaagcacaaggcattgtcacttgcttgagagcaacaccatatcatgggagcagaagaaaggtgttccttcccatggatatttgtatgctgcatggtgtttcacaagaggactttctacggaggaaccaagataaaaatgtgagagatgtaatatatgacattgccagtcaagcacacttgcacctaaagcatgctaggtcctttcacaaaactgttcctgtgaaagcatttcctgcttttcttcagacggtttctctagaggactttctaaagaaaattcagcgagtggattttgatatattccacccatctttacagcagaagaatacattacttccattatatttgtatattcagtcatggagaaaaacatattaaaataatttcatggcactgatgttaattctagtctattagttttataacaagttaggattcttatttaggaacaacaggaaatgactgttaaggagaaaatgaatttattgaat

SEQ ID NO: 16612 - DNA, 1912 bp, Homo sapiens
caaaaaaataaacttaacattgatgcagtacttttatttgatctaccatctggtttccagttttctcaaatgacccagtaaggtcttttatggcattttttcccccttctgtatgggatctaatctaggatcatgtattacatttagttttctgtctctttagcctcctttattctggaacatttccatagcctttctttgcgttttgtgacattgacatattttaagcaatactattccttttaagaattaaaatgtttctcatttggggtttattttatttttcatcaggtttatattaaacttatggattcctagcgtaatattacctaagtggtctgtgtcctcttcagagtcagaaggaggcatgaaatatccgtctgactcccagcagtaatgttaattttagtcactgagtcaagatgttaatactttttcccttgctactaataagcagcctgtgaggagaccttttaagaccatgttcctcatcaaaatttacctcctagatttagcttgtgttggtgattcttgcctgaacctaagaaggccattttttttttttttagatggagtttcgctcttgtcgcccaggctagagtgtggtggtgtgatcttggctcactgcaacctctgcctctcaggtttaagcgattctcctgcctcagtctcctgagtagctgggattacaggcacccaccaccacacccggctaattttttgtatttttagtagagacggggtttcatcatgttagccaggctggtcttgaactcctgacctcaggtgatccaccctccttggcctcccaaagtttaaggtttacagatgtgagtcaccgtgcctgaccagaaggccattcttagtagtgagtgagggagacaatctaataatcttctttttaaaaattacttaaagaatgaatgaatgaatttatttaaaagtacatgcagtaaaattctctctttgttgtgttctataggttccaaaaaatgtagtcatgtatttatcaccatagtcataatacagaacagttacattaactcaaaaaattccctcaaagatactgattttttagacagtagacaatgcatttgctaaagtttttaaaccctgtttataggttaaagactcagtctctgagaaaacaattggactgatgcgaatgcagttttggaaaaaaactgtggaagatatatactgtgacaatccaccacatcagcctgtggccattgaactatggaaggctgttaaaagacataatctgactaaaagatggcttatgaaaatcgtcgatgaaagagaaaaaaatctggatgacaaagcatatcgtaatatcaaggaactggaaaattatgctgaaaacacacagagctctcttctttacttaacactagaaatattgggtataaaggatcttcatgcagatcatgctgcaagtcatattggaaaagcacaaggcattgtcacttgcttgagagcaacaccatatcatgggagcagaagaaaggtgttccttcccatggatatttgtatgctgcatggtgtttcacaagaggactttctacggaggaaccaagataaaaatgtgagagatgtaatatatgacattgccagtcaagcacacttgcacctaaagcatgctaggtcctttcacaaaactgttcctgtgaaagcatttcctgcttttcttcagacggtttctctagaggactttctaaagaaaattcagcgagtggattttgatatattccacccatctttacagcagaagaatacattacttccattatatttgtatattcagtcatggagaaaaacatattaaaataatttcatggcactgtaaccatccttcaaaaaatttgagcaaagatagtaggcctaagtgcaatatagatggacttgcaga

SEQ ID NO: 16613 - DNA, 1892 bp, Homo sapiens
gagcgtgaaggcctgggcgagcggaagggtgggagagaggggctaggccggggagggaagcgctggggccggggccggctttccaggagccggcgggagcggggtgcgtaagaggcgggcgaggaagaaccggcgggcaacgggaagggcagaggtggatctctccctcagcgacccctctcgccgagtgaagggtcgagggtttggggcacaaagggcgcagaacgttttttcctgtgagaggaacattaagactcctgggagggctggggctaacgcctccgagagccccacctggtcagcctagggttagacgtgtagccagggtgctgggagggggccgctgctgggccccagatagaggggtagaggccgctcaatcacggagccaggccccacctgctgtagaaaccgccaccgagagccggccgggcttgctgcacgctctggattccgcctgcctataggcgaggcacaagggactgcgagaccaggcctgaaggcagagaggtcagcaggctcgggggcctctgctccagcggacaacaagcgcaccgggcgggaacggccgcctccccaggcgctgcagcctagctctcatgtgacccacggaacttagcccctctgttctgtttgcatacctgcaaattgtgggcattcacgccgggactgccaactcaccaggttatttatagtgacaagagagtgagacagtgggcttgaaagtgttttccagaccaaggctctgtcccacatataggtggattaactgtctggcaaaggcaggtctcttcttcggcctctctgacatggtgccagccctactggagtcagcaggagtccagcacaacagatggtggtcagtggtgacttcggcacaggcagttcgtgaggagtggttggtggccatggagtcctgactggagtaggttaaaaagaaggaggaaaatcacaagaaagagagactggaggaaacgggattatgaaggttatttatgctccctgctgctccctgcagaatcccgaagctctgtttttgcactgagggcctttaatgtggaactggctcaggctgttaaagactcagtctctgagaaaacaattggactgatgcgaatgcagttttggaaaaaaactgtggaagatatatactgtgacaatccaccacatcagcctgtggccattgaactatggaaggctgttaaaagacataatctgactaaaagatggcttatgaaaatcgtcgatgaaagagaaaaaaatctggatgacaaagcatatcgtaatatcaaggaactggaaaattatgctgaaaacacacagagctctcttctttacttaacactagaaatattgggtataaaggatcttcatgcagatcatgctgcaagtcatattggaaaagcacaaggcattgtcacttgcttgagagcaacaccatatcatgggagcagaagaaaggtgttccttcccatggatatttgtatgctgcatggtgtttcacaagaggactttctacggaggaaccaagataaaaatgtgagagatgtaatatatgacattgccagtcaagcacacttgcacctaaagcatgctaggtcctttcacaaaactgttcctgtgaaagcatttcctgcttttcttcagacggtttctctagaggactttctaaagaaaattcagcgagtggattttgatatattccacccatctttacagcagaagaatacattacttccattatatttgtatattcagtcatggagaaaaacatattaaaataatttcatggcactgatgttaattctagtctattagttttataacaagttaggattcttatttaggaacaacaggaaatgactgttaaggagaaaatgaatttattgaat

SEQ ID NO: 16614 - DNA, 2135 bp, Homo sapiens
gagcgtgaaggcctgggcgagcggaagggtgggagagaggggctaggccggggagggaagcgctggggccggggccggctttccaggagccggcgggagcggggtgcgtaagaggcgggcgaggaagaaccggcgggcaacgggaagggcagaggtggatctctccctcagcgacccctctcgccgagtgaagggtcgagggtttggggcacaaagggcgcagaacgttttttcctgtgagaggaacattaagactcctgggagggctggggctaacgcctccgagagccccacctggtcagcctagggttagacgtgtagccagggtgctgggagggggccgctgctgggccccagatagaggggtagaggccgctcaatcacggagccaggccccacctgctgtagaaaccgccaccgagagccggccgggcttgctgcacgctctggattccgcctgcctataggcgaggcacaagggactgcgagaccaggcctgaaggcagagaggtcagcaggctcgggggcctctgctccagcggacaacaagcgcaccgggcgggaacggccgcctccccaggcgctgcagcctagctctcatgtgacccacggaacttagcccctctgttctgtttgcatacctgcaaattgtgggcattcacgccgggactgccaactcaccaggttatttatagtgacaagagagtgagacagtgggcttgaaagtgttttccagaccaaggctctgtcccacatataggtggattaactgtctggcaaaggcaggtctcttcttcggcctctctgacatggtgccagccctactggagtcagcaggagtccagcacaacagatggtggtcagtggtgacttcggcacaggcagttcgtgaggagtggttggtggccatggagtcctgactggagtaggttaaaaagaaggaggaaaatcacaagaaagagagactggaggaaacgggattatgaaggttatttatgctccctgctgctccctgcagaatcccgaagctctgtttttgcactgagggcctttaatgtggaactggctcaggctgttaaagactcagtctctgagaaaacaattggactgatgcgaatgcagttttggaaaaaaactgtggaagatatatactgtgacaatccaccacatcagcctgtggccattgaactatggaaggtctgcacaccagcagaggcaggcccagtttctgggccccagattgacttcacagagccccagtaaagatggaaagccagaaccccccaactggggattgagaagaaaaagtggatgggaagctgctgttaaaagacataatctgactaaaagatggcttatgaaaatcgtcgatgaaagaagtctcactcttgtcgcccaggctggagtacaatggcacgaccttggctcactacaacctccacctcccgggttcaagtgattctcctgcctcagcttcctgagtagctgggattacaggaaaaaaatctggatgacaaagcatatcgtaatatcaaggaactggaaaattatgctgaaaacacacagagctctcttctttacttaacactagaaatattgggtataaaggatcttcatgcagatcatgctgcaagtcatattggaaaagcacaaggcattgtcacttgcttgagagcaacaccatatcatgggagcagaagaaaggtgttccttcccatggatatttgtatgctgcatggtgtttcacaagaggactttctacggaggaaccaagataaaaatgtgagagatgtaatatatgacattgccagtcaagcacacttgcacctaaagcatgctaggtcctttcacaaaactgttcctgtgaaagcatttcctgcttttcttcagacggtttctctagaggactttctaaagaaaattcagcgagtggattttgatatattccacccatctttacagcagaagaatacattacttccattatatttgtatattcagtcatggagaaaaacatattaaaataatttcatggcactgatgttaattctagtctattagttttataacaagttaggattcttatttaggaacaacaggaaatgactgttaaggagaaaatgaatttattgaat

SEQ ID NO: 16615 - DNA, 1326 bp, Homo sapiens
cgcagtgccggcgtcatggcggcctccgcgcacggctctgtctgggggccgttgcggcttggcatccccggcctgtgctgccgccggccgcctctgggtctgtacgcgcgcatgcggcggctgcccgggccggaggtgtctgggcggagcgtggctgcggccagcggaccgggcgcctggggcactgaccactactgcctggagctgctgcggaaacgggattatgaaggttatttatgctccctgctgctccctgcagaatcccgaagctctgtttttgcactgagggcctttaatgtggaactggctcaggctgttaaagactcagtctctgagaaaacaattggactgatgcgaatgcagttttggaaaaaaactgtggaagatatatactgtgacaatccaccacatcagcctgtggccattgaactatggaagtgattgccaaaagagggtttctgtaacaggagccacccacagacctgacagtggtacacctcttctcaggtctgcacaccagcagaggcaggcccagtttctgggccccagattgacttcacagagccccagtaaagatggaaagccagaaccccccaactggggattgagaagaaaaagtggatgggaagctgctgttaaaagacataatctgactaaaagatggcttatgaaaatcgtcgatgaaagagaaaaaaatctggatgacaaagcatatcgtaatatcaaggaactggaaaattatgctgaaaacacacagagctctcttctttacttaacactagaaatattgggtataaaggatcttcatgcagatcatgctgcaagtcatattggaaaagcacaaggcattgtcacttgcttgagagcaacaccatatcatgggagcagaagaaaggtgttccttcccatggatatttgtatgctgcatggtgtttcacaagaggactttctacggaggaaccaagataaaaatgtgagagatgtaatatatgacattgccagtcaagcacacttgcacctaaagcatgctaggtcctttcacaaaactgttcctgtgaaagcatttcctgcttttcttcagacggtttctctagaggactttctaaagaaaattcagcgagtggattttgatatattccacccatctttacagcagaagaatacattacttccattatatttgtatattcagtcatggagaaaaacatattaaaataatttcatggcactgatgttaattctagtctattagttttataacaagttaggattcttatttaggaacaacaggaaatgactgttaaggagaaaatgaatttattgaat

SEQ ID NO: 16616 - DNA, 1211 bp, Homo sapiens
caaaaaaataaacttaacattgatgcagtacttttatttgatctaccatctggtttccagttttctcaaatgacccagtaaggtcttttatggcattttttcccccttctgtatgggatctaatctaggatcatgtattacatttagttttctgtctctttagcctcctttattctggaacatttccatagcctttctttgcgttttgtgacattgacatattttaagcaatactattccttttaagaattaaaatgtttctcatttggggtttattttatttttcatcaggtttatattaaacttatggattcctagcgtaatattacctaagtggtctgtgtcctcttcagagtcagaaggaggcatgaaatatccgtctgactcccagcagttaaagactcagtctctgagaaaacaattggactgatgcgaatgcagttttggaaaaaaactgtggaagatatatactgtgacaatccaccacatcagcctgtggccattgaactatggaaggctgttaaaagacataatctgactaaaagatggcttatgaaaatcgtcgatgaaagagaaaaaaatctggatgacaaagcatatcgtaatatcaaggaactggaaaattatgctgaaaacacacagagctctcttctttacttaacactagaaatattgggtataaaggatcttcatgcagatcatgctgcaagtcatattggaaaagcacaaggcattgtcacttgcttgagagcaacaccatatcatgggagcagaagaaaggtgttccttcccatggatatttgtatgctgcatggtgtttcacaagaggactttctacggaggaaccaagataaaaatgtgagagatgtaatatatgacattgccagtcaagcacacttgcacctaaagcatgctaggtcctttcacaaaactgttcctgtgaaagcatttcctgcttttcttcagacggtttctctagaggactttctaaagaaaattcagcgagtggattttgatatattccacccatctttacagcagaagaatacattacttccattatatttgtatattcagtcatggagaaaaacatattaaaataatttcatggcactgatgttaattctagtctattagttttataacaagttaggattcttatttaggaacaacaggaaatgactgttaaggagaaaatgaatttattgaat

SEQ ID NO: 16617 - DNA, 1489 bp, Homo sapiens
gagcgtgaaggcctgggcgagcggaagggtgggagagaggggctaggccggggagggaagcgctggggccggggccggctttccaggagccggcgggagcggggtgcgtaagaggcgggcgaggaagaaccggcgggcaacgggaagggcagaggtggatctctccctcagcgacccctctcgccgagtgaagggtcgagggtttggggcacaaagggcgcagaacgttttttcctgtgagaggaacattaagactcctgggagggctggggctaacgcctccgagagccccacctggtcagcctagggttagacgtgtagccagggtgctgggagggggccgctgctgggccccagatagaggggtagaggccgctcaatcacggagccaggccccacctgctgtagaaaccgccaccgagagccggccgggcttgctgcacgctctggattccgcctgcctataggcgaggcacaagggactgcgagaccaggcctgaaggcagagaggtcagcaggctcgggggcctctgctccagcggacaacaagcgcaccgggcgggaacggccgcctccccaggcgctgcagcctagctctcatgtgacccacggaacttagcccctctgttctgtttgcatacctgcaaattgtgggcattcacgccgggactgccaactcaccaggttatttatagtgacaagagagtgagacagtgggcttgaaagtgttttccagaccaaggctctgtcccacatataggtggattaactgtctggcaaaggcaggtctcttcttcggcctctctgacatggtgccagccctactggagtcagcaggagtccagcacaacagatggtggtcagtggtgacttcggcacaggcagttcgtgaggagtggttggtggccatggagtcctgactggagtaggttaaaaagaaggaggaaaatcacaagaaagagagactggaggtggaggttggggagaaaagagataatggtatggtgagatgtctactgaactgctcctgccaaggcccctccccatgtactctcaacgaaagttgcagagccacctctcaacaacccatgaagtgtctggagctccaccctctgctcaagaggaacggcacatgacccaggcctatgccaatcagcatttcacattcctcatggttggttcaaaggtgcaagaagagttgttgatttttcagcctgtccagctttgtagttgctgttaagatagaatggacttccaagctccttacgtgcagaagcagaaaccagaggtcctatcaaaatagttttaaattgtattaaacatacacaaaagtagagcaatgtgctgaatccctatgtatccatcacctaggttcaataattattataattttgctaattttgagaagcagtttaaaaactcatagagaccagtgcttaacagttaaaaaaacagggagttaaaatcgtcattcaaataatttgggagg

SEQ ID NO: 16618 - DNA, 683 bp, Homo sapiens
gacctgttcaacttcttcacaaaataatttcttaaaagacaacttgagctccccctcatggtacactacatttggggggtcggggtggggatgtttcattttccctgattgaaacagcctgtttgcattccaccaaatctagtaataaggccaggcaaacgtgattttgctaatccttttgtcttaaccaaagctttttatattatgagcagaagaggcttggcttttctggtactagctctgtgatacccttttactggtctaatagaaacttcttggatgtctttttctttctctcttttaaaattctcacttaaatagaaaaccatctcagggaaactaaaatagcctaaatacttgtaattattctttagttagttttttttttttttaagtcttgatcattttatgatctggtgatcactattctcttttttccaggtttctctagaggactttctaaagaaaattcagcgagtggattttgatatattccacccatctttacagcagaagaatacattacttccattatatttgtatattcagtcatggagaaaaacatattaaaataatttcatggcactgatgttaattctagtctattagttttataacaagttaggattcttatttaggaacaacaggaaatgactgttaaggagaaaatgaatttattgaat

SEQ ID NO: 16619 - DNA, 335 bp, Homo sapiens
tccacatcttaatcactcacctggtttcctaaatgtgtctgtaccgaagagtcaccaaggggcacttattaaagtacagattccagggtctacctcagagatagcaaatcagggtctctaggggagggacctagtttctgtggtggtttccactcatgagcctctgctccaatgagctgtatttgcctgtctgtctccaatcttggggacagcagtttttcctatggcctcacctttcttacaggtgcaagaagagttgttgatttttcagcctgtccagctttgtagttgctgttaagatagaatggacttccaagctccttacgtgcagaagc

SEQ ID NO: 16620 - DNA, 478 bp, Homo sapiens
atttgtatgaaatgcccagaatagacaaatccatgaagatgaaaagtagattagtggtttgccagggctgaggagggggggaaatgggaagtgtctgcttaatggatgcaacttttcttttgggggtcattaaaatattctggaattagatagtagtgatagctgcacaactttgtgtatatactaaaaaccactgaattgtattatttgaagggataaattttatggtatgttaattatgtctcaaaaaaaaccataaaggatgcattttttttcctggaatcattgctgatgtcattttctttttttttttttttttttgagacagagtctcactcttgtcgcccaggctggagtacaatggcacgaccttggctcactacaacctccacctcccgggttcaagtgattctcctgcctcagcttcctgagtagctgggattacaggtgcctaccacaatgcccagctgacttcttt

SEQ ID NO: 16621 - DNA, 248 bp, Homo sapiens
taactgtcttttttttctgtctgttacaggaaacgggattatgaaggttatttatgctccctgctgctccctgcagaatcccgaagctctgtttttgcactgagggcctttaatgtggaactggctcaggctggtattaagataccttaaaatattatttgcgaaatggtgatataaggtgtttaatgctgaacaataaagaaatatagttgtaatttatatgttagatgtgtttaaggtctctgcta

SEQ ID NO: 16622 - DNA, 869 bp, Homo sapiens
cctggccaagtgcggctctgctctccccagtcccggtccgcgaccacccggagcccgctccgccggccttgcgcggcgcgcccagggaaggcatttccagcccgcccacccaggactgttctagaaaaagtcttaaaggcctaccctcctactgatgacccagagactgtccctgcccagtcactgctactgttgaccttggctcctgcccagggatggaggctctcaactgggctggttctacatggaggtctcttcttcggcctctctgacatggtgccagccctactggagtcagcaggagtccagcacaacagatggtggtcagtggtgacttcggcacaggcagttcgtgaggagtggttggtggccatggagtcctgactggagtaggttaaaaagaaggaggaaaatcacaagaaagagagactggaggtggaggttggggagaaaagagataatggtatggtgagatgtctactgaactgctcctgccaaggcccctccccatgtactctcaacgaaagttgcagccacccattctcattttgtggatataattccctgctttagttttctgagcacaagaaatcaactttggctgcacattggaatatctgagaagcttaaaaatactgatgtttggaccaggtgcagtggctcacgcctgtaatcccagcactttgggaggcagaggcagagccacctctcaacaacccatgaagtgtctggagctccaccctctgctcaagaggaacggcacatgacccaggcctatgccaatcagcatttcacattcctcatggttggttcaaagtgaagcaactttcccagaagcaccacagtggacttgttctcaagtctaattg

SEQ ID NO: 16623 - DNA, 1133 bp, Homo sapiens
cgcagtgccggcgtcatggcggcctccgcgcacggctctgtctgggggccgttgcggcttggcatccccggcctgtgctgccgccggccgcctctgggtctgtacgcgcgcatgcggcggctgcccgggccggaggtgtctgggcggagcgtggctgcggccagcggaccgggcgcctggggcactgaccactactgcctggagctgctgcggaaacgggattatgaaggttatttatgctccctgctgctccctgcagaatcccgaagctctgtttttgcactgagggcctttaatgtggaactggctcaggctgttaaagactcagtctctgagaaaacaattggactgatgcgaatgcagttttggaaaaaaactgtggaagatatatactgtgacaatccaccacatcagcctgtggccattgaactatggaaggctgttaaaagacataatctgactaaaagatggcttatgaaaatcgtcgatgaaagagaaaaaaatctggatgacaaagcatatcgtaatatcaaggaactggaaaattatgctgaaaacacacagagctctcttctttacttaacactagaaatattgggtataaaggatcttcatgcagatcatgctgcaagtcatattggaaaagcacaaggcattgtcacttgcttgagagcaacaccatatcatgggagcagaagaaaggtgttccttcccatggatatttgtatgctgcatggtgtttcacaagaggactttctacggaggaaccaagataaaaatgtgagagatgtaatatatgacattgccagtcaagcacacttgcacctaaagcatgctaggtcctttcacaaaactgttcctgtgaaagcatttcctgcttttcttcagacggtttctctagaggactttctaaagaaaattcagcgagtggattttgatatattccacccatctttacagcagaagaatacattacttccattatatttgtatattcagtcatggagaaaaacatattaaaataatttcatggcactgatgttaattctagtctattagttttataacaagttaggattcttatttaggaacaacaggaaatgactgttaaggagaaaatgaatttattgaat

SEQ ID NO: 16624 - DNA, 1334 bp, Homo sapiens
cctggccaagtgcggctctgctctccccagtcccggtccgcgaccacccggagcccgctccgccggccttgcgcggcgcgcccagggaaggcatttccagcccgcccacccaggtctcttcttcggcctctctgacatggtgccagccctactggagtcagcaggagtccagcacaacagatggtggtcagtggtgacttcggcacaggcagttcgtgaggagtggttggtggccatggagtcctgactggagtaggttaaaaagaaggaggaaaatcacaagaaagagagactggaggaaacgggattatgaaggttatttatgctccctgctgctccctgcagaatcccgaagctctgtttttgcactgagggcctttaatgtggaactggctcaggctgattactcttgctgctgtcttgctgtactgtatgccactgggatctgaacactaaacattgctaagaaacccacccaccaccaggatatttggaagtaacttcacatatggaaaagttaaagactcagtctctgagaaaacaattggactgatgcgaatgcagttttggaaaaaaactgtggaagatatatactgtgacaatccaccacatcagcctgtggccattgaactatggaaggctgttaaaagacataatctgactaaaagatggcttatgaaaatcgtcgatgaaagagaaaaaaatctggatgacaaagcatatcgtaatatcaaggaactggaaaattatgctgaaaacacacagagctctcttctttacttaacactagaaatattgggtataaaggatcttcatgcagatcatgctgcaagtcatattggaaaagcacaaggcattgtcacttgcttgagagcaacaccatatcatgggagcagaagaaaggtgttccttcccatggatatttgtatgctgcatggtgtttcacaagaggactttctacggaggaaccaagataaaaatgtgagagatgtaatatatgacattgccagtcaagcacacttgcacctaaagcatgctaggtcctttcacaaaactgttcctgtgaaagcatttcctgcttttcttcagacggtttctctagaggactttctaaagaaaattcagcgagtggattttgatatattccacccatctttacagcagaagaatacattacttccattatatttgtatattcagtcatggagaaaaacatattaaaataatttcatggcactgatgttaattctagtctattagttttataacaagttaggattcttatttaggaacaacaggaaatgactgttaaggagaaaatgaatttattgaat

SEQ ID NO: 16625 - DNA, 1067 bp, Homo sapiens
ccttggcctcccaaagtgctgggattacaggcatgagctaccgcgcccaacttgaagcctttttgttttcagttaattttagtcagtatttttttgtgcagcttggaaagtgaagagtaactgtcttttttttctgtctgttacaggaaacgggattatgaaggttatttatgctccctgctgctccctgcagaatcccgaagctctgtttttgcactgagggcctttaatgtggaactggctcaggctgttaaagactcagtctctgagaaaacaattggactgatgcgaatgcagttttggaaaaaaactgtggaagatatatactgtgacaatccaccacatcagcctgtggccattgaactatggaaggctgttaaaagacataatctgactaaaagatggcttatgaaaatcgtcgatgaaagagaaaaaaatctggatgacaaagcatatcgtaatatcaaggaactggaaaattatgctgaaaacacacagagctctcttctttacttaacactagaaatattgggtataaaggatcttcatgcagatcatgctgcaagtcatattggaaaagcacaaggcattgtcacttgcttgagagcaacaccatatcatgggagcagaagaaaggtgttccttcccatggatatttgtatgctgcatggtgtttcacaagaggactttctacggaggaaccaagataaaaatgtgagagatgtaatatatgacattgccagtcaagcacacttgcacctaaagcatgctaggtcctttcacaaaactgttcctgtgaaagcatttcctgcttttcttcagacggtttctctagaggactttctaaagaaaattcagcgagtggattttgatatattccacccatctttacagcagaagaatacattacttccattatatttgtatattcagtcatggagaaaaacatattaaaataatttcatggcactgatgttaattctagtctattagttttataacaagttaggattcttatttaggaacaacaggaaatgactgttaaggagaaaatgaatttattgaat

SEQ ID NO: 16626 - DNA, 943 bp, Homo sapiens
cctggccaagtgcggctctgctctccccagtcccggtccgcgaccacccggagcccgctccgccggccttgcgcggcgcgcccagggaaggcatttccagcccgcccacccaggtctcttcttcggcctctctgacatggtgccagccctactggagtcagcaggagtccagcacaacagatggtggtcagtggtgacttcggcacaggcagttcgtgaggagtggttggtggccatggagtcctgactggagtaggttaaaaagaaggaggaaaatcacaagaaagagagactggaggtggaggttggggagaaaagagataatggtatggtgagatgtctactgaactgctcctgccaaggcccctccccatgtactctcaacgaaagttgcagttttctgagcacaagaaatcaactttggctgcacattggaatatctgagaagcttaaaaatactgatgtttggaccaggtgcagtggctcacgcctgtaatcccagcactttgggaggcagaggcagagccacctctcaacaacccatgaagtgtctggagctccaccctctgctcaagaggaacggcacatgacccaggcctatgccaatcagcatttcacattcctcatggttggttcaaaggtgcaagaagagttgttgatttttcagcctgtccagctttgtagttgctgttaagatagaatggacttccaagctccttacgtgcagaagcagaaaccagaggtcctatcaaaatagttttaaattgtattaaacatacacaaaagtagagcaatgtgctgaatccctatgtatccatcacctaggttcaataattattataattttgctaattttgagaagcagtttaaaaactcatagagaccagtgcttaacagttaaaaaaacagggagttaaaatcgtcattcaaataatttgggagg

SEQ ID NO: 16627 - DNA, 555 bp, Homo sapiens
gtcaggagttcaagaccagcctggccaacatggcgaaaccccatctctactaaaaaaaagaaaaaacactgccatgtatgagaaagtgactcagttttcacttagctttcagatacattatgtacatgtttggggcatgagatttatcgttctaatgttatattgtagctgggactacaggcgcccaccaccacgcccggctaattttttgtatttttttttttagtagagacagggtttcaccatgttggccaggctggtctcaatctcctgacctcgtgatccgcgcgtctcggcctcccaaggtgctgggattacaggcgtgagccacaggtgcctggccttctgatacttttttttaaacaagctcttgagggctttattagtcatttagcccacatttattgaatccctgctgcctacagactttgtcagggtttcagagacaccgctacccatggcctctaggagcttacagtgtagagaggttcttttgactattttttgatgataggtgaaacttactgtccctgtatgtggcttctattgaataaa

SEQ ID NO: 16628 - DNA, 542 bp, Homo sapiens
gcaacgacccccacacgccacgttggagagctggggctgtatcttgagaccctgaaaggacactgcttggttcaaatcccactctaccacttagcagctctatgaccttgggcgattttattcatttctcttatgatgggtttcttcttccataaaatagggtaatagagagtaatgattgcactgggtcattgtgaaactaagtgacatggtgtctggcacacatcaagcactaagtaagcgttacgttttctgccaacctggacaagggggttacagtgaatatgaagagatgcaggggaattccagaaatactccggatcaacacacccttcacgcaaacgagtctttctcgtctatatcttaatcagaacctcactctctctacagcccatttccctatggcaaaggattgagtcctatccaagaatccaagactctgaactgaccctgtaccatcactgacaggggatggtggagggggtgactcactgtgaccatgggggacccaggctctacctttggtgcaactgaggattcat

SEQ ID NO: 16629 - DNA, 568 bp, Homo sapiens
aggctcaatgacaaatgatttttataaaactcaattggaagtgccattagacaaattggtttaagaagtatcctttaattgcacattctaatgtggacaagataatcattaggtgaatagattttaggcaaattagcttttaataaattggtttagggaaaattgctcttttactttttacatgttgggagcatagaaatagaatctggaaattatcccaatgaccccccaggatggacattggtccagatgctggatggaactgatgcatcctggccttgagtgctgcagtatccctgcctcaggcagcaccatacaccaagcgatttagcaccctgagccagtgattctcagctccttgtatatgctgagcatttgggaagaatcttttttttttgagatggagtctcactctgtcacccagactggagtgtagtggcacaatctcggctcactgcaacctccacctcctgggttcaagcgattctcctgcctcagcctcccgagtagctgggattgcaggcacgtgccaccacgcccagctaatttttgtatttttagtagagac

SEQ ID NO: 16630 - DNA, 755 bp, Homo sapiens
tgagtttcaaatggaccttaattcatctgcaaaatgagaataatcaaaactcaacaaagtctaattcatacggctgtgtagcatatgtgaaaatgctttgtaaacattagaagtcttactaccaaagtcagtgggccgacagcattagcatcacctgggagcttatcagaaacgcagaatctcagatcatacctgagagcgaatgaatcaaaatctgcattttgacaagactacccagatgatttgtatgcacattaaagtttgataagcactgctatcatacgcgttatctcagaaaactcagctggacaaagagtctaatgattagagccttaaaagtttcctaggggaaaaaacatagtatgtctagcaatttttaagccttggtggggagggctggtgagggcattgtgaaaaaggcaatggggaaaaaatgtgaaaattggataaagtatttttttaaaaagacaactgtactttcatgaatttctttgtttagtccttggaacaacactttgaggtagatactgttgtctctattaatttatagatgagaaaactgagtcttagaggggaaatggggggctgaattcaaactttgtttgttctaatttcaatttttagctgtattgctttcaactgtgccatactggcattgtttgtgagtaggaatcctcacaaaaggatcagatttaatatgttaaattaaggagtatttcacatggccagcagtttcaaacttataatttttaata

SEQ ID NO: 16631 - DNA, 318 bp, Homo sapiens
agcaaatgatgaccacaaataatccatgcaatatatgtgtattatttttcttgatctcacttaaccttgagaaagaaaataattgaccagacttgctttctgatgtgacacaaaggacaagcccacatcagcccataggctataaaaacaactgacagatataataatgcacaaccactcgatatctatgtgaccttaaacaagttgcacaacctccctgtgcctcaggttcccctctgtagcaaactggtaacactgctgcttcatggggtcattgaaggattgatcaatgaatttttctttgctgtggcatgggcg

SEQ ID NO: 16632 - DNA, 451 bp, Homo sapiens
gaatctcttttccctaggagtcctctctctcctagagtgcaagttgtctaccagtagctgtacctgcctgaacatccataaatctgacaacgaatgtaaggaatctgagaattctatcgaagatatttcattaccagaacgcactgcaatgcctcgtagcattgtccgtgcacacactgtgaattccctaaacaaaaaagtccaaacacgtcacgtaacctgggctctgtgatttggcaatctatttcttgcagtatatgctcatctttatggaaaaagctttgtgggtgtgtgctgtgtctccaaccatgttgtctctatttggaattatggttggggtttgtaaaaagatctggaagatggttttttaaaaaatcctggcctgctgaacgaatagtttcttctgcaacatttgttgttaatataataaatattatcatataaataaaac

SEQ ID NO: 16633 - DNA, 347 bp, Homo sapiens
ctgacttatttgagcagcactgttctggcctgctaactttagggttagtttgggaccaggtcggaaatcacaattgcatgaattgcacattggaggccagggtggtgcacctctgggcaaatgaatttcctctcttagcattgatttccccagctgtaaaatgtggataataatagattgatgtcctctctaaattttgcagctgtaaacagtcccagccctgcaaactgaaagtttgttgctcttccctttaaaattactgtagggaccagcccacagggtcagtgggtctctccctgtgtgcggcgacgagagagtgtagaaataaagacacaagacgaagagat

SEQ ID NO: 16634 - DNA, 393 bp, Homo sapiens
gggcagggacccggacaggctcagaaccataaactcactaggtcttcacgtattgaccttatgatcgttgattcagggaagcaattaaattcctctctcagacaaagaactaagagcttgaactctttttttaccaactccaggcacccgtgaatattaatcttttttcaaattaattgtaaacatttcttctgagagggagtgactccatcaacgtatctcctttaataaaatccgagtggaaatgatgctgccaagaaatgccttggccctgcagccgctgatcttcagatgcatcgggcggcaactcatctgttactgcttcccagtttcagaacgcccagctccccaggccttaaaacaaattggaaagcaggggaataaaaaaacaaa

SEQ ID NO: 16635 - DNA, 248 bp, Homo sapiens
ggacaacatagcaagagaccccatctccacaaaaataaaaaaataaaaaaaaatagccaggagtagtggcatgagcctgagcccaggaggtcaagctgtagtgagccatgatcatgccactgcactccagcctgggcgagatcgagaccatgtctctagagaaagaaaatgacaaggacagtgaacccaagaaagtcataagatgccagctgtgcagcaagcatggaaagcagccagtccaaattagg

SEQ ID NO: 16636 - DNA, 745 bp, Homo sapiens
gtttttgattttacaggcttataggtgaaagtgacttcccttgtctccaatgaggctttggactttggacttttgagttaatgccagaatgagttaagattttgggggcctattggaaaggcatgattgtagtttgcaatgtgagaaggacatgagatttggagaggccagaggtggaatggtatagttcagatatttgacccagcccaaatctcttgttgaattgtaatccccaatgctggaggtggggccttccttgtatgatgtgtttggaacatgcaggcaaattcctcatggcttggtgctgttttcatgatagtgagtgagttctcctgagatgtggtcatttaaaagtgtatggcacctccccccactctctatctctcttgctcctgctctgctatatgagacacctgttccccgtttgccttccaccatgattgaaagctttgtgagacctcctcagaagccaagcagatgccagtgccatgctgcctgtatagcctgcagaaccacaagccaagtaaacctcttttctttataaattacttagtctcagatatttctttacagcaatgtaagaatggcctaatacaatagcctaaactaatttgagggaggtgatgtgtctcttgctacacaaagtatggttcatggactaacagcattggcgtcaccaggaggttgtcagaagtacagactttcagttcccttcccagacctaataaatcagactctccaaaaa

SEQ ID NO: 16637 - DNA, 565 bp, Homo sapiens
gtttttgattttacaggcttataggtgaaagtgacttcccttgtctccaatgaggctttggactttggacttttgagttaatgccagaatgagttaagattttgggggcctattggaaaggcatgattgtagtttgcaatgtgagaaggacatgagatttggagaggccagaggtggaatggtatagttcagatatttgacccagcccaaatctcttgttgaattgtaatccccaatgctggaggtggggccagtgggaggtaattaaatcacggggatggagttcccccttgctgttctcttggtagtgagtgagtcctcatgagatctggttgtttaaaagtgtgtagcacctcccccttctctcttttcctcctgctcctgccacgtaagacaaagctgcttcccctttgccttctgccatgattgtaagtgtccggaagcctccccagccatgcttcctgtacagcctgcagaaccatgggtcaattaaactgtttttctgtataaagtaccgcagtctcaggtagtcactatagcaatgtgtgtccaatagtgaggccga

SEQ ID NO: 16638 - DNA, 776 bp, Homo sapiens
agcgctcgggctggagcgcctgaagccgcgaccgccgcctcagccgcctcagccgcggtcgccgccgcttcggctgacttaggctccgccgccgcctcctcacccgcctcgccccgaccccgcccgggcctcccggcctctccccgccggcccgcgggctcgccgtccggcgcagggcagaattcacctgcaaagtcatctcggtcagcacttttctttgtgggaaggttttatcttgaatgcagtttctttggactgtctacaagagagaagctccccacgtggttccgtatggacagtgtgtcaccctcggggagcaggtgggctggcaggacaggcggccccaggccgggagaaggagacactcccaggtactctcgtctacccctgctggtgacctgcctgcccggccccgttctgttccagatgatggctcacctgtgaccctgcctgccctgcccagcttcgcccccatgtctgcctgtccccaacctcagtgctgtcggctgacctacctcagcccacgccctgccctcttttttcccaccccacggggccgatcctgacttctggttgctccctttgcttgaccgttctcttgaggttcttaaccctgaactgcacccgactcccattgacctcactcactgtgggccgccacgagggcccctcagagacgatgctaacggcctctcagatgctgacctgcttcatgtctatttccttttacagggtaatttgtagtggaatgagaaaaaaaagttgtatttcttaaa

SEQ ID NO: 16639 - DNA, 261 bp, Homo sapiens
acggggtttcactgtgttagccaggatggtctcgatctcctgacctcatgatctgcccgcctcggcctcccaaagtgctgggattacaggcatgagccaccgtgcctggcctatttatttatttatgactgtctacaagagagaagctccccacgtggttccgtgtaagtagtgcttcttatgatgctgtcacaggcgatatttttagactaaacgactctttcggtgtcagcagagttgaaagtcttgctctcaagggaa

SEQ ID NO: 16640 - DNA, 435 bp, Homo sapiens
attattaaacatgtaacaaggcttccatgcaaatcacatcatttgatattataagtttctgaaatgtttgttaacataatcacttcattaattttttcttttgaagcttccatgttctttgcaggcccgttgaataaccactgtggaccaccagatgtctgtaaatgtcacttgaggaagccctgatctataatacatattgagaaaggagaattgaggcagcatttgggttaattaaaattacactgaagtgaaatagctaagctaagagaagccactcaccactgtcctgtcttcatgcatatacttctttctgcatattattattattattatttgaaacagaatctcactcagggtagagtgcagtggcacagtctcggctcactgcaacctctgcctcctgggttcaagcgattctcgtgcctcagcctc

SEQ ID NO: 16641 - DNA, 734 bp, Homo sapiens
taagattagttgcgcatagtggcgcacacctgtaatgccagctgctcgggaggctgaggtggaaggatctcctgacccataaaaaaaaaaaaaaagtgacagcagtgctttactattaactacactctagactttatttggattttgctgtttttccactgacatcctctttcggccccaggatccaagccagggtcccaccttgcattaataaccctctcagcttaaggagtgctggacaggtctcctgtagaacatccccagcctcaggtcatctggtgtatttctcatgattaaagaaaggttactggttttaggagagaatcccacagaggtgagcctgcctctcacaccacatcttggggcacctgagatgcacacgtggctagtgagtggaaccttcactaccgggtcaggacggtatctgccagggtttccctgggaagctactattgtttgtttctttattatttggaagcaagtctctaagcctaccccaccctcaccaggtggaggtaattaagctgtatgctgctctatcatattgttagttattatctagttattttatacattcttttcttattccatttgtggtttggtggaattttgttgtattgccatttgatacctttctcttcctcctttgtatgattgttttatagggcctgtgagttttgtacttttgtgtgtattatggcaaataccaacttgtttttatgttaagactcctt

SEQ ID NO: 16642 - DNA, 477 bp, Homo sapiens
ggagaccacatttcatctagccctcttttttaaaagtaaatacttttcagcacttacaggagttaactgagctggggcatcatggtgtatagacgccctgacactggtcatcttggaattcatttagtttgtcagtgggtgccctgacattctgtcacaacatcaatttgggaacatggcattatatttttatctttgaacttttttctttttggatgacatttgattaatgcgtcatcttggaacacattatcttttttcttggttatgtgatcaggaagattaatcagtttttcctgttcttggtataattcctgcttttcacatacctgtcccttacagttctctatatatacccttcccttattacacagagagaaatatctatctatactttttacacaaaatatacttcaaaagaaacaaaacagccacaattattaactttttaaataaatgagaatttaattatatcct

SEQ ID NO: 16643 - DNA, 490 bp, Homo sapiens
gtgctacaattctgtccaaaacattaatgaaaattacagactagagaccctgacttagatgggttgctgtgagtgtgaggatttgcagtgctgggggagaggagaagctgtgttagaaacaggaaacatttctatgtacgcatgtgtgggaaattgccaaaagagataccacacaaaaaagacttgaatcttcaaaactctggtaacttcctgtgatttcttttctcgttctaagtcaatattcactttcatcatgaattttgtattactaattttgtcatctcatttttaaaaagggcatcacccaaaattgcacagcattgagtttcacaaactcggctccttcctgacatacaagaataatcaggctggctgggcacagtggctcacacctgtaatcccagcactttaggaggccgaggccggcagatcacctgaggtcaggagttcgagaccagcctggccaacatggtaaaaccctgtctctact

SEQ ID NO: 16644 - DNA, 427 bp, Homo sapiens
gtctccaacccccctttcccagacttgccctgccaagctctcacagatcctgcacaaggcctgctgaaccttttgtttcccaaagagcacacttggtgcctttgcaaaggatgtcccctctgcctgagctagttgttcagaaaacttgttctttaagaaccagcacaaatattgttaccctaacctctagggagcttcatcagtactttgttcgtacctccaaatggcaactacaagggccatgtcggtctctctttgcaaatgaggaggtagaaactatattctagtcaactttgtgccaggcgctatggatgtaattcaagaaacacaattggagatggcaatctaaaggttactgggccactataggtatgaactgaggcctcaacctgcagcttcccacactcaactgacttaaagcatcaaa

SEQ ID NO: 16645 - DNA, 406 bp, Homo sapiens
tacctccttttcactgtctctcactgtcctcattcctgaacttcctcctcactcagcataaattccatagttggtcattttagcccctctcttgccctttcccttgatgttcctgctcctctgtcacttcattggactttcccagcaatgcctcagtccgtggcagattcaaccctctgcctctctgcatctgtacccatgcagatgaatgtggcctgggaaaaaatagacaaccatgctggtaggtttcacttaaagttacagccatgaatctcaaatgagcttgtaccatgcttccctggcccattcactctgcactctcctggactatctcatacattccccaccaaactcccaacagttctccatcatcattctcagctggtgactttattctgacttcact

SEQ ID NO: 16646 - DNA, 347 bp, Homo sapiens
taacatgtgatttgtgatctttctaggctgacaaatgaatctcctagagctctgctgtgttgctacagtggtctgagtcattgtgattagaaattatttaaattcatcatttttatagacaggcctgaacaacctagcagagtttttttaaaaaaattttactcaaaattaaatatcttattttgaaaactgtccttgtactataatagctagcagacgcttcaaatatttctctttcatgtagacaaatctatacatttctcctcagagaatatagatgtcaatgcctgcagataagcaatccaaataagtttaatggaaggcagttttatgtaattaagttgtga

SEQ ID NO: 16647 - DNA, 491 bp, Homo sapiens
gcacttcctatgtaaaggaattttcactgccttgagtaacagtggcaggtgggctggcttcatgggcatgtgcagacagcgccccatacttggtttcatgttctagtcttgttatcttgaaattcataatcatttggataaggagtcccacgtttttattttgcagtgggcccagcacattaagtagccagtcctgactagcagatagtagcattaattctatttgaagtcaaagtttgttgaaagtgtataagtggcctggctcggtggctcatgcctgtaatcccagcactttgggaggctgagatgggtggaacacctgaagtcaagagttcgagactagcctggctaacatggtgaaaccccgtatctactaaaatacaaaaaattagccaggtgtggtggtatgtgcctgtagtcccagctactcaggaggctgaggcaggagaatcgcctgaacccaggaggcagaggttgcagtgagctgagat

SEQ ID NO: 16648 - DNA, 548 bp, Homo sapiens
ggccaggcagtgggagcaggcacttctgagcctggagggagcagaggtgacttcttgggcccccaagagcacagggatgcctggtccgcaacagggcttgggcggctgaagctgcaccaggggagctccctccctaccaacttggagaaggcgggttcctgcttgtccctggcacctgcggctccatggagtgtgcagccctggccatgcctccgagatctgagtgggtgctgacagcgaggagaagccaggcagtgggagcaggcacttccaagcctgcagggggcaggagggccttgccaggccctcaagagcacagagacaccagggtctagaggcgtgccaggtagccgcagcggcacccagggcacccagggagggcagaggggcgtggggcgcctgcctgctccgtggagtgggaggccagcagtgcctccacactgcagccgccgtcttggcagtggccattctagatgggccgctgctgccgtcagaaccaatctttaaagaatttatattctgtaaggagaaagcaggaggggattcgg

SEQ ID NO: 16649 - DNA, 153 bp, Homo sapiens
aaataatagcattttggaggtgccctgtatttgagttataaataaggaaatatactgtgttatctgattaacagttaaatacgaaattatgtaatggaacaaactaattttgatgaaaagtcctgctttgtctagtatacatagatttattgt

SEQ ID NO: 16650 - DNA, 447 bp, Homo sapiens
accatgttggctaggttggtcttgaacccctaacctcaggtgatccaccctccttgacctcccaaagtgctgggattacaggcatgagccacagtccccggcccaatacttaacatctttgcatgataaaaacctgaacaagttaggtataaaaggaagatgtctcaacacattaaaggccctatatgaccggcccagagctgaaatcttaacaccgaagagttgaaggctttttctctaagatcaggaacaagacatggatgccattttttctccttctgttcagtgttgtactggaagtcatagcaagagcatttaggcaagagaaataaaagacatctaagtaggaaaagaagaaaaaacttgcctctcctgattatcttatcttatagctagaaaaccttaaagactccattaaaaaaaaaaaaactatagaactaataaaat

SEQ ID NO: 16651 - DNA, 315 bp, Homo sapiens
acataatgaatgaaatgatgaaatggaataatgaaacggaaatgatgagatgagatgcaatgagttgaaatgagatgaaatgatgaaatgatgagatgaaatgatatgagatgtgatgaaatgatgacatgaaatgatgacataaaatgagatgaaatgagatgagatgaaatgacataatgaatgaaatgatgaaatggaataatgaaacggaaatgatgagatgagatgcaatgagttgaaatgagatgaaatgatgaaatgatgagatgaaatgatatgagatgtgatgaaatgatgacatgaaatgatgac

SEQ ID NO: 16652 - DNA, 516 bp, Homo sapiens
aagataagcgaaaatacagcctttctcaagggccagcacagacggagataaagagagagccacaggcacactggccaagcatcagctcctcaagcatccatctcactattcagggtggggaaatacttgatacctcaagtcctctttatcatcgcagatgaaaactgacataggtgatttcctttcggagcatttagggagaatgcaagggaaattgacaacacacttggtgcaattgggtaaccagtctttgtgttgccctccaatgactcttgcttggaaatgattggaagcccatcgttttaagtcattggaacgactgtccccttcataaagcatgatgtagcaaaatgaaaagcatacttctggttaaaagtgtttttcaaaaaaagcttaccacattgaggaggtcatttcatatttcctgatattcagcaattttgctgtgagctttgtagagttgttctggtgcttagttcaaataagaaaggaattactgaaattgcacattaagtt

SEQ ID NO: 16653 - DNA, 456 bp, Homo sapiens
ccacatgtgcctggtacttaccacacgggacagtacagatatggagcacttccatcatggcacaaaattcttgtgaacagcattggcataacacaatctgtttttattcagcatacccctgcggctgcacattggtatcatctggaaactttggaaaagtcctgatgtctggctgggcttacctccaaaactctaagtcagtgggtcttgagtgaggtctgtcattgggatttttcaaaagctcccccaggtgattctaatgtgtagccagcactggtctactgagtctcaagcttatctcattataagaattatgaacggccggatgtggtggtttacgcctgtaatcctagcactttgggaggctgaggcaggtggattgcaaggtcaagagatcgagaccatcctggctaacacggtgaaaacccatctctactaaaaatataaaaattaact

SEQ ID NO: 16654 - DNA, 324 bp, Homo sapiens
caatcttcagctacagtttatctaattttgaatttcttctgctttattatttaaagtgctaacatcttaaaaagtccagagatcttaaatttggctgagagagtcttggagtttttatagaaatctgatagtacaacttgtgcaacctgtcagaagtcagttacagccagagtaggcagagagaagaagtagtgttagaagacctatgtagatttctgcacacagaaagaaggaagaaagatcaggctacctaacttttttggttctgtgttaactcctccgtgaacacccttcaatatgaatgggcttccatggcacccatcc

SEQ ID NO: 16655 - DNA, 364 bp, Homo sapiens
  misc_feature (336)..(336): n is a, c, g, or t
agatatttaaagatgatttggcaggcagggggctaggggatgggtgctggtgattggactggtatgagatcatagggttatcaatgctgtcttcatgtgctgaatcagttgctgggaaattggggagtcacaagaccaagtcagttccttggttgagttcatggaacactggtccatttggtgtcagttggtccacttgtaagcaaagtctgaaaaatatctcgaagaccagtcttaggttttacagtagtgtttgtgactgccagttactatgggaaagaaagctggggaaaaaatggccaggttactgttttaaacctattagctttagccagnaagagttttgcagggaggtgagatcacc

SEQ ID NO: 16656 - DNA, 438 bp, Homo sapiens
cctcaaagatcctccaccctggatgaggagtcaaagttgaagacagttgaaaaaaatagaacagtgattcttaacactggggaacattcaggaaatttcaggggacagtgactggggagtactcctggtgcttggtgggcagaggccagggaggctagatgtcctgggatacatgggacagcctttcaccagggaggtttgctgtgtgtcccacacaacttccaaaaagtcccagcagctattcacataggtgaaaaaacaaaatgcatttataattctctgagcctagaacccaactactttttacgtataagtattaaatatttttacatggttttaatccacaccaaattttctagtaatgcagcaatagtgtatattgtgaagatggcactttgttacatttgaaacctttcaaagaatcattcatcatatcag

SEQ ID NO: 16657 - DNA, 1906 bp, Homo sapiens
attagccgctaggaccttaggcgagaaaatgtggacgcatccccgccggccctgaggccagagaatcccccctcaactggttgcacctcatgtccctcccgcacacgttgactctccctcctaatccccaggaccccgagggctctcccacatctcccgcagcaagagccaccgatcccccttaagaagcgttgactgtacggcggcgccagagggccaaactaagttcggtttcgggaaacgctctcgggagcagttctgtaaatccctgctgggagcagagactgcgaaaagctgagtccgccgatcgtgcccgggacaaggctgccttccactcgccgcatctacctggtaggcggcatgcgcacgggcttagaggcttgagagcctctggaagagaaagggtcccaggaaggaaacctgcccccggcctaagtgtcggcgcccagatcaccacgaaccccgcacctaggcgccgcccaccaagttccaaagaagtccgaggcgacctgggagtcggtcggatcccagccgagaaaagaaacaagcaggatagcaattcttaggggagccaccctgggagttttaggcagcgtttgcctttccctggttttcttcaccaagccccatcctccccccgcataccacccccagtcaaaagagtgggagaaaatgcacagttcgaagtcggtgagagcaaaaatgggtctagtaaatcaacccgtggtggtagctaaaaggtttggggctgcaaagaaacaaactgtaagttttgagcaacaaactttttcttcaatctgtaatatgtcgaaatgggaagggggtgttgcaaaagccaactaccactgtcaaacttagcccgtttacaacatggggaaaggcgtatttcttactaatatctcaacaacgataacaatgctgtatccttccttaccttgatgttgaactgcgaatcctcctccggatcaatgtccaggaacttagaagaattggtgatattaggagttcagtacttctggaaaaaaatgcaaatggtttagccaggatctttcctgtctgattcgtcactattattatatctgatgatgcgaatggttggagcgattcaatcctaagtcattaatgagctattttataaacaccactgtctgaagatcttcatttacattttgctaaggatcacttcgctaacctcacaggcttgtgtcaacagcatgatttgcaggacttcagttacactcttataaacaacacggctgtattgttaatcggttaatattttataaagtgtaaatattttattatgttttgaagggaactattgattctaaattattaaacccctgagaaggactatttaaatgaaatatacaattaagtacaattaaatgtacattgtggttagtttgttttcagattctgcacccttttaaattcattgcttttctctttactggagtttcctcttgtccatttctgatactgaaaaaaatctatcatgttaggaaaaagcctaaattatttaaagttgcattaaacttagaggaaaatgtcaaatacgattaattatgaccagaaatgtattttggatgtttgtagagttgtatttcatatcacattttacaaatttcttccgatttaaaggagagttctaggaagttttgtgatctatgtccggtgtgggtttttgtcctctcgagttttgtctctaataaaggccttttttgtttcaaattacatacgctttttactgcacaatttttgtattgaccttatttcaactgaagcgattatttccagcaggtttaatttcgacaataagatatattttaatagttttacctttcgctagaattttgtattgtttaaaacagtaaatgaataaatttgctgatgattcaaaata

SEQ ID NO: 16658 - DNA, 2056 bp, Homo sapiens
aaccaccaggtgggccaccttccctaccgccaccccgaggttccagtggacatcaaaacctcggctccatcagaggctccaggactccgatcgggacagcgcggggggcgaggccagggtgagggcgcggcgaaggagagacgcacagcgcggggcgggcaaggagcctcccttccgcgccaaggccccccccaaccctcgaggcgcttggaccgtgggatagtcctccggcggcgcccgagctccggccccgcccccgctccgccccgcgcctgctattggcggaaagttccgggccgcgccgcgactggccgacacgccgcaggccccgcccccttcccgacccgctccaaggcggccccggcgctggggctgcgcggcaggcggagcggccgcgggcttgggggcttcgccggggccgggcggccggcgcccccggctgctcccgccgccgcccggacccgcgccccgccggggcagcggtggtgagagccccgactccccggacgccgcccgccgtgccatggggttcccggccgcggcgctgctctgcgcgctgtgctgcggcctcctggccccggctgcccgcgccggctactccgaggagcgctgcagctggaggggcagcggcctcacccaggagcccggcagcgtggggcagctggccctggcctgtgcggagggcgcggttgagtggctgtacccggctggggcgctgcgcctgaccctgggcggccccgatcccagagcgcggcccggcatcgcctgtctgcggccggtgcggcccttcgcgggcgcccaggtcttcgcggagcgcgcagggggcgccctggagctgctgctggccgagggcccgggcccggcagggggccgctgcgtgcgctggggtccccgcgagcgccgggccctcttcctgcaggccacgccgcaccaggacatcagccgccgcgtggccgccttccgctttgagctgcgcgaggacgggcgccccgagctgcccccgcaggcccacggtctcggcgtagacggtgcctgcaggccctgcagcgacgctgagctgctcctggccgcatgcaccagcgacttcgtaattcacgggatcatccatggggtcacccatgacgtggagctgcaggagtctgtcatcactgtggtggccgcccgtgtcctccgccagacaccgccgctgttccaggcggggcgatccggggaccaggggctgacctccattcgtaccccactgcgctgtggcgtccacccgggcccaggcaccttcctcttcatgggctggagccgctttggggaggcccggctgggctgtgccccacgattccaggagttccgccgtgcctacgaggctgcccgtgctgcccacctccacccctgcgaggtggcgctgcactgaggggctgggtgctggggaggggctggtaggagggagggtgggcccactgctttggaggtgatgggactatcaataagaactctgttcacgcaaaaaaaaaaaaaaaaaaaaaaaaaaaaaaaaaaaaaaaaaaaacaaagggggggcggaaaaaaaatacacccgaggggggccccaagaaaagcgaaaaccccaacgtttgtatggtgcacaaagagggggacgaccaaaaagagaggaacggaaacataaaagcaaatggacgaaaagagcggacagtaacaacacacaggagcaagagtgagaaaaaagtgcacaaacaggagtaaactataggagagagaaacacaaacaacggggggggagagcggaacgccaataagagtacgaaaacaaaatattactcaacaaagaaagaaaattatatgaaaacgcgcatagaaggagggaggaaaaatatataaacaattttgtaaaaagagggtgtataaaaatgggtgttttaaaacaaaatgagggcaggaaaataagagggagtggcaggtaataagaagaaaaagtatgttgccataaacaggagggatattaaattaatagaagagaaaaaattttattttaaaccagggggaagagatgagaaaaaaataaagt

SEQ ID NO: 16659 - DNA, 1998 bp, Homo sapiens
aaccaccaggtgggccaccttccctaccgccaccccgaggttccagtggacatcaaaacctcggctccatcagaggctccaggactccgatcgggacagcgcggggggcgaggccagggtgagggcgcggcgaaggagagacgcacagcgcggggcgggcaaggagcctcccttccgcgccaaggccccccccaaccctcgaggcgcttggaccgtgggatagtcctccggcggcgcccgagctccggccccgcccccgctccgccccgcgcctgctattggcggaaagttccgggccgcgccgcgactggccgacacgccgcaggccccgcccccttcccgacccgctccaaggcggccccggcgctggggctgcgcggcaggcggagcggccgcgggcttgggggcttcgccggggccggcggtggtgagagccccgactccccggacgccgcccgccgtgccatggggttcccggccgcggcgctgctctgcgcgctgtgctgcggcctcctggccccggctgcccgcgccggctactccgaggagcgctgcagctggaggggcagcggcctcacccaggagcccggcagcgtggggcagctggccctggcctgtgcggagggcgcggttgagtggctgtacccggctggggcgctgcgcctgaccctgggcggccccgatcccagagcgcggcccggcatcgcctgtctgcggccggtgcggcccttcgcgggcgcccaggtcttcgcggagcgcgcagggggcgccctggagctgctgctggccgagggcccgggcccggcagggggccgctgcgtgcgctggggtccccgcgagcgccgggccctcttcctgcaggccacgccgcaccaggacatcagccgccgcgtggccgccttccgctttgagctgcgcgaggacgggcgccccgagctgcccccgcaggcccacggtctcggcgtagacggtgcctgcaggccctgcagcgacgctgagctgctcctggccgcatgcaccagcgacttcgtaattcacgggatcatccatggggtcacccatgacgtggagctgcaggagtctgtcatcactgtggtggccgcccgtgtcctccgccagacaccgccgctgttccaggcggggcgatccggggaccaggggctgacctccattcgtaccccactgcgctgtggcgtccacccgggcccaggcaccttcctcttcatgggctggagccgctttggggaggcccggctgggctgtgccccacgattccaggagttccgccgtgcctacgaggctgcccgtgctgcccacctccacccctgcgaggtggcgctgcactgaggggctgggtgctggggaggggctggtaggagggagggtgggcccactgctttggaggtgatgggactatcaataagaactctgttcacgcaaaaaaaaaaaaaaaaaaaaaaaaaaaaaaaaaaaaaaaaaaaacaaagggggggcggaaaaaaaatacacccgaggggggccccaagaaaagcgaaaaccccaacgtttgtatggtgcacaaagagggggacgaccaaaaagagaggaacggaaacataaaagcaaatggacgaaaagagcggacagtaacaacacacaggagcaagagtgagaaaaaagtgcacaaacaggagtaaactataggagagagaaacacaaacaacggggggggagagcggaacgccaataagagtacgaaaacaaaatattactcaacaaagaaagaaaattatatgaaaacgcgcatagaaggagggaggaaaaatatataaacaattttgtaaaaagagggtgtataaaaatgggtgttttaaaacaaaatgagggcaggaaaataagagggagtggcaggtaataagaagaaaaagtatgttgccataaacaggagggatattaaattaatagaagagaaaaaattttattttaaaccagggggaagagatgagaaaaaaataaagt

SEQ ID NO: 16660 - DNA, 2129 bp, Homo sapiens
aaccaccaggtgggccaccttccctaccgccaccccgaggttccagtggacatcaaaacctcggctccatcagaggctccaggactccgatcgggacagcgcggggggcgaggccagggtgagggcgcggcgaaggagagacgcacagcgcggggcgggcaaggagcctcccttccgcgccaaggccccccccaaccctcgaggcgcttggaccgtgggatagtcctccggcggcgcccgagctccggccccgcccccgctccgccccgcgcctgctattggcggaaagttccgggccgcgccgcgactggccgacacgccgcaggccccgcccccttcccgacccgctccaaggcggccccggcgctggggctgcgcggcaggcggagcggccgcgggcttgggggcttcgccggggccgggcggccggcgcccccggctgctcccgccgccgcccggacccgcgccccgccggggcagcggtggtgagagccccgactccccggacgccgcccgccgtgccatggggttcccggccgcggcgctgctctgcgcgctgtgctgcggcctcctggccccggctgcccgcgccggctactccgaggagcgctgcagctggaggggcagcggcctcacccaggagcccggcagcgtggggcagctggccctggcctgtgcggagggcgcggttgagtggctgtacccggctggggcgctgcgcctgaccctgggcggccccgatcccagagcgcggcccggcatcgcctgtctgcggccggtgcggcccttcgcgggcgcccaggtcttcgcggagcgcgcagggggcgccctggagctgctgctggccgagggcccgggcccggcagggggccgctgcgtgcgctggggtccccgcgagcgccgggccctcttcctgcaggccacgccgcaccaggacatcagccgccgcgtggccgccttccgctttgagctgcgcgaggacgggcgccccgagctgcccccgcaggcccacggtctcggcgtagacggtgcctgcaggccctgcagcgacgctgagctgctcctggccgcatgcaccagcgacttcgtgtccccgccatggggggagcctggagcctgccttcccctgaatgcctaccgcagccacatgcctccccacagtaattcacgggatcatccatggggtcacccatgacgtggagctgcaggagtctgtcatcactgtggtggccgcccgtgtcctccgccagacaccgccgctgttccaggcggggcgatccggggaccaggggctgacctccattcgtaccccactgcgctgtggcgtccacccgggcccaggcaccttcctcttcatgggctggagccgctttggggaggcccggctgggctgtgccccacgattccaggagttccgccgtgcctacgaggctgcccgtgctgcccacctccacccctgcgaggtggcgctgcactgaggggctgggtgctggggaggggctggtaggagggagggtgggcccactgctttggaggtgatgggactatcaataagaactctgttcacgcaaaaaaaaaaaaaaaaaaaaaaaaaaaaaaaaaaaaaaaaaaaacaaagggggggcggaaaaaaaatacacccgaggggggccccaagaaaagcgaaaaccccaacgtttgtatggtgcacaaagagggggacgaccaaaaagagaggaacggaaacataaaagcaaatggacgaaaagagcggacagtaacaacacacaggagcaagagtgagaaaaaagtgcacaaacaggagtaaactataggagagagaaacacaaacaacggggggggagagcggaacgccaataagagtacgaaaacaaaatattactcaacaaagaaagaaaattatatgaaaacgcgcatagaaggagggaggaaaaatatataaacaattttgtaaaaagagggtgtataaaaatgggtgttttaaaacaaaatgagggcaggaaaataagagggagtggcaggtaataagaagaaaaagtatgttgccataaacaggagggatattaaattaatagaagagaaaaaattttattttaaaccagggggaagagatgagaaaaaaataaagt

SEQ ID NO: 16661 - DNA, 1636 bp, Homo sapiens
aaccaccaggtgggccaccttccctaccgccaccccgaggttccagtggacatcaaaacctcggctccatcagaggctccaggactccgatcgggacagcgcggggggcgaggccagggtgagggcgcggcgaaggagagacgcacagcgcggggcgggcaaggagcctcccttccgcgccaaggccccccccaaccctcgaggcgcttggaccgtgggatagtcctccggcggcgcccgagctccggccccgcccccgctccgccccgcgcctgctattggcggaaagttccgggccgcgccgcgactggccgacacgccgcaggccccgcccccttcccgacccgctccaaggcggccccggcgctggggctgcgcggcaggcggagcggccgcgggcttgggggcttcgccggggccgggcggccggcgcccccggctgctcccgccgccgcccggacccgcgccccgccggggcagcggtggtgagagccccgactccccggacgccgcccgccgtgccatggggttcccggccgcggcgctgctctgcgcgctgtgctgcggcctcctggccccggctgcccgcgccggctactccgaggagcgctgcagctggaggggcagcggcctcacccaggagcccggcagcgtggggcagctggccctggcctgtgcggagggcgcggttgagtggctgtacccggctggggcgctgcgcctgaccctgggcggccccgatcccagagcgcggcccggcatcgcctgtctgcggccggtgcggcccttcgcgggcgcccaggtcttcgcggagcgcgcagggggcgccctggagctgctgctggccgagggcccgggcccggcagggggccgctgcgtgcgctggggtccccgcgagcgccgggccctcttcctgcaggccacgccgcaccaggacatcagccgccgcgtggccgccttccgctttgagctgcgcgaggacgggcgccccgagctgcccccgcaggcccacggtctcggcgtagacggtgcctgcaggccctgcagcgacgctgagctgctcctggccgcatgcaccagcgacttcgtgtccccgccatggggggagcctggagcctgccttcccctgaatgcctaccgcagccacatgcctccccacagtaattcacgggatcatccatggggtcacccatgacgtggagctgcaggagtctgtcatcactgtggtggccgcccgtgtcctccgccagacaccgccgctgttccaggcggggcgatccggggaccaggggctgacctccattcgtaccccactgcgctgtggcgtccacccgggcccaggcaccttcctcttcatgggctggagccgctttggggaggcccggctgggctgtgccccacgattccaggagttccgccgtgcctacgaggctgcccgtgctgcccacctccacccctgcgaggtggcgctgcactgaggggctgggtgctggggaggggctggtaggaggtttgttttttttttgttttttttttttttttgttttttttttgttttttttttggattttgattttataattttgatattatatatataagatttaattatttattttatatggatttaattata

SEQ ID NO: 16662 - DNA, 1706 bp, Homo sapiens
aaccaccaggtgggccaccttccctaccgccaccccgaggttccagtggacatcaaaacctcggctccatcagaggctccaggactccgatcgggacagcgcggggggcgaggccagggtgagggcgcggcgaaggagagacgcacagcgcggggcgggcaaggagcctcccttccgcgccaaggccccccccaaccctcgaggcgcttggaccgtgggatagtcctccggcggcgcccgagctccggccccgcccccgctccgccccgcgcctgctattggcggaaagttccgggccgcgccgcgactggccgacacgccgcaggccccgcccccttcccgacccgctccaaggcggccccggcgctggggctgcgcggcaggcggagcggccgcgggcttgggggcttcgccggggccgggcggccggcgcccccggctgctcccgccgccgcccggacccgcgccccgccggggcagcggtggtgagagccccgactccccggacgccgcccgccgtgccatggggttcccggccgcggcgctgctctgcgcgctgtgctgcggcctcctggccccggctgcccgcgccggctactccgaggagcgctgcagctggaggggcagcggcctcacccaggagcccggcagcgtggggcagctggccctggcctgtgcggagggcgcggttgagtggctgtacccggctggggcgctgcgcctgaccctgggcggccccgatcccagagcgcggcccggcatcgcctgtctgcggccggtgcggcccttcgcgggcgcccaggtcttcgcggagcgcgcagggggcgccctggagctgctgctggccgagggcccgggcccggcagggggccgctgcgtgcgctggggtccccgcgagcgccgggccctcttcctgcaggccacgccgcaccaggacatcagccgccgcgtggccgccttccgctttgagctgcgcgaggacgggcgccccgagctgcccccgcaggcccacggtctcggcgtagacggtgcctgcaggccctgcagcgacgctgagctgctcctggccgcatgcaccagcgacttcggagggtgggcccactgctttggaggtgatgggactatcaataagaactctgttcacgcaaaaaaaaaaaaaaaaaaaaaaaaaaaaaaaaaaaaaaaaaaaacaaagggggggcggaaaaaaaatacacccgaggggggccccaagaaaagcgaaaaccccaacgtttgtatggtgcacaaagagggggacgaccaaaaagagaggaacggaaacataaaagcaaatggacgaaaagagcggacagtaacaacacacaggagcaagagtgagaaaaaagtgcacaaacaggagtaaactataggagagagaaacacaaacaacggggggggagagcggaacgccaataagagtacgaaaacaaaatattactcaacaaagaaagaaaattatatgaaaacgcgcatagaaggagggaggaaaaatatataaacaattttgtaaaaagagggtgtataaaaatgggtgttttaaaacaaaatgagggcaggaaaataagagggagtggcaggtaataagaagaaaaagtatgttgccataaacaggagggatattaaattaatagaagagaaaaaattttattttaaaccagggggaagagatgagaaaaaaataaagt

SEQ ID NO: 16663 - DNA, 2094 bp, Homo sapiens
aaccaccaggtgggccaccttccctaccgccaccccgaggttccagtggacatcaaaacctcggctccatcagaggctccaggactccgatcgggacagcgcggggggcgaggccagggtgagggcgcggcgaaggagagacgcacagcgcggggcgggcaaggagcctcccttccgcgccaaggccccccccaaccctcgaggcgcttggaccgtgggatagtcctccggcggcgcccgagctccggccccgcccccgctccgccccgcgcctgctattggcggaaagttccgggccgcgccgcgactggccgacacgccgcaggccccgcccccttcccgacccgctccaaggcggccccggcgctggggctgcgcggcaggcggagcggccgcgggcttgggggcttcgccggggccgggcggccggcgcccccggctgctcccgccgccgcccggacccgcgccccgccggggcagcggtggtgagagccccgactccccggacgccgcccgccgtgccatggggttcccggccgcggcgctgctctgcgcgctgtgctgcggcctcctggccccggctgcccgcgccggctactccgaggagcgctgcagctggaggggcagcggcctcacccaggagcccggcagcgtggggcagctggccctggcctgtgcggagggcgcggttgagtggctgtacccggctggggcgctgcgcctgaccctgggcggccccgatcccagagcgcggcccggcatcgcctgtctgcggccggtgcggcccttcgcgggcgcccaggtcttcgcggagcgcgcagggggcgccctggagctgctgctggccgagggcccgggcccggcagggggccgctgcgtgcgctggggtccccgcgagcgccgggccctcttcctgcaggccacgccgcaccaggacatcagccgccgcgtggccgccttccgctttgagctgcgcgaggacgggcgccccgagctgcccccgcaggcccacggtctcggcgtagacggtgcctgcaggccctgcagcgacgctgagctgctcctggccgcatgcaccagcgacttcgtaattcacgggatcatccatggggtcacccatgacgtggagctgcaggagtctgtcatcactgtggtggccgcccgtgtcctccgccagacaccgccgctgttccaggcggggcgatccggggaccaggggctgacctccattcgtaccccactgcgctgtggcgtccacccgggcccaggcaccttcctcttcatgggctggagccgctttggggaggcccggctgggctgtgccccacgattccaggagttccgccgtgcctacgaggctgcccgtgctgcccacctccacccctgcgaggtggcgctgcactgaggggctgggtgctggggaggggctggtaggagggagggtgggcccactgctttggaggtgatgggactatcaataagaactctgttcacgcaaaaaaaaaaaaaaaaaaaaaaaaaaaaaaaaaaaaaaaaaaaaaaaaaaaaaaaaaaaaaaaaaaaaaagagagggggggggcgcgcagaagtccccccccggggggcgcccaagaggggggccccacaaggaatgggggagaagaggggggccccacaaagggggaggacaaaaaaaaggacgcagggggggggcggcgtaaacaaagaggggagagagggggagaaacaagggagcgaccgggcggtaaacaaaggaaacaagccacaaaacaagagggcgggaggacaaacaaacgggcgcacacacacacaccacacacaggaaaccaaccagccccacggcgagggaacaccacaaacaaagccaccaacgccgaggcagcagaagaggggaggaggacacacccaacacacatagccgccgaattaattatggactagcgtagcgatgattagagaagaagaaataaatagtagcaggggaaagatatagtggctagtatatagatgtacctccggagcaaaaaaattttttatcacaaggcgggggggcatactcagaatagaaaaacaaacgaggaagaggaagcagaa

SEQ ID NO: 16664 - DNA, 1164 bp, Homo sapiens
acttcggctaggtacgaggctgggtttaaatcggccgaggggccacggtctcgtgcgtagacggtgcctgcaggccctgcagcgacgctgagctgctcctggccgcatgcaccagcgacttcgtgtccccgccatggggggagcctggagcctgccttcccctgaatgcctaccgcagccacatgcctccccacagtaattcacgggatcatccatggggtcacccatgacgtggagctgcaggagtctgtcatcactgtggtggccgcccgtgtcctccgccagacaccgccgctgttccaggcggggcgatccggggaccaggggctgacctccattcgtaccccactgcgctgtggcgtccacccgggcccaggcaccttcctcttcatgggctggagccgctttggggaggcccggctgggctgtgccccacgattccaggagttccgccgtgcctacgaggctgcccgtgctgcccacctccacccctgcgaggtggcgctgcactgaggggctgggtgctggggaggggctggtaggagggagggtgggcccactgctttggaggtgatgggactatcaataagaactctgttcacgcaaaaaaaaaaaaaaaaaaaaaaaaaaaaaaaaaaaaaaaaaaaacaaagggggggcggaaaaaaaatacacccgaggggggccccaagaaaagcgaaaaccccaacgtttgtatggtgcacaaagagggggacgaccaaaaagagaggaacggaaacataaaagcaaatggacgaaaagagcggacagtaacaacacacaggagcaagagtgagaaaaaagtgcacaaacaggagtaaactataggagagagaaacacaaacaacggggggggagagcggaacgccaataagagtacgaaaacaaaatattactcaacaaagaaagaaaattatatgaaaacgcgcatagaaggagggaggaaaaatatataaacaattttgtaaaaagagggtgtataaaaatgggtgttttaaaacaaaatgagggcaggaaaataagagggagtggcaggtaataagaagaaaaagtatgttgccataaacaggagggatattaaattaatagaagagaaaaaattttattttaaaccagggggaagagatgagaaaaaaataaagt

SEQ ID NO: 16665 - DNA, 1771 bp, Homo sapiens
aaccaccaggtgggccaccttccctaccgccaccccgaggttccagtggacatcaaaacctcggctccatcagaggctccaggactccgatcgggacagcgcggggggcgaggccagggtgagggcgcggcgaaggagagacgcacagcgcggggcgggcaaggagcctcccttccgcgccaaggccccccccaaccctcgaggcgcttggaccgtgggatagtcctccggcggcgcccgagctccggccccgcccccgctccgccccgcgcctgctattggcggaaagttccgggccgcgccgcgactggccgacacgccgcaggccccgcccccttcccgacccgctccaaggcggccccggcgctggggctgcgcggcaggcggagcggccgcgggcttgggggcttcgccggggccgggcggccggcgcccccggctgctcccgccgccgcccggacccgcgccccgccggggcagcggtggtgagagccccgactccccggacgccgcccgccgtgccatggggttcccggccgcggcgctgctctgcgcgctgtgctgcggcctcctggccccggctgcccgcgccggctactccgaggagcgctgcagctggaggggcagcggcctcacccaggagcccggcagcgtggggcagctggccctggcctgtgcggagggcgcggttgagtggctgtacccggctggggcgctgcgcctgaccctgggcggccccgatcccagagcgcggcccggcatcgcctgtctgcggccggtgcggcccttcgcgggcgcccaggtcttcgcggagcgcgcagggggcgccctggagctgctgctggccgagggcccgggcccggcagggggccgctgcgtgcgctggggtccccgcgagcgccgggccctcttcctgcaggccacgccgcaccaggacatcagccgccgcgtggccgccttccgctttgagctgcgcgaggacgggcgccccgagctgcccccgcaggcccacggtctcggcgtagacggtgcctgcaggccctgcagcgacgctgagctgctcctggccgcatgcaccagcgacttcgtaattcacgggatcatccatggggtcacccatgacgtggagctgcaggagtctgtcatcactgtggagggtgggcccactgctttggaggtgatgggactatcaataagaactctgttcacgcaaaaaaaaaaaaaaaaaaaaaaaaaaaaaaaaaaaaaaaaaaaacaaagggggggcggaaaaaaaatacacccgaggggggccccaagaaaagcgaaaaccccaacgtttgtatggtgcacaaagagggggacgaccaaaaagagaggaacggaaacataaaagcaaatggacgaaaagagcggacagtaacaacacacaggagcaagagtgagaaaaaagtgcacaaacaggagtaaactataggagagagaaacacaaacaacggggggggagagcggaacgccaataagagtacgaaaacaaaatattactcaacaaagaaagaaaattatatgaaaacgcgcatagaaggagggaggaaaaatatataaacaattttgtaaaaagagggtgtataaaaatgggtgttttaaaacaaaatgagggcaggaaaataagagggagtggcaggtaataagaagaaaaagtatgttgccataaacaggagggatattaaattaatagaagagaaaaaattttattttaaaccagggggaagagatgagaaaaaaataaagt

SEQ ID NO: 16666 - DNA, 306 bp, Homo sapiens
ggactgtctctagtttctagtgtttgtatgctaggttccagtaatcaaagatgccctttatgaaatttaagtcagatttttcgagaaaaaatttggatgggccatcaggtcaccatgggacttcccttagcctcatgcattctctgcgatggtttactttggggcctatgaatagggaagactgagatataggaaaaaccaaagtgtctgtgttcccccactctcacacccatgcagcataacacttctcacaccagatgtggggggatttctcctcacaccccaagcgagtctccagcagatacc

SEQ ID NO: 16667 - DNA, 365 bp, Homo sapiens
tgtgtgaataactgataagtgggattccaaacagaatccatgtagcgttttaatgaattcacatttggagaaaaaagtcacagactttcaaaacttacaggaatttggctgtcctagggcaactcctcacttaacagcaagaggggatgagaaggttgagtgactcacccagggaagtgactcacccagggaaggtcaagtgactcacccaaggttacttggtaagtaaagagagaagccagaagcctggggcctcctgacggctcctgcttctctttttactaaggtcttctgccatgggaagaaactctgaatgttagcaaccatctggatggtgttagttgtatgtctctctatgtatgttg

SEQ ID NO: 16668 - DNA, 264 bp, Homo sapiens
ctatttggcccttttcaaatgtttgccaacctttggtctagaaggttacattctggagcaaacagatcatagacagataaagaaaggcagatgctaaaatcagccgggcgtggtggcaggcacctgtagccccagctactcgggaggctgaggcaggagaatggtgtgaacccgggaggtggaggttgcagtgagccgagatcgcgctactgcactccactgggcgatagagcaagactccgtctcaaaaaaaaaaaaaaaaaa

SEQ ID NO: 16669 - DNA, 414 bp, Homo sapiens
gaaagtctgaactagagcccaggtctgctaagggcctacccagatatacttctttagagtgttttaaactggagcgatggctctcacatatacacactagactgtcttaatattggacggccacttcctagtcttccagcctaattcctggagtgaagcttaagacagtccatgaactgtctgccactggtcagtagaaaggtaaagcaggaagaccagaaactgagcaaaagcatttagaaattctcatgacaactcctaattgccgcaacatcctaaggcaacatcagtagacttgtcttgttgagcagagaatggaaaagtctgggtgttgttgatgtcacatggtggcttgtttgtggtacaagctgcatacgagtcaggcgtaccaagaccacatagatagtagactgc

SEQ ID NO: 16670 - DNA, 496 bp, Homo sapiens
tacgcgcctccttcagtaactttagaaaaactgaaagaataaacaaagccctgaaaccagcttcaaatgatctcgggctgtttcaccgacgtgctgactgagttcataagctagcgccttctttacgagataacctgtccagtgaataaaggagggcttcagccaacgctggggaggagcaacgggaaaggatgggatgggttgttcccatcagcacagcctgaactttcacacaccccgcgcgccctgctttgtgaaagactgaagggcatttagagacatggcccagttctagcagccagctcagggggaatgtaagaggacaccgtgtcagggccaaaaaccccatttctgcctgcgtgaaggaggttccagcagcagctgcagatagctgggaggactgtgtgggccacctaaggacacatcagatcctggcagtggaagtggggcagggtcggaggggagtctggactggtctgggcaacagaatgagacc

SEQ ID NO: 16671 - DNA, 302 bp, Homo sapiens
tttggtgtcttagcccatgggttttaaagtaaaacctctggccaactaaggatgggctgccctcctgcactgtgtgtagtggaagtgataaaacaaataccaggggttgcaatcctaggcatcaatggcaaattcagctccaactttcatgaggcctctcccttataccagcttctttgtgcatctgcctgggaccaggggtggactttccagtcttgcctgcagaaggttctgtaaagacacagaacagtacattgagtagattaatgccagcactgttctatgctccaaaccacagggtc

SEQ ID NO: 16672 - DNA, 445 bp, Homo sapiens
gccacatcaaagtccttcctgtgctgaggcttctgtgcttttcagaacataagctcagaggaaccggtggccattcaaaagagaaaggcctgtttgagagtgcagccagcactggaatgcagaactgagttgacagcaagagaatgagatctcttgagagaacagcagccctgtgctgctagaaggtagcagtactacacacatgcacaacagatgtaccccctgaatagttacgtgagacaataacctccttgccctttggttttcttttgtttaggccactttgaggtgggatggtttcactttaaaccagtgccctgagttttcaccataattataaaaacattgagcctcggtttcttatctgtaaaataggtctgatttcacctattctcatctataggctgtgagaaattaataagggaagacaggtaaagtacctggc

SEQ ID NO: 16673 - DNA, 175 bp, Homo sapiens
acaaatacagcaacgttacctatgcaagatgaatcacagagagaaataaaaaactgaaaaaaaaatagtgaacagagacccagtgatctgtgggataatatcaagcagtctatcatacatggagaaaaggataagggacagaaaaagtatttgaagaaataatagctgaaatatt

SEQ ID NO: 16674 - DNA, 363 bp, Homo sapiens
gcgagctgctaactcaggggcgagctgctaactcaggggcgagctgcaacgggcgagctgcattgaaggtgtgttacttgggtaatttttaaatgctattctctgaaataatgcactgtgtcttactactgccacagcagtgttcttgatgacatgacacccatgaaaaggagagaggcaggagggtacagtgtcaacctcgtgctggacacgttgctatgtcaactcgattgatcttcgtatagagcctcttccatcttttggcatccttcagagcccatggacatttccagtgatgtatcaagcacttataagagctgacagtacacccatgtttacagggtacactgcactattcacagc

SEQ ID NO: 16675 - DNA, 432 bp, Homo sapiens
atgaatcagtcaaggtccagtcaggagccagaaaccacaccagtaatttgaacagagaaattttgttttatttttatttatttatttattgagacagagttttagctcttgttgcccaggctagagtgcaatggctcaatctcggctcattgcaacctcctcctcctgggctcaagtgatcctcctgcctgggcctcccaaagtactgaaactataggcattagctacctctcccagcctcagaagcttttctacacccttcctaggggaatggggagataagtaggggtcacttagggagtaaatgattatgaaaaggggcatgggcttttgcaaaaataggcagtagcctgtccggaccaggtgccaagttccagcctcttctaggtttgactcctgttgcctgttaacctcccctgatagattaaaaaa

SEQ ID NO: 16676 - DNA, 153 bp, Homo sapiens
caggacgtgcaggtttggaacataggtacacgtgtgccacggtgctttgctgcacctatccaccagtcgtctaggtttgaagccccgcatgcgttggctatttgtcctaatgctctctctccccttgccccccacgccccgtcagggcccggc

SEQ ID NO: 16677 - DNA, 538 bp, Homo sapiens
aaatctaacttacagtaactaaaacaaattgggattttgctgactctgattgattgattgattgattgattgattgatttgccctcaaaaaatcaaaccaaacttggcattgcaagatggctgctactgctccagagagcaggcccatgttcacagtaggaagaagaaatatagtgtcaggcacatatttcctttttgtctagaaagcaaaacttgcctcaaatcctccttccccaagcaaactctccccttatatttcagcggctagaactggggcacgtggccactcctcgctgcaaggcaggctaagaatgtggaacaaggattgtagtcactgactcattcacatcagtggttcttaaccctggctgcacacagaaccagagggattcttcaacgtctggcttcacccccagagagtctaattctaatttatgcacatcagaatttaggagcactggcttaaaaccaaccttgattcatcatctgggtctggcatattgctccccaacaaacaaaatgagggtctcttggcaag

SEQ ID NO: 16678 - DNA, 362 bp, Homo sapiens
ataaacacacaaaactcacctatgttactatacaccaacaataaacaatctgaaaaggaaatgaagaaagcaattccatttacgatagcatctaaaagattaaaatacttaggaataaatttaacccaggagatgaatgacttgtacaataaaaactatgaaacatgactgaaagaaagtcaaaagatctaaataaatgaaagcacacccaatgttcatgggtttgaagacaatactattaagatggcaatgctttctaaagtgatctacagattcaatgtaatctttatcaaattccctagagcctcttttttgtttttgcaaactctcaaattcatatagagttacaaagagcaccaaat

SEQ ID NO: 16679 - DNA, 318 bp, Homo sapiens
ttcgttgagagcttactatgtaggagcatcaagcaaggtactctccatttaatccttacaagaaccctatgagtttggcactattattacccctattttacactttaggaagtcaaggttggtaaagctcagacatttacccgtgctcacagttaataagtgacagcacaggtatttaaacccagacaatctgactccagtatctgagctacaaggaagttcatagcagcattgtttgtggaaaaaaatagactgaatacaaacttaaataactgtggtttggggatctggtaaataaattatggcacatctacacag

SEQ ID NO: 16680 - DNA, 412 bp, Homo sapiens
acagttgaggagaaatgtgaggctagccttgcacgagagtcactctcctgaacaccttgatgcccttctgaaaatactggccatcagatttgtgctgcctggcaggaaactggaggatgcagctctgggcaaactgatccaagagggaaatccagtcagatgctggcatgggagagtccaggcccctttgtaacacaccctgcagtgatgcccacccatccacaaacccatacatatatgcaagattcttctatccagctttggagacctcactttgaataagaaaggacatcaaagatcaccagatatttgaggaaagtatctaaagtgaaagacaaagaccaaaacagacaggtgaaagtaaataaacaaagggaactcagaaacacacacacacactctactgagcaga

SEQ ID NO: 16681 - DNA, 354 bp, Homo sapiens
tcaccgtccataacaatagtgctattctaataagatttatcggagtactaaatgagataacatatgtaaaacacttggcacactgtttgcatagagtatatatccagtatgtctttctcccctaggctagggtttgaaggagacaaaccaagagctctagaactctttaggtaaaaacaatgaaaaatagggtcttagtacaactctgtcttttggcagataaggaaactaagaggtagagggatatgtccaaggtcacacagagagttagtagcagaaaccaagacctcttccttgacagatcagttcctctgccctttacagatgtgtgtaaagtgaacgttttggatggtg

SEQ ID NO: 16682 - DNA, 171 bp, Homo sapiens
attatatcaaaaagacacctacacttgtacatttaccgcagcactattgacaatagcgataatgaatggaatcaacctaagtgtccatcaatggattattgaataaagaaaatatggtatatataccatggaatactactgagtcataaaaaagaatgaaatcatgccttt

SEQ ID NO: 16683 - DNA, 347 bp, Homo sapiens
  misc_feature (160)..(160): n is a, c, g, or t
  misc_feature (337)..(337): n is a, c, g, or t
agtaatctgtgacaataacatataaagagggaaagacagatttataggagcatagtatatactattggatctaagctggtattattcaaactaggttgttacaaatttaaggctgggcgtggtggctcatgcctgtaatcccagctaatttttgtatttntagtagagacggtttcaccatgttggccaggctgatcttgaactcctgaccttgtgatctgcccacctcgaccgcccaaagcgttgggattacaggcatgaactactgcacccggccggaaattaacactcttaaatacaaatgagctaacaaagaattacaagagaaattagatantaccttaaga

SEQ ID NO: 16684 - DNA, 383 bp, Homo sapiens
attgtgcttgtggaaatacgtatgcattgttgaaagattggaaaacactcaaatgcccaaagaagaaaagttgcctgtaaccccagcccctccaggagagccactgttagagctttgccttcctattttccccttctacaagacagacagttaaataactcgtgttggatctattttttaaacaatattttaggggcaggtctcgctatgttgcccaggccgtagagcagtggcccacaggcaggccgagcatagctccctgcagccttgaactcctggcctcaggcaggagaattgcttgaacccagcaggcggaggttgcagtgagccaggatcgcaccattgcactccagcctaggcgacaagagcaaaactctgtctca

SEQ ID NO: 16685 - DNA, 311 bp, Homo sapiens
ggcattcctggcacccctaaaactaccccactgggggccatccaagcctgtgattaacaaaccctagttatttgctaggtagtttccacatggcatagtaggatatatatatgtgaggcacaatacagtgtttatgtgagaataatatagattatttgaatctaggctgcagaacctacctgaaaatgggttttacagttttgtgtaattgccttttctttgtgtttgcatagaaggcattgcatagctggaagatgatggcaattataatttattatgctgtaattgttacctaaatgtttttgaataag

SEQ ID NO: 16686 - DNA, 515 bp, Homo sapiens
acatctgcatttaaaacataaaggggcaaaagtgcatctagaacaagctgtattatctttgaaaatccactgtggacccaagggacattttgataagtcacactgagattggagatacagtgtttttagagaatgcacgactgatttaagaatgccttgttcagatgaagaaacagacttaggtggcatgatgaggtcattcaagtcgtaaaaatttaaaaattctttctgcaggagaagacaaggcttctggcagattttctgagtctatattcaagatccaccccactaactgagaatggctgccttgctgatttgactgttactgtagaactgaagataaagcgaattttggagttgtttgtgtgatctactagttactagaaaaatcacaggtttataatgcagctaatgggataaacagactttgattttagggcagtgaagactctctgcatgatggataatgatactatatatataaataaatgtatatatatataaaagaacaagct

SEQ ID NO: 16687 - DNA, 259 bp, Homo sapiens
ccacaccagaaagtgagttctcctagaaaatacttcagagcgccttagatagcgctgcctgacaaccatgaaaggcattattgggtggcactggttatacaagttttgtgaccctgtgaccccaagccattgtgactcagccaactggagcaatgtctccaacagcgttacagaaaatggggcagctgatggttcacatagcatcccccccggccggtgaactcagtcattctgtcagaaaaggcagcagggttcactc

SEQ ID NO: 16688 - DNA, 1210 bp, Homo sapiens
ttccaccgtgaggcgccccctggctctgtccacggtgctgaagacccagttggtgctaccatcgcgtgggcataagtttaggggacgagggagaggcaattgttgaaggttcgcagcttccaccctgacccctgtgcctgtgatagcagaaggctaggaactcaggcagggaccaagcagacacgacgcaggcgatactgtgcaatccgggctgccttcctgctggaggtgtttggttgctgttccaagaacaagtggggctctggcatccctattcgccttcctggtgcttctgaaaacccacctgaggagcctagaggccccattaatttcttttccatcacccgatgcagatctcagcacccagaagacctctggctaaacgcttattagcagtttcccaagtggcaggtttgtgtttatgtaaaatacaaatggagaactgctctttgcccgtgtttatggcaactctgtcactcccctgctatttctccctccccctcgcgagttcctgggggaaattcacagaacaaagcaccttgttttgcctttgcagagaatgaaaaaacacaggaccattccaagggcccagacctgtgatgcagggaaatcaatattttgcttacatcgagtgggggaatttgcatctaaactgaaggcaaaggagcttgtttggagcagagcaggtggcaggagccgagaattaacagataatttctcattgttcctggattcagcctccacactcggcaggcgcttctgcagcgtctctggcgccccggcagcagctccggacctggcatttctcaatctagcagtgtgaaggagctgctgccctgatagggctgcagaaacaggttagggcccctgggtcagtcaatagctattgaagttggattgtaggagttagcgtgtgtgggagagacagagatgagagagacagagagaaagaaacagagacagaaatagaggcaagagacagataccaatgagagagaccgaggatgagacagagatacagagagacagttataggaaatagagaacagagaaacagacagggagacagatgtacaggtaaagaaacacacattcagaaggagacattaaggtaaagcctcaccctagttgtcctctttagcccgctacctcccccagcccccaggtccattgctcgataccactgtggtcacataaccagccacaaagc

SEQ ID NO: 16689 - DNA, 549 bp, Homo sapiens
gcaaagcaaaaagaagaaaaacttaccaaatcatcctccagtattaaatttataaaggattccttcaagatcagcaaggaatgtcaaattcccctggtgtattatatcaacaggagccaaatgaaaaggatttcttgaaaaatgtgccatatgctcttgacttttcaattgcaatatggtcagagaaattataaataatttaaatcttgatatgattgtaagactttttatcagcatgctcaagccagaagactgttcttggggtgtgaaccacatggtgaaagcatttcatctagcattttagcaaccctccctcctgctattagggggttccaaatggacccgttaaacttccaggaaaatccccttttttgttaacacccctactgaaatttcctggtgtgtttatttaacttctcactagaggttccagtgaaggtaacaattggtgaatttgaattttcctacttttctcctgtttggcacaatacccaagggagaggtttcaataaaatagcctaactggcaaatgggagaaatcgacaaaga

SEQ ID NO: 16690 - DNA, 409 bp, Homo sapiens
cactggaagttttggcatacagcgaaactgaagcgtacttatacaatatcacattttatttttattgtttctaatagcattccaggttagaaatgtcaattatttgggaaagctgagggtctggtagataaagcatgcagcagagagctaggaggctggctatttccagtcgttatcctaacatgtcttgggcccccaagtcacgccacctccatggtacaatgggaactgtggcagaagtccacgctctctcccccaacacatggggataagagacaagagaggtgaaatgttctggaacatatccgatgttatacaagtataagctgtgagatgatccaaacgcaaatattgaatatttcattttctagaaagtataccaattcattccacccttctcaaacctaaa

SEQ ID NO: 16691 - DNA, 426 bp, Homo sapiens
cataggcccaagaatgcctgaaatgatcttgaaaaagaaacaaagtgagactattcactctacctgatatagctatggttatcaagatagtgtggtattaccagaggtatagacacattgatcaatagaatagaatggagaactcagaaatagacccacacaaatatatacaactgatttttgacaatggtgcaaaagctttgcataagaaacttttcaaaccagcctgggcaacatggcaaaaagtctctactagaaatacaaaaatgagctgggtatggtgacacgcacctgtggtcccagctactcgggaggctgaagagggaggatcacttaatcccaagaggctgaggctgcagtgagctgtgatcacaccactacactcccgcctaggtgacagagtgaaaccttgcctcaaaaaaaaaa

SEQ ID NO: 16692 - DNA, 1726 bp, Homo sapiens
aagcatggtatcaacgcagagggcccattacggccgggcatagctgacttcctattggtacagcttgaaaagcactttttactacatacacattttatgcttaaaaagttaacatgatacgaaactgtgattagaaaatatctggtctggatgtgattagtaaggatacaagataatgttctaagactgcctaatgctttttgtttgattttcatctgccaggcgttgttatgtgctatgagggtagcaagtacgtctttgtcttaatgatctaaggctggtgtagaaacaaagggcctaatgagaaccaatcatcatggaagtcagttgcgggggcagcccataaggaaagggaaagtgagtggggttgggcataggctgagtgaggtggcctgaatgacacctcttagaggactgtgaagtacaggcacagcccgactgcagggagggatgcacccatcatttacccatgggagcatctgtaggaccatctctctcccacttcttctcccctcccccaccgcatctggccagatggactgtcctacagcaatcgtttccatctgtcaccctcttccctctcctttcataccagtcactatcttgggtaacaaatttatacaggacagtggtacagaaatacatctttgctctgagaatacagcaaatattaacttaaattattataactgaacaaataataaaacctgaattttaatatcttcaaaaaaaaaatctgaattatttgtctaaattttagtatcacaatagcctagatgtaaaataaaatacaaatattttcctccactaataagagacatatacagaaaagcaaacatcaaaaggtacagaggacatgaagattctgtttttctcctccctttggagaaaaagttgacaatatttattctcaaagttcacctttgactggagggaaattcagcacgcctgtacttgaaaatgaattcttacatgttaaaataacttttaataagtttaacatctatcagtgaaataatgtttaatccttttaaacagatggtctttgctgaaaagaataaacccaactgaaaatagcattagaaagtacttaaaagaactatgtttgacagtttttggctcatagcacttttatgttaaattcatgtatactgtttacagacttcataatgaattttatattgtaccagtaagctctgcagaaggcattcaccattactgcatggaatgcccaaacatgcccatgaggaaaattaaaggtaaaacaatttaagtaaaagtctctctagaattctattactggctattttatcactacctggtaaaattaaaattaatctttcagtaaagccaactgatctaagagagaaatattacactttatattttaaaaattcacttaaaattggatgtgcttacagttctaacattgtccttgagagcagaagcgtgaggatcttctggtgagagcatgcatgccctactccatttgttgtctgcataggttagggctgctgctagctgctgtaatagacaccatccatttaagaaggctgcagcaccagaggccgatttcttgctcatgtaactgtcagcagtgagtcttcctggcaggagggcagctcccctccttgcagagattcagttacccagactcccttctgccctgggctctgccatcccctataataaccctcatgtcctctgcatccagcccatggagggg

SEQ ID NO: 16693 - DNA, 1465 bp, Homo sapiens
gtttctacaccagccttagatcattaaacaaagggcctaatgagaaccaatcatcatggaagtcagttgcgggggcagcccataaggaaagggaaagtgagtggggttgggcataggctgagtgaggtggcctgaatgacacctcttagaggactgtgaagtacaggcacagcccgactgcagggagggatgcacccatcatttacccatgggagcatctgtaggaccatctctctcccacttcttctcccctcccccaccgcatctggccagatggactgtcctacagcaatcgtttccatctgtcaccctcttccctctcctttcataccagtcactatcttgggtaacaaatttatacaggacagtggtacagaaatacatctttgctctgagaatacagcaaatattaacttaaattattataactgaacaaataataaaacctgaattttaatatcttcaaaaaaaaaatctgaattatttgtctaaattttagtatcacaatagcctagatgtaaaataaaatacaaatattttcctccactaataagagacatatacagaaaagcaaacatcaaaaggtacagaggacatgaagattctgtttttctcctccctttggagaaaaagttgacaatatttattctcaaagttcacctttgactggagggaaattcagcacgcctgtacttgaaaatgaattcttacatgttaaaataacttttaataagtttaacatctatcagtgaaataatgtttaatccttttaaacagatggtctttgctgaaaagaataaacccaactgaaaatagcattagaaagtacttaaaagaactatgtttgacagtttttggctcatagcacttttatgttaaattcatgtatactgtttacagacttcataatgaattttatattgtaccagtaagctctgcagaaggcattcaccattactgcatggaatgcccaaacatgcccatgaggaaaattaaaggtaaaacaatttaagtaaaagtctctctagaattctattactggctattttatcactacctggtaaaattaaaattaatctttcagtaaagccaactgatctaagagagaaatattacactttatattttaaaaattcacttaaaattggatgtgcttacagttctaacattgtccttgagagcagaagcgtgaggatcttctggtgagagcatgcatgccctactccatttgttgtctgcataggttagggctgctgctagctgctgtaatagacaccatccatttaagaaggctgcagcaccagaggccgatttcttgctcatgtaactgtcagcagtgagtcttcctggcaggagggcagctcccctccttgcagagattcagttacccagactcccttctgccctgggctctgccatcccctataataaccctcatgtcctctgcatccagcccatggagggg

SEQ ID NO: 16694 - DNA, 813 bp, Homo sapiens
tatgatttgtggacatactgttaatcttaactaggttagattccagacatcataggtcaataattgtctaattgctaaaatgtgttgcccatccttaatatggggataaggaaaaggctaggggaaggagagaaagctggacatctttaaaagccttcatattcatcaactcatgaacattacacacatattcaaaaacaagaaggatatgggttaaaatgagatactttataaggaactaaatgcttttaatgagaacaaatatgaaatcaagcttctgatggctgacccctttcttcaaatgtgggtactcttttaggaggagttacttgcagaccttcacggaacagttgcctttaaggatttcattctaagcaggggctacaggatgccacgtttccttgagaatatgtatatcgggaaggaatgtaaacgtgcatgtaataagactcctataaaacgaactcaagcatagaagaatcgtaggagaatgattaggcagattttattactacgtacttggctatttctctgtctccttttaaagattaaacagagtttatgatgagtgtcccactgtggatgttcaactttgacttggcaacatctgtaaatgtaatacctgatggttataagcatttctcaatggatttctgcttcagttaatcaacattttgtatactttatcacccatgagatcaatattcacatgtaatcttctcatatttttgtggcacgtgaatattatataggtatatcaactattggtaaaaataaataaaggcataaataaaaacagacttactctattgc

SEQ ID NO: 16695 - DNA, 1101 bp, Homo sapiens
cacttcttgtttagcttctctccttcgcgtcttgtactagggaccttcctgcgcgtatctcgccttctttctttgatcttctagtctttaatcttcaggatatccaccttgtagctatgttgtttctctaccttgtcgtgttggtttcgcgttgcttaccgcgcgctctggtgtcgtccacgctcgttgctgactgagcacgcgtgtcttgtggaccgtttctctcgccgttattatctcacatcgaatgcgttgtatccaagcgtcatgattctatgatctattaggtatctccctcctcttatgctttcagcattgtcgtcttatgggagttgcttcattctcttacttgtgctcatttctatgctttatttgatagtcctatgtttattttatgtaggttggaatgtcatttgtgtctaactacgattttttccactcttgtttgctctactctctatcgaggatgattgttttttcttttgatcgttgagcgagctgcttgcattttattctcatcgctcagatcttattcgttaattatcatggttcataatatctggcagcacaggaatatttacgtcgatgttggctttttttcccagcggatgttccttgcgaaagggggatgtactgtgcaagttttgtttgccaatctaatgaaggttctctcatttttttttagttccttgagaatatgtatatcgggaaggaatgtaaacgtgcatgtaataagactcctataaaacgaactcaagcatagaagaatcgtaggagaatgattaggcagattttattactacgtacttggctatttctctgtctccttttaaagattaaacagagtttatgatgagtgtcccactgtggatgttcaactttgacttggcaacatctgtaaatgtaatacctgatggttataagcatttctcaatggatttctgcttcagttaatcaacattttgtatactttatcacccatgagatcaatattcacatgtaatcttctcatatttttgtggcacgtgaatattatataggtatatcaactattggtaaaaataaataaaggcataaataaaaacagacttactctattgc

SEQ ID NO: 16696 - DNA, 4038 bp, Homo sapiens
tacgtatcgccagcccccatcccggtacatcacgtttacatgcatgcagccatacacgcccaaagaggacgagactggatgtgattgagctgactggcatctttagatggatggtcctcagtccagtccttccattttacaggcgaggaggcggaagcttggggaggctaagcgcgctgagctggcggcggagcggagcttccactagggctcccagtttccccgcaccgcgcccgccgtcctccgggccacccatcccacccgaacgcgccaccgctctagcccgcgctccagcccgcgcgtcaccgacgcccgcggcctctcccacctctaagttccaggaagctctcggcctctagctgaccgcgttgctgctgagcttccctggggaggaggcgccgaggtgcccggtgcgggccgaggcagggctgggcctcgcgggcagcaggcggaagaaggaagggcggtggggcaggtccggctgcgcggggcagttgtgcgcacttgggttcttcacgcgggacacacgtggaacgccgacgccgctgccccgctgccgctgtcaacgtgcaaggccgtgaacagaaagtgtagggacagaagagcgctggagtgctgtcccgggagggagcccggggctgcagcccaggggcggggagcggggcggggctgggaaagttgagtactggtcgctcagggccgggctccgccggagtgcccggcgcagaaaccgtaaaaggctggagcgggcggggtaggtgtggctctgtgtgcgtgacctgagccccggtcccagtccctgtagtctcctgcggccgcggcctctcagccatgggcgccgtctggtccgccctgctggttggagggggtctggccggagcacttttcgtttggctgctgcggggcggccctggcgacaccgggaaggacggggatgcggagcaggagaaagacgcccctcttgggggagctgcgattccgggaggccatcagagtggcagcagcggactgagccctggaccttccgggcaggagctggtcaccaaaccagagcatcttcaagaaagcaatggacatttgatttctaagaccaaagaccttggtaaactgcaagcagcatcatggagattgcagaatccttccagggaagtctgtgacaattcaagagaacatgttccttctggacagtttccagacacagaagctccagctacctctgagaccagtaactctaggagttactctgaagtttcaagaaatgaaagccttgaatctcctatgggagaatggggattccaaaaaggacaagagatatctgctaaagcagctacatgttttgcagagaagttgccttctagcaacctgctcaagaacagagctaaagaagaaatgagcctctctgatttgaacagtcaggaccgggttgaccacgaggagtgggaaatggtgcctaggcactcatcttggggggatgttggtgtgggtggcagtcttaaggctccagtgttaaacctaaaccagggaatggacaatggaagaagcactttggtggaagcaagaggtcagcaagtgcatgggaaaatggaaagggtagcagtgatgcctgcagggtctcagcaagttagtgtcaggttccaggtccattatgtcacaagcactgatgtgcaattcattgcagtaactggagaccatgagtgtcttgggagatggaacacttacatcccactccactataacaaggatgggttctggtctcattccattttcctgcctgcagatacagtggtggagtggaagtttgtgttggtagagaatgggggagttacccgctgggaagaatgcagcaatagattcctagaaactggccatgaggataaagtggttcacgcatggtgggggattcactgattcagtttgcaaagtaatggagaagctgtagaacaatgtggaagaggctgaggttgtggaacacactgaataaaataaaggcagtgtgactccaaattcagccatctgaattgtttaaatttgctagtggattttgtctactgtgcagaaatatatatgtctaatgtgcagaaatatatatgtgtgtatgtgtgtatatatatgcacacacacacagataatgcttccagtgaatgtgaacttcttttccctgtggcactgattgacagacttgtgctgatccattattactttagggcttgattctcttggggagtgacttggctaagcttcaggtgtaaactgtggtcacggagcaaaaacattaaccagctgcccagggttcaagcttgagcctttaggtgatctttaaactatggtagtaaaataagcctcactcaaacatagctgacttcctattggtacagcttgaaaagcactttttactacatacacattttatgcttaaaaagttaacatgatacgaaactgtgattagaaaatatctggtctggatgtgattagtaaggatacaagataatgttctaagactgcctaatgctttttgtttgattttcatctgccaggcgttgttatgtgctatgagggtagcaagtacgtctttgtcttaatgatctaaggctggtgtagaaacaaagggcctaatgagaaccaatcatcatggaagtcagttgcgggggcagcccataaggaaagggaaagtgagtggggttgggcataggctgagtgaggtggcctgaatgacacctcttagaggactgtgaagtacaggcacagcccgactgcagggagggatgcacccatcatttacccatgggagcatctgtaggaccatctctctcccacttcttctcccctcccccaccgcatctggccagatggactgtcctacagcaatcgtttccatctgtcaccctcttccctctcctttcataccagtcactatcttgggtaacaaatttatacaggacagtggtacagaaatacatctttgctctgagaatacagcaaatattaacttaaattattataactgaacaaataataaaacctgaattttaatatcttcaaaaaaaaaatctgaattatttgtctaaattttagtatcacaatagcctagatgtaaaataaaatacaaatattttcctccactaataagagacatatacagaaaagcaaacatcaaaaggtacagaggacatgaagattctgtttttctcctccctttggagaaaaagttgacaatatttattctcaaagttcacctttgactggagggaaattcagcacgcctgtacttgaaaatgaattcttacatgttaaaataacttttaataagtttaacatctatcagtgaaataatgtttaatccttttaaacagatggtctttgctgaaaagaataaacccaactgaaaatagcattagaaagtacttaaaagaactatgtttgacagtttttggctcatagcacttttatgttaaattcatgtatactgtttacagacttcataatgaattttatattgtaccagtaagctctgcagaaggcattcaccattactgcatggaatgcccaaacatgcccatgaggaaaattaaaggtaaaacaatttaagtaaaagtctctctagaattctattactggctattttatcactacctggtaaaattaaaattaatctttcagtaaagccaactgatctaagagagaaatattacactttatattttaaaaattcacttaaaattggatgtgcttacagttctaacattgtccttgagagcagaagcgtgaggatcttctggtgagagcatgcatgccctactccatttgttgtctgcataggttagggctgctgctagctgctgtaatagacaccatccatttaagaaggctgcagcaccagaggccgatttcttgctcatgtaactgtcagcagtgagtcttcctggcaggagggcagctcccctccttgcagagattcagttacccagactcccttctgccctgggctctgccatcccctataataaccctcatgtcctctgcatccagcccatggagggg

SEQ ID NO: 16697 - DNA, 4091 bp, Homo sapiens
agcccggacggtggccgcgaagctagggccaccatggcggaccgcaggcggcggctccggccggggacgttggccccggtgcgcgagggcgtgaactgcaggtccagatgtttcacaaagcacaagaacgggctgaagttccccacctctctgcacagccggcagttggtatttccaagaaaggggctggacgacttcaggaagggctgcccgccttgcactggtctggtgactcaggtccctgtggagggctttctgccccagatttatcacagagctccccaactggccccaaagaagaggcagatcaagctgctcaaggaagcagacgtgctttccaagctctcgccagcccagcaggctcggaaggcattcctggaggacgtggaggcccacctgaccccacatcccttagcgctctacctgaatctggaagaagctatgcccatagagctcttatcaaaggtgctggaagtgcttgatcctgaccggaagctggaggacacatgggcttattgtcaggacaccaggaaaggaatgaaggaacccacgaagcttttaaaaaaacattctacccaagtctacctgggaccttccaagaagacgtctgtgtcaaacgcaggccaatggctttatgaagaaaagccacataaaatggatttgctccatgaaaatggtcctcgtcctggtcttcatgaaaatgtatgcaaagcagttagtgacttctgcaagtgggttactacttttggaatttcggacatcgatgaagagttcatcttgaaacagtttgacattgactatgagaccaaaccaagccatgatgcgctccacacgatgaagctaaatcaggttcctctggagctaaagcgtagtgtggggctcagtaaactgcaggagacagagttcttccagaaactaggctatgagaggaaactccagaaaccacagaatccttataagccaaagtgggtgaagatgaggtatggagcatggtatttgaaccccaagttgtggaaaaagcaaagagtagacgagcctctggttgaccctgaggtctcacataaggctcaagaggagaattttaaaaaggagctgcaggaacagagcatcttcaagaaagcaatggacatttgatttctaagaccaaagaccttggtaaactgcaagcagcatcatggagattgcagaatccttccagggaagtctgtgacaattcaagagaacatgttccttctggacagtttccagacacagaagctccagctacctctgagaccagtaactctaggagttactctgaagtttcaagaaatgaaagccttgaatctcctatgggagaatggggattccaaaaaggacaagagatatctgctaaagcagctacatgttttgcagagaagttgccttctagcaacctgctcaagaacagagctaaagaagaaatgagcctctctgatttgaacagtcaggaccgggttgaccacgaggagtgggaaatggtgcctaggcactcatcttggggggatgttggtgtgggtggcagtcttaaggctccagtgttaaacctaaaccagggaatggacaatggaagaagcactttggtggaagcaagaggtcagcaagtgcatgggaaaatggaaagggtagcagtgatgcctgcagggtctcagcaagttagtgtcaggttccaggtccattatgtcacaagcactgatgtgcaattcattgcagtaactggagaccatgagtgtcttgggagatggaacacttacatcccactccactataacaaggatgggttctggtctcattccattttcctgcctgcagatacagtggtggagtggaagtttgtgttggtagagaatgggggagttacccgctgggaagaatgcagcaatagattcctagaaactggccatgaggataaagtggttcacgcatggtgggggattcactgattcagtttgcaaagtaatggagaagctgtagaacaatgtggaagaggctgaggttgtggaacacactgaataaaataaaggcagtgtgactccaaattcagccatctgaattgtttaaatttgctagtggattttgtctactgtgcagaaatatatatgtctaatgtgcagaaatatatatgtgtgtatgtgtgtatatatatgcacacacacacagataatgcttccagtgaatgtgaacttcttttccctgtggcactgattgacagacttgtgctgatccattattactttagggcttgattctcttggggagtgacttggctaagcttcaggtgtaaactgtggtcacggagcaaaaacattaaccagctgcccagggttcaagcttgagcctttaggtgatctttaaactatggtagtaaaataagcctcactcaaacatagctgacttcctattggtacagcttgaaaagcactttttactacatacacattttatgcttaaaaagttaacatgatacgaaactgtgattagaaaatatctggtctggatgtgattagtaaggatacaagataatgttctaagactgcctaatgctttttgtttgattttcatctgccaggcgttgttatgtgctatgagggtagcaagtacgtctttgtcttaatgatctaaggctggtgtagaaacaaagggcctaatgagaaccaatcatcatggaagtcagttgcgggggcagcccataaggaaagggaaagtgagtggggttgggcataggctgagtgaggtggcctgaatgacacctcttagaggactgtgaagtacaggcacagcccgactgcagggagggatgcacccatcatttacccatgggagcatctgtaggaccatctctctcccacttcttctcccctcccccaccgcatctggccagatggactgtcctacagcaatcgtttccatctgtcaccctcttccctctcctttcataccagtcactatcttgggtaacaaatttatacaggacagtggtacagaaatacatctttgctctgagaatacagcaaatattaacttaaattattataactgaacaaataataaaacctgaattttaatatcttcaaaaaaaaaatctgaattatttgtctaaattttagtatcacaatagcctagatgtaaaataaaatacaaatattttcctccactaataagagacatatacagaaaagcaaacatcaaaaggtacagaggacatgaagattctgtttttctcctccctttggagaaaaagttgacaatatttattctcaaagttcacctttgactggagggaaattcagcacgcctgtacttgaaaatgaattcttacatgttaaaataacttttaataagtttaacatctatcagtgaaataatgtttaatccttttaaacagatggtctttgctgaaaagaataaacccaactgaaaatagcattagaaagtacttaaaagaactatgtttgacagtttttggctcatagcacttttatgttaaattcatgtatactgtttacagacttcataatgaattttatattgtaccagtaagctctgcagaaggcattcaccattactgcatggaatgcccaaacatgcccatgaggaaaattaaaggtaaaacaatttaagtaaaagtctctctagaattctattactggctattttatcactacctggtaaaattaaaattaatctttcagtaaagccaactgatctaagagagaaatattacactttatattttaaaaattcacttaaaattggatgtgcttacagttctaacattgtccttgagagcagaagcgtgaggatcttctggtgagagcatgcatgccctactccatttgttgtctgcataggttagggctgctgctagctgctgtaatagacaccatccatttaagaaggctgcagcaccagaggccgatttcttgctcatgtaactgtcagcagtgagtcttcctggcaggagggcagctcccctccttgcagagattcagttacccagactcccttctgccctgggctctgccatcccctataataaccctcatgtcctctgcatccagcccatggagggg

SEQ ID NO: 16698 - DNA, 2422 bp, Homo sapiens
gacatggagagatataaacatataatgtctaaatgaaatgtatgatgtgcaattcattgcagtaactggagaccatgagtgtcttgggagatggaacacttacatcccactccactataacaaggatgggttctggtctcattccattttcctgcctgcagatacagtggtggagtggaagtttgtgttggtagagaatgggggagttacccgctgggaagaatgcagcaatagattcctagaaactggccatgaggataaagtggttcacgcatggtgggggattcactgattcagtttgcaaagtaatggagaagctgtagaacaatgtggaagaggctgaggttgtggaacacactgaataaaataaaggcagtgtgactccaaattcagccatctgaattgtttaaatttgctagtggattttgtctactgtgcagaaatatatatgtctaatgtgcagaaatatatatgtgtgtatgtgtgtatatatatgcacacacacacagataatgcttccagtgaatgtgaacttcttttccctgtggcactgattgacagacttgtgctgatccattattactttagggcttgattctcttggggagtgacttggctaagcttcaggtgtaaactgtggtcacggagcaaaaacattaaccagctgcccagggttcaagcttgagcctttaggtgatctttaaactatggtagtaaaataagcctcactcaaacatagctgacttcctattggtacagcttgaaaagcactttttactacatacacattttatgcttaaaaagttaacatgatacgaaactgtgattagaaaatatctggtctggatgtgattagtaaggatacaagataatgttctaagactgcctaatgctttttgtttgattttcatctgccaggcgttgttatgtgctatgagggtagcaagtacgtctttgtcttaatgatctaaggctggtgtagaaacaaagggcctaatgagaaccaatcatcatggaagtcagttgcgggggcagcccataaggaaagggaaagtgagtggggttgggcataggctgagtgaggtggcctgaatgacacctcttagaggactgtgaagtacaggcacagcccgactgcagggagggatgcacccatcatttacccatgggagcatctgtaggaccatctctctcccacttcttctcccctcccccaccgcatctggccagatggactgtcctacagcaatcgtttccatctgtcaccctcttccctctcctttcataccagtcactatcttgggtaacaaatttatacaggacagtggtacagaaatacatctttgctctgagaatacagcaaatattaacttaaattattataactgaacaaataataaaacctgaattttaatatcttcaaaaaaaaaatctgaattatttgtctaaattttagtatcacaatagcctagatgtaaaataaaatacaaatattttcctccactaataagagacatatacagaaaagcaaacatcaaaaggtacagaggacatgaagattctgtttttctcctccctttggagaaaaagttgacaatatttattctcaaagttcacctttgactggagggaaattcagcacgcctgtacttgaaaatgaattcttacatgttaaaataacttttaataagtttaacatctatcagtgaaataatgtttaatccttttaaacagatggtctttgctgaaaagaataaacccaactgaaaatagcattagaaagtacttaaaagaactatgtttgacagtttttggctcatagcacttttatgttaaattcatgtatactgtttacagacttcataatgaattttatattgtaccagtaagctctgcagaaggcattcaccattactgcatggaatgcccaaacatgcccatgaggaaaattaaaggtaaaacaatttaagtaaaagtctctctagaattctattactggctattttatcactacctggtaaaattaaaattaatctttcagtaaagccaactgatctaagagagaaatattacactttatattttaaaaattcacttaaaattggatgtgcttacagttctaacattgtccttgagagcagaagcgtgaggatcttctggtgagagcatgcatgccctactccatttgttgtctgcataggttagggctgctgctagctgctgtaatagacaccatccatttaagaaggctgcagcaccagaggccgatttcttgctcatgtaactgtcagcagtgagtcttcctggcaggagggcagctcccctccttgcagagattcagttacccagactcccttctgccctgggctctgccatcccctataataaccctcatgtcctctgcatccagcccatggagggg

SEQ ID NO: 16699 - DNA, 1706 bp, Homo sapiens
tacagacagtgcttaataaagagctgctgtttttattaacaaacttatctgtaggagctcgtccatggacaacatccagttcatacagatgcgtgcgcatttcgcagcagccatacacgcccaaagaggacgagactggatgtgattgagctgactggcatctttagatggatggtcctcagtccagtccttccattttacaggcgaggaggcggaagcttggggaggctaagcgcgctgagctggcggcggagcggagcttccactagggctcccagtttccccgcaccgcgcccgccgtcctccgggccacccatcccacccgaacgcgccaccgctctagcccgcgctccagcccgcgcgtcaccgacgcccgcggcctctcccacctctaagttccaggaagctctcggcctctagctgaccgcgttgctgctgagcttccctggggaggaggcgccgaggtgcccggtgcgggccgaggcagggctgggcctcgcgggcagcaggcggaagaaggaagggcggtggggcaggtccggctgcgcggggcagttgtgcgcacttgggttcttcacgcgggacacacgtggaacgccgacgccgctgccccgctgccgctgtcaacgtgcaaggccgtgaacagaaagtgtagggacagaagagcgctggagtgctgtcccgggagggagcccggggctgcagcccaggggcggggagcggggcggggctgggaaagttgagtactggtcgctcagggccgggctccgccggagtgcccggcgcagaaaccgtaaaaggctggagcgggcggggtaggtgtggctctgtgtgcgtgacctgagccccggtcccagtccctgtagtctcctgcggccgcggcctctcagccatgggcgccgtctggtccgccctgctggttggagggggtctggccggagcacttttcgtttggctgctgcggggcggccctggcgacaccgggaaggacggggatgcggagcaggagaaagacgcccctcttgggggagctgcgattccgggaggccatcagagtggcagcagcggactgagccctggaccttccgggcaggagctggtcaccaaaccaggtattcttccccccgtgactccagggcacatctgccagagctttgaggttcatcgaggaagggagcaaagagacaaacccacctggagctttcctaggggcccattcctgcggacgggctctcctaaggggactgggccatccccacgcccctcggtttcccaggctggttggtacgcgcaggcaggtttcttgtctggtcctccaagggccgcgcccttgccgagtccctcagcgcccgcgcctgaggacttggtcctgcccctccggcggggatgagctcctccacttggcggcgcttggtgcagtgcgggcggctgcagtggcggcgccccttcccggcctttggaaaggggggcttaggtttaggggatcctacaagcctcttcgatctctgcccaagcagggacattttctaagtcccaatccgggtagtctgacatcctcccatcgcacagcccatgaagagctgggtttgggaacacccgaactgcgggcgcctcctgctatctggatgcttctttaggaaggcaaagttcaggttggactctggccatgaaggctgtggctgaggccctggggatgtgccttggtc

SEQ ID NO: 16700 - DNA, 4099 bp, Homo sapiens
tacagacagtgcttaataaagagctgctgtttttattaacaaacttatctgtaggagctcgtccatggacaacatccagttcatacagatgcgtgcgcatttcgcagcagccatacacgcccaaagaggacgagactggatgtgattgagctgactggcatctttagatggatggtcctcagtccagtccttccattttacaggcgaggaggcggaagcttggggaggctaagcgcgctgagctggcggcggagcggagcttccactagggctcccagtttccccgcaccgcgcccgccgtcctccgggccacccatcccacccgaacgcgccaccgctctagcccgcgctccagcccgcgcgtcaccgacgcccgcggcctctcccacctctaagttccaggaagctctcggcctctagctgaccgcgttgctgctgagcttccctggggaggaggcgccgaggtgcccggtgcgggccgaggcagggctgggcctcgcgggcagcaggcggaagaaggaagggcggtggggcaggtccggctgcgcggggcagttgtgcgcacttgggttcttcacgcgggacacacgtggaacgccgacgccgctgccccgctgccgctgtcaacgtgcaaggccgtgaacagaaagtgtagggacagaagagcgctggagtgctgtcccgggagggagcccggggctgcagcccaggggcggggagcggggcggggctgggaaagttgagtactggtcgctcagggccgggctccgccggagtgcccggcgcagaaaccgtaaaaggctggagcgggcggggtaggtgtggctctgtgtgcgtgacctgagccccggtcccagtccctgtagtctcctgcggccgcggcctctcagccatgggcgccgtctggtccgccctgctggttggagggggtctggccggagcacttttcgtttggctgctgcggggcggccctggcgacaccgggaaggacggggatgcggagcaggagaaagacgcccctcttgggggagctgcgattccgggaggccatcagagtggcagcagcggactgagccctggaccttccgggcaggagctggtcaccaaaccagagcatcttcaagaaagcaatggacatttgatttctaagaccaaagaccttggtaaactgcaagcagcatcatggagattgcagaatccttccagggaagtctgtgacaattcaagagaacatgttccttctggacagtttccagacacagaagctccagctacctctgagaccagtaactctaggagttactctgaagtttcaagaaatgaaagccttgaatctcctatgggagaatggggattccaaaaaggacaagagatatctgctaaagcagctacatgttttgcagagaagttgccttctagcaacctgctcaagaacagagctaaagaagaaatgagcctctctgatttgaacagtcaggaccgggttgaccacgaggagtgggaaatggtgcctaggcactcatcttggggggatgttggtgtgggtggcagtcttaaggctccagtgttaaacctaaaccagggaatggacaatggaagaagcactttggtggaagcaagaggtcagcaagtgcatgggaaaatggaaagggtagcagtgatgcctgcagggtctcagcaagttagtgtcaggttccaggtccattatgtcacaagcactgatgtgcaattcattgcagtaactggagaccatgagtgtcttgggagatggaacacttacatcccactccactataacaaggatgggttctggtctcattccattttcctgcctgcagatacagtggtggagtggaagtttgtgttggtagagaatgggggagttacccgctgggaagaatgcagcaatagattcctagaaactggccatgaggataaagtggttcacgcatggtgggggattcactgattcagtttgcaaagtaatggagaagctgtagaacaatgtggaagaggctgaggttgtggaacacactgaataaaataaaggcagtgtgactccaaattcagccatctgaattgtttaaatttgctagtggattttgtctactgtgcagaaatatatatgtctaatgtgcagaaatatatatgtgtgtatgtgtgtatatatatgcacacacacacagataatgcttccagtgaatgtgaacttcttttccctgtggcactgattgacagacttgtgctgatccattattactttagggcttgattctcttggggagtgacttggctaagcttcaggtgtaaactgtggtcacggagcaaaaacattaaccagctgcccagggttcaagcttgagcctttaggtgatctttaaactatggtagtaaaataagcctcactcaaacatagctgacttcctattggtacagcttgaaaagcactttttactacatacacattttatgcttaaaaagttaacatgatacgaaactgtgattagaaaatatctggtctggatgtgattagtaaggatacaagataatgttctaagactgcctaatgctttttgtttgattttcatctgccaggcgttgttatgtgctatgagggtagcaagtacgtctttgtcttaatgatctaaggctggtgtagaaacaaagggcctaatgagaaccaatcatcatggaagtcagttgcgggggcagcccataaggaaagggaaagtgagtggggttgggcataggctgagtgaggtggcctgaatgacacctcttagaggactgtgaagtacaggcacagcccgactgcagggagggatgcacccatcatttacccatgggagcatctgtaggaccatctctctcccacttcttctcccctcccccaccgcatctggccagatggactgtcctacagcaatcgtttccatctgtcaccctcttccctctcctttcataccagtcactatcttgggtaacaaatttatacaggacagtggtacagaaatacatctttgctctgagaatacagcaaatattaacttaaattattataactgaacaaataataaaacctgaattttaatatcttcaaaaaaaaaatctgaattatttgtctaaattttagtatcacaatagcctagatgtaaaataaaatacaaatattttcctccactaataagagacatatacagaaaagcaaacatcaaaaggtacagaggacatgaagattctgtttttctcctccctttggagaaaaagttgacaatatttattctcaaagttcacctttgactggagggaaattcagcacgcctgtacttgaaaatgaattcttacatgttaaaataacttttaataagtttaacatctatcagtgaaataatgtttaatccttttaaacagatggtctttgctgaaaagaataaacccaactgaaaatagcattagaaagtacttaaaagaactatgtttgacagtttttggctcatagcacttttatgttaaattcatgtatactgtttacagacttcataatgaattttatattgtaccagtaagctctgcagaaggcattcaccattactgcatggaatgcccaaacatgcccatgaggaaaattaaaggtaaaacaatttaagtaaaagtctctctagaattctattactggctattttatcactacctggtaaaattaaaattaatctttcagtaaagccaactgatctaagagagaaatattacactttatattttaaaaattcacttaaaattggatgtgcttacagttctaacattgtccttgagagcagaagcgtgaggatcttctggtgagagcatgcatgccctactccatttgttgtctgcataggttagggctgctgctagctgctgtaatagacaccatccatttaagaaggctgcagcaccagaggccgatttcttgctcatgtaactgtcagcagtgagtcttcctggcaggagggcagctcccctccttgcagagattcagttacccagactcccttctgccctgggctctgccatcccctataataaccctcatgtcctctgcatccagcccatggagggg

SEQ ID NO: 16701 - DNA, 1598 bp, Homo sapiens
agcccggacggtggccgcgaagctagggccaccatggcggaccgcaggcggcggctccggccggggacgttggccccggtgcgcgagggcgtgaactgcaggtccagatgtttcacaaagcacaagaacgggctgaagttccccacctctctgcacagccggcagttggtatttccaagaaaggggctggacgacttcaggaagggctgcccgccttgcactggtctggtgactcaggtccctgtggagggctttctgccccagatttatcacagagctccccaactggccccaaagaagaggcagatcaagctgctcaaggaagcagacgtgctttccaagctctcgccagcccagcaggctcggaaggcattcctggaggacgtggaggcccacctgaccccacatcccttagcgctctacctgaatctggaagaagctatgcccatagagctcttatcaaaggtgctggaagtgcttgatcctgaccggaagctggaggacacatgggcttattgtcaggacaccaggaaaggaatgaaggaacccacgaagcttttaaaaaaacattctacccaagtctacctgggaccttccaagaagacgtctgtgtcaaacgcaggccaatggctttatgaagaaaagccacataaaatggatttgctccatgaaaatggtcctcgtcctggtcttcatgaaaatgtatgcaaagcagttagtgacttctgcaagtgggttactacttttggaatttcggacatcgatgaagagttcatcttgaaacagtttgacattgactatgagaccaaaccaagccatgatgcgctccacacgatgaagctaaatcaggttcctctggagctaaagcgtagtgtggggctcagtaaactgcaggagacagagttcttccagaaactaggctatgagaggaaactccagaaaccacagaatccttataagccaaagtgggtgaagatgaggtatggagcatggtatttgaaccccaagttgtggaaaaagcaaagagtagacgagcctctggttgaccctgaggtctcacataaggctcaagaggagaattttaaaaaggagctgcaggaacaggaggagttacttgcagaccttcacggaacagttgcctttaaggatttcattctaagcaggggctacaggatgccacgtttccttgagaatatgtatatcgggaaggaatgtaaacgtgcatgtaataagactcctataaaacgaactcaagcatagaagaatcgtaggagaatgattaggcagattttattactacgtacttggctatttctctgtctccttttaaagattaaacagagtttatgatgagtgtcccactgtggatgttcaactttgacttggcaacatctgtaaatgtaatacctgatggttataagcatttctcaatggatttctgcttcagttaatcaacattttgtatactttatcacccatgagatcaatattcacatgtaatcttctcatatttttgtggcacgtgaatattatataggtatatcaactattggtaaaaataaataaaggcataaataaaaacagacttactctattgc

SEQ ID NO: 16702 - DNA, 855 bp, Homo sapiens
agcccggacggtggccgcgaagctagggccaccatggcggaccgcaggcggcggctccggccggggacgttggccccggtgcgcgagggcgtgaactgcaggtccagatgtttcacaaagcacaagaacgggctgaagttccccacctctctgcacagccggcagttggtatttccaagaaaggggctggacgacttcaggaagggctgcccgccttgcactggtctggtgactcaggtccctgtggagggctttctgccccagatttatcacagagctccccaactggccccaaagaagaggcagatcaagctgctcaaggaagcagacgtgctttccaagctctcgccagcccagcaggctcggaaggcattcctggaggacgtggaggcccacctgaccccacatcccttagcgctctacctgaatctggaagaagctatgcccatagagctcttatcaaaggtgctggaagtgcttgatcctgaccggaagctggaggacacatgggcttattgtcaggacaccaggaaaggaatgaaggaacccacgaagcttttaaaaaaacattctacccaagtctacctgggaccttccaagaagacgtctgtgtcaaacgcaggccaatggctttatgaagaaaagccacataaaatggatttgctccatgaaaatggtcctcgtcctggtcttcatgaaaatgtatgcaaagcagttagtgacttctgcaagtgggttactacttttgtaagttagtggtaatatttaaacctacttttaaatgtcaagctcaaagttgcttttattaaaaaacagtattggataaaatctaagtcaaatcctcaaagtcgtaaa

SEQ ID NO: 16703 - DNA, 1761 bp, Homo sapiens
  misc_feature (1163)..(1163): n is a, c, g, or t
catatatacacccaggatatcattttatatatgtcacaattcatgaaatatcttatatttcatcttcaaacttatcctctggccctggaactattctaatcactgctcttgcttctggaatgcttagcttcatgccatagtagagcattttcagaaaactggtaagctcagctaaagctaatatggcatatatggatagaacatttgatgagtaaattccagttctgaaagtctactagtcgctgaaatacttagaataaaaaatgaggattgattttgtatgtgtcatgaaacagtagcatttctaggtcagcattttcccagctgtgttattctttcctgtttgtcaatgctcagtgcatcttagaggtaggaaattattctactgcttgtgaaactagaactagatagcacatagtaataacacagtgtgaatagttattaggacctattatagcacttttcctgtagaacgctctagctgttttcttccataacatgggtcaaattgtgcctctcttaaatgggaagcacacagggagagggttccatcagacagatgtaggctgcatgactatcaagaggtgagaaatggttcaactcagctggccaagacccactcacacccctgagacccagcctagccagagaacagctggctgatcttggcaggagttttagggcagatagttcatcaccacagcaccactaatccattcattttctttctcaatataaggacccttgagaatgttcccatctcccttctgtgcatttttgctggcttccatccctggggaatcagccacattttctcatgtgtcttcagggcatcttaggacataggaaggggaaagaaatgaaattttaccttcaaagatgagaatggaagagagaataaaggaaactgtcctggacctcacaggcaataaacaaacagttaactgaagacttcactctgattcaatccactcttctttttagtgatctgcctatctgtgatgtatctccaggcaaaaactttcatatacagtagtttaaaaatgagctgtttcttcctgcaggtctgactgcacaggcatattgagcgaggcaacttgaacaccaggctgaggccgattttgtgaagcatctttcactctttctcttttctggggatgtgngacaggttgtgggtgggtgagtgtgtgtgtatgctggacttctttggaagatgtgggacccaagaagtatcactgtgagagtttaaggagacagttaatgacatgtgtttacagccattgtcacacaacagcatctgtaagaagattggacgtgattatctggatctagcttgaagtagtcaaggcaaagatataattgtgtagtcttgaagccaaataaatccccaaatgaacaaaacaacccacaatgaattatatcatgtactttgcaaaggtagctaagcttagggaagacccggcactgcactaacctcatctctcttggttattcacaaaaacaatttgagtctaagggcaaggcacctttgtcagttgcccattccattactaatgttggactttctttttcattcaagcctgacaaaatgctgcaacctgacatcccagcaggcagttttcactattgtactaactactccatctgttatgaaggtcacaagaatgtatcttgttttaaatttttctatggagtgatttattgtcttggctataaatttgtaaagaaataaaacgctatttcttcatcgtctcctgaggt

SEQ ID NO: 16704 - DNA, 679 bp, Homo sapiens
aactcctgacctcgtgatccacccaccttggcctcccaaagtgctaggattacaggtgtgagccaccgtgcttggccaacccacccaaattgtgtaccctacaccatcctagtgcttgggagccaacacccactcacaggaggctaagggcaagtttaggtaactcttaacaccacgaattagttgcctgctggcaaactttcaaactccaaggcctgaaatttctggttgggagttcaccttcccagatgggacttcaggggatttcatttcacccccttcatccagtgctcacggagcctctgtgaaggtgcaggccccctggagaggagcccctgtggccctcaagcaaaagggcaaggcaggctggtgaagcaccccaaccctctggatcgaggggactcaattatgcgggataaaggccccctaatcctctcagtgctcccaaactcactctgcttctgaaagggatcttcgtacccctgggttcagagagtaggaagcccgcagggaccgagtatgcatgaaacaagcccaagtctgtgggggctgtacatggtcaagatcacagatttccagaccaagccagctccaccctagctgggatgcccaccctgagacacccctctctgctttcactggaataggatgccctgacttggccgggtggactgttgaa

SEQ ID NO: 16705 - DNA, 431 bp, Homo sapiens
atttaaatcactaaaaaaatctactttctataaagcatttggagcaatcttgcatataatactcatttgcttagctaactctttttttctgtagataagtaaggtaaatgttaggccactagacaaaattatcatacatcttcaatcatcaatgtccagagtaatgagtcaatatatgtatgtacgtatgtatatgcatttaaaaaaatcactcttttgacacatttcacttttctttgtaagtaatataggtgggctagatcaggggttgtcaagtcatattagaatcatctgaggagatgtgggcatctggcgatgcccataccaattaaaagagtttctaggggtgtggatggaaagtgggaactggtagttttacaaggtccctgtcaccagggttgagacaccatagcttagagtcctgtaacttg

SEQ ID NO: 16706 - DNA, 380 bp, Homo sapiens
gtgccatttgaatggcacaagaccagacagtgtatgtgggggagtgtttctcaaatcaaactggaaactctttaatttgtaagaaccattaagcagagagagaaaaaagaaaggaaaagaaaaaagatcctacagagaacaccctgttcagtttgggaacaggctacagctttggatttttcaaggcctagcattcccatcattctaaattttacttagctaatacaatagtagttgccagagctgatgacatagtattttgtcatgcttggctccgttcaagcattttagttttttagccattaccatggctagacccagtcaaaagaatttcattgtttaagattcccattctctagtttttactagtagccagccaa

SEQ ID NO: 16707 - DNA, 268 bp, Homo sapiens
tcctcagctcccttcggtgaactgaagattgcagagaactgagtttgcaacatcctaacttgtcttcaggctgcttgaggtgtcactaactcagtgtataaaagagcaaaactagatttgaccgcagtctgaaggaagccatgggaagcagtggtgatgcctcatgaaaactgcaaggagctacaaacgtgaagacccctgagacaagagattgcctgctgaggaatacaattgaacagctaaggcccagaggagaagtaggggtgtg

SEQ ID NO: 16708 - DNA, 165 bp, Homo sapiens
ccaggggctgcatgtggacccccccgggcggcccaggggaccccgggcccgacccaggggctgtggacgatgtacaggcaacagagctacgcactcctttccttttggaagcaagaagaaaatacgtgaaaacggaaattaaagatttaaaattttaaaaaaaaa

SEQ ID NO: 16709 - DNA, 511 bp, Homo sapiens
ttatgagaggattcatcgaaatacctgtgctttgtcatttaaaaagcatgggcatacacatgataatgctttacgtttctggatttaaagtgccttcacaatacagaactaggaaaaagaaggccatctttttaaatgaagatagttttaagagagcaataagagactattactttgttatgatagaaggttgggctgatgtcataatgatgttatgatgtcactgacatcatattatttcctcagtcatacctattaaccatttcttgagcatccactatgggcttaatagataagaaacactccataccctttaagagccctgaggtgtgtgtgtgtgaacagcattaaactttggagtcatgttacctgggtttaaatccaagttgcatgaatactggctttgtgtgaccttggacaaactatttcactgtgtcttgcctcagtttctccatctgtaaaatgataataaagctatctcacagcattattatgaagattaaatgcatta

SEQ ID NO: 16710 - DNA, 559 bp, Homo sapiens
atttgatatagggttatctccctccaaaaattagtcatcttcatgtccaaagttcaatgttaatttacccatagtcatgagggcagggatcagcagcatcacggtctgatgaacattttcagcactgtacccagtgctccatggatctcaggttatcttttattattaaacccatttaataagagagatggcagttgaaaaattgaaggatttagagctagaaggcatcactggagcagaaagaaacagcatagccttcaggtcaacttgatactcttcccccatctcattccttctcactagaatagccacattcataattggaagcctagccagctcaggccaaagttatcattagtccaaggaaaaatgaccaaaaaggacagcatagtgagttttgtataaaagctcatttaaagatcgtcttatttggagatggtgtgccctcattttagtgttacaatgtatttgagagctgatgctgataataaatggctattttattaaatgctctagtttggcaaaattaaaagttgacagttttgttgttcttcacaag

SEQ ID NO: 16711 - DNA, 774 bp, Homo sapiens
gtcgggagaccagccattcgatcccgccgcagatttcctttttttctggggaactgtatttttaataacaacaacattggttgcccttctgaaaaaagaaaacgaagtatcagtagtaaaagaagaaacacaagggatcacagatacttacaagctgctttttgcaattataaaaatgccagcagttctgacattttgccttctgattctaactgcaaagattggtttttcagcagcagatgctgtaacaggactgaaattggtagaagagggagtacccaaagaacatttagccttattggcagttccaatggttcctttgcagataatactgcctctgattatcagcaaatacactgcaggtccccagccattaaacacattttacaaagccatgccctacagattattgcttgggttagaatatgccctactggtttggtggactcctaaagtagaacatcaagggggattccctatatattactatatcgtagtcctgctgagttatgctttacatcaggttacagtgtacagcatgtatgtttctataatggctttcaatgcaaaggttagtgatccacttattggaggaacatacatgacccttttaaataccgtgtccaatctgggaggaaactggccttctacagtagctctttggcttgtagatcccctcacagtaaaagagtgtgtaggagcatcaaaccagaattgtcgaacacctgatgctgttgagcttgcaaaaaaggcgccgactggatcctcaagcgc

SEQ ID NO: 16712 - DNA, 3753 bp, Homo sapiens
  misc_feature (67)..(67): n is a, c, g, or t
agagaaagtgctctctgccgcattgatagcagcgagagctggaggtgttgggtcgggagaccagccnttcgatcccgccgcaggtaggagctggtttccatcctggcaccacggcacacacctccagcctcgagcccggcgctgctgcccgggggtctccttcaggctctttgacgccgttccagggggcacctatccaggcatcctctgggcctctagccagaggactggctcccggcttcagcactccgggctgcagtaagaagtgcccttatcgctctgagccctgccaccatcccgtgaaccaccgaaaccctggtccagcgcgacagccttggacctgggactggacggatccaaaacgctcagcctcggccccccacagacggggctctgcatcgtctctgatatgtcacccaccatctcccacaaggacagcagccggcaacggcggccagggaatttcagtcactctctggatatgaagagcggtcccctgccgccaggcggttgggatgacagtcatttggactcagcgggccgggaaggggacagagaagctcttctgggggataccggcactggcgacttcttaaaagccccacagagcttccgggccgaactaagcagcattttgctactactctttctttacgtgcttcagggtattcccctgggcttggcgggaagcatcccactcattttgcaaagcaaaaatgttagctatacagaccaagctttcttcagttttgtcttttggcccttcagtctcaaattactctgggccccgttggttgatgcggtctacgttaagaacttcggtcgtcgcaaatcttggcttgtcccgacacagtatatactaggactcttcatgatctatttatccactcaggtggaccgtttgcttgggaataccgatgacagaacacccgacgtgattgctctcactgtggcgttctttttgtttgaattcttggccgccactcaggacattgccgtcgatggttgggcgttaactatgttatccagggaaaatgtgggttatgcttctacttgcaattcggtgggccaaacagcgggttactttttgggcaatgttttgtttttggcccttgaatctgccgacttttgtaacaaatatttgcggtttcagcctcaacccagaggaatcgttactctttcagatttcctttttttctggggaactgtatttttaataacaacaacattggttgcccttctgaaaaaagaaaacgaagtatcagtagtaaaagaagaaacacaagggatcacagatacttacaagctgctttttgcaattataaaaatgccagcagttctgacattttgccttctgattctaactgcaaagattggtttttcagcagcagatgctgtaacaggactgaaattggtagaagagggagtacccaaagaacatttagccttattggcagttccaatggttcctttgcagataatactgcctctgattatcagcaaatacactgcaggtccccagccattaaacacattttacaaagccatgccctacagattattgcttgggttagaatatgccctactggtttggtggactcctaaagtagaacatcaagggggattccctatatattactatatcgtagtcctgctgagttatgctttacatcaggttacagtgtacagcatgtatgtttctataatggctttcaatgcaaaggttagtgatccacttattggaggaacatacatgacccttttaaataccgtgtccaatctgggaggaaactggccttctacagtagctctttggcttgtagatcccctcacagtaaaagagtgtgtaggagcatcaaaccagaattgtcgaacacctgatgctgttgagctttgcaaaaaactgggtggctcatgtgttacagccctggatggttattatgtggagtccattatttgtgttttcattggatttggttggtggttctttcttggtccaaaatttaaaaagttacaggatgaaggatcatcttcgtggaaatgcaaaaggaacaattaatatatatgctactggacattctagcaaggtaattgtagtttagttttaattcggagagcaatgataatcagtgcacaggagtataaaatattattttaaacagcgaaattaataatataaaatgccaaatggttgaaaaaatagaaacctttctgtatatttgatcatattttttttttgccttgtcaatgtatttaaagtttacttaaggtcaggaaattctaaaacaacttttctggccttgttatttgatgtatatcttttaaatttactgaccaaagcatgttttaagctgcaatgcagtagtcacgggtggtaaccatgtagtcaggtattgttattagtacctatcactgctgagctgtatttaaaattttggtacaatatataaaatggagaagagcttgatattcaggtactaaccacaactagtctgacattgttggcagttaaaatcttattttgaattgtaaattagttaaattttatgtggaatttgctgagaaaagaatatagactactgaaatgtcattttagttatttttcttatgaccacattgtacaaatgaatctgtgttaaaaagactattttaaatgtatttcctgcttttgtaagcattaaagatttataagaaaattattcaaactattttttataaaatgaaagttatgatttttaaacttattgattcctcttgcccctaccccctctttttggaagatattttgattccttataaacttttaccctaagcttatatatgttttctgtcacaagtgcttcctggcacacagacagccaatggaggggatcaaattcagtgttgtatgtatgtttatggcaacattttgaaaataaaaattaaatgtttttcttcaagtagtttttttttaattgctgagagaaaaaaacagtaaagctttctgattaagtaaaatttaaatgggcagtaccataatttaaaaaactaatactttaaagagagagacaaagatattttgtgcctttgacaaattaaatctaatagtggaaaaatgtttcttaattaagcactttactagtgaaaaagatctcacaatttatgccaaatcaggtactgtattttcatgtattaacacataaccttttgtttgaatactatagttttcagtggacagttgctattccaagaaaattaagcttttgagtactttagcaattcccagcgtattacatacacccagtgataaggttctttgcatgttttgtgttatgtattactctgactctttagagattatataaatcctccaaaagttagacgaaacaagatagtacattatgagtcttaattttatcattgtggaaaaatgtgtactaactcctgattttgttaattttataacataggttgaattttagagtggggtttttataagtaatggaggataaaatgggtgggagaaaatggcacacagcacctgaagaaagatggggcagtgacctctagaactcatgcattgccattggaaagcctgtgttgggcatcgatgtcagatcctgaagaatcacctggaaaaaatcccatcctagaggcaaggaggctacaccaaaccatacactacagtactttgtcacatggttgtccattatcatgtattagagtctaaatgattacttgaataaagaaaaaaaaccacttaactcttacata

SEQ ID NO: 16713 - DNA, 3741 bp, Homo sapiens
  misc_feature (67)..(67): n is a, c, g, or t
agagaaagtgctctctgccgcattgatagcagcgagagctggaggtgttgggtcgggagaccagccnttcgatcccgccgcaggtaggagctggtttccatcctggcaccacggcacacacctccagcctcgagcccggcgctgctgcccgggggtctccttcaggctctttgacgccgttccagggggcacctatccaggcatcctctgggcctctagccagaggactggctcccggcttcagcactccgggctgcagtaagaagtgcccttatcgctctgagccctgccaccatcccgtgaaccaccgaaaccctggtccagcgcgacagccttggacctgggactggacggatccaaaacgctcagcctcggccccccacagacggggctctgcatcgtctctgatatgtcacccaccatctcccacaaggacagcagccggcaacggcggccagggaatttcagtcactctctggatatgaagagcggtcccctgccgccaggcggttgggatgacagtcatttggactcagcgggccgggaaggggacagagaagctcttctgggggataccggcactggcgacttcttaaaagccccacagagcttccgggccgaactaagcagcattttgctactactctttctttacgtgcttcagggtattcccctgggcttggcgggaagcatcccactcattttgcaaagcaaaaatgttagctatacagaccaagctttcttcagttttgtcttttggcccttcagtctcaaattactctgggccccgttggttgatgcggtctacgttaagaacttcggtcgtcgcaaatcttggcttgtcccgacacagtatatactaggactcttcatgatctatttatccactcaggtggaccgtttgcttgggaataccgatgacagaacacccgacgtgattgctctcactgtggcgttctttttgtttgaattcttggccgccactcaggacattgccgtcgatggttgggcgttaactatgttatccagggaaaatgtgggttatgcttctacttgcaattcggtgggccaaacagcgggttactttttgggcaatgttttgtttttggcccttgaatctgccgacttttgtaacaaatatttgcggtttcagcctcaacccagaggaatcgttactctttcagatttcctttttttctggggaactgtatttttaataacaacaacattggttgcccttctgaaaaaagaaaacgaagtatcagtagtaaaagaagaaacacaagggatcacagatacttacaagctgctttttgcaattataaaaatgccagcagttctgacattttgccttctgattctaactgcaaagattggtttttcagcagcagatgctgtaacaggactgaaattggtagaagagggagtacccaaagaacatttagccttattggcagttccaatggttcctttgcagataatactgcctctgattatcagcaaatacactgcaggtccccagccattaaacacattttacaaagccatgccctacagattattgcttgggttagaatatgccctactggtttggtggactcctaaagtagaacatcaagggggattccctatatattactatatcgtagtcctgctgagttatgctttacatcaggttacagtgtacagcatgtatgtttctataatggctttcaatgcaaaggttagtgatccacttattggaggaacatacatgacccttttaaataccgtgtccaatctgggaggaaactggccttctacagtagctctttggcttgtagatcccctcacagtaaaagagtgtgtaggagcatcaaaccagaattgtcgaacacctgatgctgttgagctttgcaaaaaactgggtggctcatgtgttacagccctggatggttattatgtggagtccattatttgtgttttcattggatttggttggtggttctttcttggtccaaaatttaaaaagttacaggatgaaggatcatcttcgtggaaatgcaaaaggaacaattaatatatatgctactggacattctagcaaggtaattgtagtttagttttaattcggagagcaatgataatcagtgcacaggagtataaaatattattttaaacagcgaaattaataatataaaatgccaaatggttgaaaaaatagaaacctttctgtatatttgatcatattttttttttgccttgtcaatgtatttaaagtttacttaaggtcaggaaattctaaaacaacttttctggccttgttatttgatgtatatcttttaaatttactgaccaaagcatgttttaagctgcaatgcagtagtcacgggtggtaaccatgtagtcaggtattgttattagtacctatcactgctgagctgtatttaaaattttggtacaatatataaaatggagaagagcttgatattcaggtactaaccacaactagtctgacattgttggcagttaaaatcttattttgaattgtaaattagttaaattttatgtggaatttgctgagaaaagaatatagactactgaaatgtcattttagttatttttcttatgaccacattgtacaaatgaatctgtgttaaaaagactattttaaatgtatttcctgcttttgtaagcattaaagatttataagaaaattattcaaactattttttataaaatgaaagttatgatttttaaacttattgattcctcttgcccctaccccctctttttggaagatattttgattccttataaacttttaccctaagcttatatatgttttctgtcacaagtgcttcctggcacacagacagccaatggaggggatcaaattcagtgttgtatgtatgtttatggcaacattttgaaaataaaaattaaatgtttttcttcaagtagtttttttttaattgctgagagaaaaaaacagtaaagctttctgattaagtaaaatttaaatgggcagtaccataatttaaaaaactaatactttaaagagagagacaaagatattttgtgcctttgacaaattaaatctaatagtggaaaaatgtttcttaattaagcactttactagtgaaaaagatctcacaatttatgccaaatcaggtactgtattttcatgtattaacacataaccttttgtttgaatactatagttttcagtggacagttgctattccaagaaaattaagcttttgagtactttagcaattcccagcgtattacatacacccagtgataaggttctttgcatgttttgtgttatgtattactctgactctttagagattatataaatcctccaaaagttagacgaaacaagatagtacattatgagtcttaattttatcattgtggaaaaatgtgtactaactcctgattttgttaattttataacataggttgaattttagagtggggtttttataagtaatggaggataaaatgggtgggagaaaatggcacacagcacctgaagaaagatggggcagtgacctctagaactcatgcattgccattggaaagcctgtgttgggcatcgatgtcagatcctgaagaatcacctggaaaaaatcccatcctagaggcaaggaggctacaccaaaccatacactacagtactttgtcacatggttttctttattcaagtaatcatttagactctaatacatgataatggacaaccagtcgacg

SEQ ID NO: 16714 - DNA, 2938 bp, Homo sapiens
  misc_feature (67)..(67): n is a, c, g, or t
agagaaagtgctctctgccgcattgatagcagcgagagctggaggtgttgggtcgggagaccagccnttcgatcccgccgcaggtaggagctggtttccatcctggcaccacggcacacacctccagcctcgagcccggcgctgctgcccgggggtctccttcaggctctttgacgccgttccagggggcacctatccaggcatcctctgggcctctagccagaggactggctcccggcttcagcactccgggctgcagtaagaagtgcccttatcgctctgagccctgccaccatcccgtgaaccaccgaaaccctggtccagcgcgacagccttggacctgggactggacggatccaaaacgctcagcctcggccccccacagacggggctctgcatcgtctctgatatgtcacccaccatctcccacaaggacagcagccggcaacggcggccagggaatttcagtcactctctggatatgaagagcggtcccctgccgccaggcggttgggatgacagtcatttggactcagcgggccgggaaggggacagagaagctcttctgggggataccggcactggcgacttcttaaaagccccacagagcttccgggccgaactaagcagcattttgctactactctttctttacgtgcttcagggtattcccctgggcttggcgggaagcatcccactcattttgcaaagcaaaaatgttagctatacagaccaagctttcttcagttttgtcttttggcccttcagtctcaaattactctgggccccgttggttgatgcggtctacgttaagaacttcggtcgtcgcaaatcttggcttgtcccgacacagtatatactaggactcttcatgatctatttatccactcaggtggaccgtttgcttgggaataccgatgacagaacacccgacgtgattgctctcactgtggcgttctttttgtttgaattcttggccgccactcaggacattgccgtcgatggttgggcgttaactatgttatccagggaaaatgtgggttatgcttctacttgcaattcggtgggccaaacagcgggttactttttgggcaatgttttgtttttggcccttgaatctgccgacttttgtaacaaatatttgcggtttcagcctcaacccagaggaatcgttactctttcagatttcctttttttctggggaactgtatttttaataacaacaacattggttgcccttctgaaaaaagaaaacgaagtatcagtagtaaaagaagaaacacaagggatcacagatacttacaagctgctttttgcaattataaaaatgccagcagttctgacattttgccttctgattctaactgcaaagattggtttttcagcagcagatgctgtaacaggactgaaattggtagaagagggagtacccaaagaacatttagccttattggcagttccaatggttcctttgcagataatactgcctctgattatcagcaaatacactgcaggtccccagccattaaacacattttacaaagccatgccctacagattattgcttgggttagaatatgccctactggtttggtggactcctaaagtagaacatcaagggggattccctatatattactatatcgtagtcctgctgagttatgctttacatcaggttacagtgtacagcatgtatgtttctataatggctttcaatgcaaaggttagtgatccacttattggaggaacatacatgacccttttaaataccgtgtccaatctgggaggaaactggccttctacagtagctctttggcttgtagatcccctcacagtaaaagagtgtgtaggagcatcaaaccagaattgtcgaacacctgatgctgttgagctttgcaaaaaactgggtggctcatgtgttacagccctggatggttattatgtggagtccattatttgtgttttcattggatttggttggtggttctttcttggtccaaaatttaaaaagttacaggatgaaggatcatcttcgtggaaatgcaaaaggaacaattaatatatatgctactggacattctagcaaggtaattgtagtttagttttaattcggagagcaatgataatcagtgcacaggagtataaaatattattttaaacagcgaaattaataatataaaatgccaaatggttgaaaaaatagaaacctttctgtatatttgatcatattttttttttgccttgtcaatgtatttaaagtttacttaaggtcaggaaattctaaaacaacttttctggccttgttatttgatgtatatcttttaaatttactgaccaaagcatgttttaagctgcaatgcagtagtcacgggtggtaaccatgtagtcaggtattgttattagtacctatcactgctgagctgtatttaaaattttggtacaatatataaaatggagaagagcttgatattcaggtactaaccacaactagtctgacattgttggcagttaaaatcttattttgaattgtaaattagttaaattttatgtggaatttgctgagaaaagaatatagactactgaaatgtcattttagttatttttcttatgaccacattgtacaaatgaatctgtgttaaaaagactattttaaatgtatttcctgcttttgtaagcattaaagatttataagaaaattattcaaactattttttataaaatgaaagttatgatttttaaacttattgattcctcttgcccctaccccctctttttggaagatattttgattccttataaacttttaccctaagcttatatatgttttctgtcacaagtgcttcctggcacacagacagccaatggaggggatcaaattcagtgttgtatgtatgtttatggcaacattttgaaaataaaaattaaatgtttttcttca

SEQ ID NO: 16715 - DNA, 3450 bp, Homo sapiens
  misc_feature (67)..(67): n is a, c, g, or t
agagaaagtgctctctgccgcattgatagcagcgagagctggaggtgttgggtcgggagaccagccnttcgatcccgccgcaggtaggagctggtttccatcctggcaccacggcacacacctccagcctcgagcccggcgctgctgcccgggggtctccttcaggctctttgacgccgttccagggggcacctatccaggcatcctctgggcctctagccagaggactggctcccggcttcagcactccgggctgcagtaagaagtgcccttatcgctctgagccctgccaccatcccgtgaaccaccgaaaccctggtccagcgcgacagccttggacctgggactggacggatccaaaacgctcagcctcggccccccacagacggggctctgcatcgtctctgatatgtcacccaccatctcccacaaggacagcagccggcaacggcggccagggaatttcagtcactctctggatatgaagagcggtcccctgccgccaggcggttgggatgacagtcatttggactcagcgggccgggaaggggacagagaagctcttctgggggataccggcactggcgacttcttaaaagccccacagagcttccgggccgaactaagcagcattttgctactactctttctttacgtgcttcagggtattcccctgggcttggcgggaagcatcccactcattttgcaaagcaaaaatgttagctatacagaccaagctttcttcagttttgtcttttggcccttcagtctcaaattactctgggccccgttggttgatgcggtctacgttaagaacttcggtcgtcgcaaatcttggcttgtcccgacacagtatatactaggactcttcatgatctatttatccactcaggtggaccgtttgcttgggaataccgatgacagaacacccgacgtgattgctctcactgtggcgttctttttgtttgaattcttggccgccactcaggacattgccgtcgatggttgggcgttaactatgttatccagggaaaatgtgggttatgcttctacttgcaattcggtgggccaaacagcgggttactttttgggcaatgttttgtttttggcccttgaatctgccgacttttgtaacaaatatttgcggtttcagcctcaacccagaggaatcgttactctttcagatttcctttttttctggggaactgtatttttaataacaacaacattggttgcccttctgaaaaaagaaaacgaagtatcagtagtaaaagaagaaacacaagggatcacagatacttacaagctgctttttgcaattataaaaatgccagcagttctgacattttgccttctgattctaactgcaaaggttacagtgtacagcatgtatgtttctataatggctttcaatgcaaaggttagtgatccacttattggaggaacatacatgacccttttaaataccgtgtccaatctgggaggaaactggccttctacagtagctctttggcttgtagatcccctcacagtaaaagagtgtgtaggagcatcaaaccagaattgtcgaacacctgatgctgttgagctttgcaaaaaactgggtggctcatgtgttacagccctggatggttattatgtggagtccattatttgtgttttcattggatttggttggtggttctttcttggtccaaaatttaaaaagttacaggatgaaggatcatcttcgtggaaatgcaaaaggaacaattaatatatatgctactggacattctagcaaggtaattgtagtttagttttaattcggagagcaatgataatcagtgcacaggagtataaaatattattttaaacagcgaaattaataatataaaatgccaaatggttgaaaaaatagaaacctttctgtatatttgatcatattttttttttgccttgtcaatgtatttaaagtttacttaaggtcaggaaattctaaaacaacttttctggccttgttatttgatgtatatcttttaaatttactgaccaaagcatgttttaagctgcaatgcagtagtcacgggtggtaaccatgtagtcaggtattgttattagtacctatcactgctgagctgtatttaaaattttggtacaatatataaaatggagaagagcttgatattcaggtactaaccacaactagtctgacattgttggcagttaaaatcttattttgaattgtaaattagttaaattttatgtggaatttgctgagaaaagaatatagactactgaaatgtcattttagttatttttcttatgaccacattgtacaaatgaatctgtgttaaaaagactattttaaatgtatttcctgcttttgtaagcattaaagatttataagaaaattattcaaactattttttataaaatgaaagttatgatttttaaacttattgattcctcttgcccctaccccctctttttggaagatattttgattccttataaacttttaccctaagcttatatatgttttctgtcacaagtgcttcctggcacacagacagccaatggaggggatcaaattcagtgttgtatgtatgtttatggcaacattttgaaaataaaaattaaatgtttttcttcaagtagtttttttttaattgctgagagaaaaaaacagtaaagctttctgattaagtaaaatttaaatgggcagtaccataatttaaaaaactaatactttaaagagagagacaaagatattttgtgcctttgacaaattaaatctaatagtggaaaaatgtttcttaattaagcactttactagtgaaaaagatctcacaatttatgccaaatcaggtactgtattttcatgtattaacacataaccttttgtttgaatactatagttttcagtggacagttgctattccaagaaaattaagcttttgagtactttagcaattcccagcgtattacatacacccagtgataaggttctttgcatgttttgtgttatgtattactctgactctttagagattatataaatcctccaaaagttagacgaaacaagatagtacattatgagtcttaattttatcattgtggaaaaatgtgtactaactcctgattttgttaattttataacataggttgaattttagagtggggtttttataagtaatggaggataaaatgggtgggagaaaatggcacacagcacctgaagaaagatggggcagtgacctctagaactcatgcattgccattggaaagcctgtgttgggcatcgatgtcagatcctgaagaatcacctggaaaaaatcccatcctagaggcaaggaggctacaccaaaccatacactacagtactttgtcacatggttgtccattatcatgtattagagtctaaatgattacttgaataaagaaaaaaaaccacttaactcttacata

SEQ ID NO: 16716 - DNA, 1460 bp, Homo sapiens
cggacgcgtgggtcgcggacgcgtgggtttaaatttactgaccaaagcatgttttaagctgcaatgcagtagtcacgggtggtaaccatgtagtcaggtattgttattagtacctatcactgctgagctgtatttaaaattttggtacaatatataaaatggagaagagcttgatattcaggtactaaccacaactagtctgacattgttggcagttaaaatcttattttgaattgtaaattagttaaattttatgtggaatttgctgagaaaagaatatagactactgaaatgtcattttagttatttttcttatgaccacattgtacaaatgaatctgtgttaaaaagactattttaaatgtatttcctgcttttgtaagcattaaagatttataagaaaattattcaaactattttttataaaatgaaagttatgatttttaaacttattgattcctcttgcccctaccccctctttttggaagatattttgattccttataaacttttaccctaagcttatatatgttttctgtcacaagtgcttcctggcacacagacagccaatggaggggatcaaattcagtgttgtatgtatgtttatggcaacattttgaaaataaaaattaaatgtttttcttcaagtagtttttttttaattgctgagagaaaaaaacagtaaagctttctgattaagtaaaatttaaatgggcagtaccataatttaaaaaactaatactttaaagagagagacaaagatattttgtgcctttgacaaattaaatctaatagtggaaaaatgtttcttaattaagcactttactagtgaaaaagatctcacaatttatgccaaatcaggtactgtattttcatgtattaacacataaccttttgtttgaatactatagttttcagtggacagttgctattccaagaaaattaagcttttgagtactttagcaattcccagcgtattacatacacccagtgataaggttctttgcatgttttgtgttatgtattactctgactctttagagattatataaatcctccaaaagttagacgaaacaagatagtacattatgagtcttaattttatcattgtggaaaaatgtgtactaactcctgattttgttaattttataacataggttgaattttagagtggggtttttataagtaatggaggataaaatgggtgggagaaaatggcacacagcacctgaagaaagatggggcagtgacctctagaactcatgcattgccattggaaagcctgtgttgggcatcgatgtcagatcctgaagaatcacctggaaaaaatcccatcctagaggcaaggaggctacaccaaaccatacactacagtactttgtcacatggttgtccattatcatgtattagagtctaaatgattacttgaataaagaaaaaaaaccacttaactcttacata

SEQ ID NO: 16717 - DNA, 1926 bp, Homo sapiens
  misc_feature (67)..(67): n is a, c, g, or t
agagaaagtgctctctgccgcattgatagcagcgagagctggaggtgttgggtcgggagaccagccnttcgatcccgccgcaggtaggagctggtttccatcctggcaccacggcacacacctccagcctcgagcccggcgctgctgcccgggggtctccttcaggctctttgacgccgttccagggggcacctatccaggcatcctctgggcctctagccagaggactggctcccggcttcagcactccgggctgcagtaagaagtgcccttatcgctctgagccctgccaccatcccgtgaaccaccgaaaccctggtccagcgcgacagccttggacctgggactggacggatccaaaacgctcagcctcggccccccacagacggggctctgcatcgtctctgatatgtcacccaccatctcccacaaggacagcagccggcaacggcggccagggaatttcagtcactctctggatatgaagagcggtcccctgccgccaggcggttgggatgacagtcatttggactcagcgggccgggaaggggacagagaagctcttctgggggataccggcactggcgacttcttaaaagccccacagagcttccgggccgaactaagcagcattttgctactactctttctttacgtgcttcagggtattcccctgggcttggcgggaagcatcccactcattttgcaaagcaaaaatgttagctatacagaccaagctttcttcagttttgtcttttggcccttcagtctcaaattactctgggccccgttggttgatgcggtctacgttaagaacttcggtcgtcgcaaatcttggcttgtcccgacacagtatatactaggactcttcatgatctatttatccactcaggtggaccgtttgcttgggaataccgatgacagaacacccgacgtgattgctctcactgtggcgttctttttgtttgaattcttggccgccactcaggacattgccgtcgatggttgggcgttaactatgttatccagggaaaatgtgggttatgcttctacttgcaattcggtgggccaaacagcgggttactttttgggcaatgttttgtttttggcccttgaatctgccgacttttgtaacaaatatttgcggtttcagcctcaacccagaggaatcgttactctttcagatttcctttttttctggggaactgtatttttaataacaacaacattggttgcccttctgaaaaaagaaaacgaagtatcagtagtaaaagaagaaacacaagggatcacagatacttacaagctgctttttgcaattataaaaatgccagcagttctgacattttgccttctgattctaactgcaaagattggtttttcagcagcagatgctgtaacaggactgaaattggtagaagagggagtacccaaagaacatttagccttattggcagttccaatggttcctttgcagataatactgcctctgattatcagcaaatacactgcaggtccccagccattaaacacattttacaaagccatgccctacagattattgcttgggttagaatatgccctactggtttggtggactcctaaagtagaacatcaagggggattccctatatattactatatcgtagtcctgctgagttatgctttacatcaggttacagtgtacagcatgtatgtttctataatggctttcaatgcaaaggttagtgatccacttattggaggaacatacatgacccttttaaataccgtgtccaatctgggaggaaactggccttctacagtagctctttggcttgtagatcccctcacagtaaaagagtgtgtaggagcatcaaaccagaattgtcgaacacctgatgctgttgagcttgcaaaaaaggcgccgactggatcctcaagcgc

SEQ ID NO: 16718 - DNA, 391 bp, Homo sapiens
aaaatgtagaaattaatggggcatggtggtgcacgcctgtggtcttatctactcacaaggctgaggtgggaggattgcttgagcccaggagccagagaccgcagtgagccattatcacaccactgcatttcagccggggccacaagtgagaccgtgtctcaaaaaagaaaatgagtattgtttacagcaagaactgaaaattgtttttaatcctgttagtagcattagagagattaagatacattaacatattttgtcattggaattcagtgaaatactgaaatgttttaagaaaaatatatttttattctttataaagtagaagcatgttaattgctaaatactttcattttgaaattgtggagtatttattatagttttatttttacag

SEQ ID NO: 16719 - DNA, 2391 bp, Homo sapiens
  misc_feature (67)..(67): n is a, c, g, or t
agagaaagtgctctctgccgcattgatagcagcgagagctggaggtgttgggtcgggagaccagccnttcgatcccgccgcaggtaggagctggtttccatcctggcaccacggcacacacctccagcctcgagcccggcgctgctgcccgggggtctccttcaggctctttgacgccgttccagggggcacctatccaggcatcctctgggcctctagccagaggactggctcccggcttcagcactccgggctgcagtaagaagtgcccttatcgctctgagccctgccaccatcccgtgaaccaccgaaaccctggtccagcgcgacagccttggacctgggactggacggatccaaaacgctcagcctcggccccccacagacggggctctgcatcgtctctgatatgtcacccaccatctcccacaaggacagcagccggcaacggcggccagggaatttcagtcactctctggatatgaagagcggtcccctgccgccaggcggttgggatgacagtcatttggactcagcgggccgggaaggggacagagaagctcttctgggggataccggcactggcgacttcttaaaagccccacagagcttccgggccgaactaagcagcattttgctactactctttctttacgtgcttcagggtattcccctgggcttggcgggaagcatcccactcattttgcaaagcaaaaatgttagctatacagaccaagctttcttcagttttgtcttttggcccttcagtctcaaattactctgggccccgttggttgatgcggtctacgttaagaacttcggtcgtcgcaaatcttggcttgtcccgacacagtatatactaggactcttcatgatctatttatccactcaggtggaccgtttgcttgggaataccgatgacagaacacccgacgtgattgctctcactgtggcgttctttttgtttgaattcttggccgccactcaggacattgccgtcgatggttgggcgttaactatgttatccagggaaaatgtgggttatgcttctacttgcaattcggtgggccaaacagcgggttactttttgggcaatgttttgtttttggcccttgaatctgccgacttttgtaacaaatatttgcggtttcagcctcaacccagaggaatcgttactctttcagatttcctttttttctggggaactgtatttttaataacaacaacattggttgcccttctgaaaaaagaaaacgaagtatcagtagtaaaagaagaaacacaagggatcacagatacttacaagctgctttttgcaattataaaaatgccagcagttctgacattttgccttctgattctaactgcaaagattggtttttcagcagcagatgctgtaacaggactgaaattggtagaagagggagtacccaaagaacatttagccttattggcagttccaatggttcctttgcagataatactgcctctgattatcagcaaatacactgcaggtccccagccattaaacacattttacaaagccatgccctacagattattgcttgggttagaatatgccctactggtttggtggactcctaaagtagaacatcaagggggattccctatatattactatatcgtagtcctgctgagttatgctttacatcaggttacagtgtacagcatgtatgtttctataatggctttcaatgcaaaggttagtgatccacttattggaggaacatacatgacccttttaaataccgtgtccaatctgggaggaaactggccttctacagtagctctttggcttgtagatcccctcacagtaaaagagtgtgtaggagcatcaaaccagaattgtcgaacacctgatgctgttgagctttgcaaaaaactgggtggctcatgtgttacagccctggatggttattatgtggagtccattatttgtgttttcattggatttggttggtggttctttcttggtccaaaatttaaaaagttacaggatgaaggatcatcttcgtggaaatgcaaaaggaacaattaatatatatgctactggacattctagcaaggttgaattttagagtggggtttttataagtaatggaggataaaatgggtgggagaaaatggcacacagcacctgaagaaagatggggcagtgacctctagaactcatgcattgccattggaaagcctgtgttgggcatcgatgtcagatcctgaagaatcacctggaaaaaatcccatcctagaggcaaggaggctacaccaaaccatacactacagtactttgtcacatggttgtccattatcatgtattagagtctaaatgattacttgaataaagaaaaaaaaccacttaactcttacata

SEQ ID NO: 16720 - DNA, 3786 bp, Homo sapiens
  misc_feature (67)..(67): n is a, c, g, or t
agagaaagtgctctctgccgcattgatagcagcgagagctggaggtgttgggtcgggagaccagccnttcgatcccgccgcaggtaggagctggtttccatcctggcaccacggcacacacctccagcctcgagcccggcgctgctgcccgggggtctccttcaggctctttgacgccgttccagggggcacctatccaggcatcctctgggcctctagccagaggactggctcccggcttcagcactccgggctgcagtaagaagtgcccttatcgctctgagccctgccaccatcccgtgaaccaccgaaaccctggtccagcgcgacagccttggacctgggactggacggatccaaaacgctcagcctcggccccccacagacggggctctgcatcgtctctgatatgtcacccaccatctcccacaaggacagcagccggcaacggcggccagggaatttcagtcactctctggatatgaagagcggtcccctgccgccaggcggttgggatgacagtcatttggactcagcgggccgggaaggggacagagaagctcttctgggggataccggcactggcgacttcttaaaagccccacagagcttccgggccgaactaagcagcattttgctactactctttctttacgtgcttcagggtattcccctgggcttggcgggaagcatcccactcattttgcaaagcaaaaatgttagctatacagaccaagctttcttcagttttgtcttttggcccttcagtctcaaattactctgggccccgttggttgatgcggtctacgttaagaacttcggtcgtcgcaaatcttggcttgtcccgacacagtatatactaggactcttcatgatctatttatccactcaggtggaccgtttgcttgggaataccgatgacagaacacccgacgtgattgctctcactgtggcgttctttttgtttgaattcttggccgccactcaggacattgccgtcgatggttgggcgttaactatgttatccagggaaaatgtgggttatgcttctacttgcaattcggtgggccaaacagcgggttactttttgggcaatgttttgtttttggcccttgaatctgccgacttttgtaacaaatatttgcggtttcagcctcaacccagaggaatcgttactctttcagatttcctttttttctggggaactgtatttttaataacaacaacattggttgcccttctgaaaaaagaaaacgaagtatcagtagtaaaagaagaaacacaagggatcacagatacttacaagctgctttttgcaattataaaaatgccagcagttctgacattttgccttctgattctaactgcaaagattggtttttcagcagcagatgctgtaacaggactgaaattggtagaagagggagtacccaaagaacatttagccttattggcagttccaatggttcctttgcagataatactgcctctgattatcagcaaatacactgcaggtccccagccattaaacacattttacaaagccatgccctacagattattgcttgggttagaatatgccctactggtttggtggactcctaaagtagaacatcaagggggattccctatatattactatatcgtagtcctgctgagttatgctttacatcaggttacagtgtacagcatgtatgtttctataatggctttcaatgcaaaggttagtgatccacttattggaggaacatacatgacccttttaaataccgtgtccaatctgggaggaaactggccttctacagtagctctttggcttgtagatcccctcacagtaaaagagtgtgtaggagcatcaaaccagaattgtcgaacacctgatgctgttgagctttgcaaaaaactgggtggctcatgtgttacagccctggatggttattatgtggagtccattatttgtgttttcattggatttggttggtggttctttcttggtccaaaatttaaaaagttacaggatgaaggatcatcttcgtggaaatgcaaaaggaacaattaatatatatgctactggacattctagcaaggtaattgtagtttagttttaattcggagagcaatgataatcagtgcacaggagtataaaatattattttaaacagcgaaattaataatataaaatgccaaatggttgaaaaaatagaaacctttctgtatatttgatcatattttttttttgccttgtcaatgtatttaaagtttacttaaggtcaggaaattctaaaacaacttttctggccttgttatttgatgtatatcttttaaatttactgaccaaagcatgttttaagctgcaatgcagtagtcacgggtggtaaccatgtagtcaggtattgttattagtacctatcactgctgagctgtatttaaaattttggtacaatatataaaatggagaagagcttgatattcaggtactaaccacaactagtctgacattgttggcagttaaaatcttattttgaattgtaaattagttaaattttatgtggaatttgctgagaaaagaatatagactactgaaatgtcattttagttatttttcttatgaccacattgtacaaatgaatctgtgttaaaaagactattttaaatgtatttcctgcttttgtaagcattaaagatttataagaaaattattcaaactattttttataaaatgaaagttatgatttttaaacttattgattcctcttgcccctaccccctctttttggaagatattttgattccttataaacttttaccctaagcttatatatgttttctgtcacaagtgcttcctggcacacagacagccaatggaggggatcaaattcagtgttgtatgtatgtttatggcaacattttgaaaataaaaattaaatgtttttcttcaagtagtttttttttaattgctgagagaaaaaaacagtaaagctttctgattaagtaaaatttaaatgggcagtaccataatttaaaaaactaatactttaaagagagagacaaagatattttgtgcctttgacaaattaaatctaatagtggaaaaatgtttcttaattaagcactttactagtgaaaaagatctcacaatttatgccaaatcaggtactgtattttcatgtattaacacataaccttttgtttgaatactatagttttcagtggacagttgctattccaagaaaattaagcttttgagtactttagcaattcccagcgtattacatacacccagtgataaggttctttgcatgttttgtgttatgtattactctgactctttagagattatataaatcctccaaaagttagacgaaacaagatagtacattatgagtcttaattttatcattgtggaaaaatgtgtactaactcctgattttgttaattttataacataggttgaattttagagtggggtttttataagtaatggaggataaaatgggtgggagaaaatggcacacagcacctgaagaaagatggggcagtgacctctagaactcatgcattgccattggaaagcctgtgttgggcatcgatgtcagatcctgaagaatcacctggaaaaaatcccatcctagaggcaaggaggctacaccaaaccatacactacagtactttgtcacatggttgtccattatcatgtattagagtctaaatgattacttgaataaagaaaaaaaaccacttaactcttacataacacaaccacaaacaacaaacacaacaaaaaaa

SEQ ID NO: 16721 - DNA, 3610 bp, Homo sapiens
  misc_feature (67)..(67): n is a, c, g, or t
agagaaagtgctctctgccgcattgatagcagcgagagctggaggtgttgggtcgggagaccagccnttcgatcccgccgcaggtaggagctggtttccatcctggcaccacggcacacacctccagcctcgagcccggcgctgctgcccgggggtctccttcaggctctttgacgccgttccagggggcacctatccaggcatcctctgggcctctagccagaggactggctcccggcttcagcactccgggctgcagtaagaagtgcccttatcgctctgagccctgccaccatcccgtgaaccaccgaaaccctggtccagcgcgacagccttggacctgggactggacggatccaaaacgctcagcctcggccccccacagacggggctctgcatcgtctctgatatgtcacccaccatctcccacaaggacagcagccggcaacggcggccagggaatttcagtcactctctggatatgaagagcggtcccctgccgccaggcggttgggatgacagtcatttggactcagcgggccgggaaggggacagagaagctcttctgggggataccggcactggcgacttcttaaaagccccacagagcttccgggccgaactaagcagcattttgctactactctttctttacgtgcttcagggtattcccctgggcttggcgggaagcatcccactcattttgcaaagcaaaaatgttagctatacagaccaagctttcttcagttttgtcttttggcccttcagtctcaaattactctgggccccgttggttgatgcggtctacgttaagaacttcggtcgtcgcaaatcttggcttgtcccgacacagtatatactaggactcttcatgatctatttatccactcaggtggaccgtttgcttgggaataccgatgacagaacacccgacgtgattgctctcactgtggcgttctttttgtttgaattcttggccgccactcaggacattgccgtcgatggttgggcgttaactatgttatccagggaaaatgtgggttatgcttctacttgcaattcggtgggccaaacagcgggttactttttgggcaatgttttgtttttggcccttgaatctgccgacttttgtaacaaatatttgcggtttcagcctcaacccagaggaatcgttactctttcagatttcctttttttctggggaactgtatttttaataacaacaacattggttgcccttctgaaaaaagaaaacgaagtatcagtagtaaaagaagaaacacaagggatcacagatacttacaagctgctttttgcaattataaaaatgccagcagttctgacattttgccttctgattctaactgcaaagattggtttttcagcagcagatgctgtaacaggactgaaattggtagaagagggagtacccaaagaacatttagccttattggcagttccaatggttcctttgcagataatactgcctctgattatcagcaaatacactgcaggtccccagccattaaacacattttacaaagccatgccctacagattattgcttgggttagaatatgccctactggtttggtggactcctaaagtagaacatcaagggggattccctatatattactatatcgtagtcctgctgagttatgctttacatcaggttacagtgtacagcatgtatgtttctataatggctttcaatgcaaaggttagtgatccacttattggaggaacatacatgacccttttaaataccgtgtccaatctgggaggaaactggccttctacagtagctctttggcttgtagatcccctcacagtaaaagagtgtgtaggagcatcaaaccagaattgtcgaacacctgatgctgttgagctttgcaaaaaactgggtggctcatgtgttacagccctggatggttattatgtggagtccattatttgtgttttcattggatttggttggtggttctttcttggtccaaaatttaaaaagttacaggatgaaggatcatcttcgtggaaatgcaaaaggaacaattaatatatatgctactggacattctagcaaggtaattgtagtttagttttaattcggagagcaatgataatcagtgcacaggagtataaaatattattttaaacagcgaaattaataatataaaatgccaaatggttgaaaaaatagaaacctttctgtatatttgatcatattttttttttgccttgtcaatgtatttaaagtttacttaaggtcaggaaattctaaaacaacttttctggccttgttatttgatgtatatcttttaaatttactgaccaaagcatgttttaagctgcaatgcagtagtcacgggtggtaaccatgtagtcaggtattgttattagtacctatcactgctgagctgtatttaaaattttggtacaatatataaaatggagaagagcttgatattcaggtactaaccacaactagtctgacattgttggcagttaaaatcttattttgaattgtaaattagttaaattttatgtggaatttgctgagaaaagaatatagactactgaaatgtcattttagttatttttcttatgaccacattgtacaaatgaatctgtgttaaaaagactattttaaatgtatttcctgcttttgtaagcattaaagatttataagaaaattattcaaactattttttataaaatgaaagttatgatttttaaacttattgattcctcttgcccctaccccctctttttggaagatattttgattccttataaacttttaccctaagcttatatatgttttctgtcacaagtgcttcctggcacacagacagccaatggaggggatcaaattcagtgttgtatgtatgtttatggcaacattttgaaaataaaaattaaatgtttttcttcaagtagtttttttttaattgctgagagaaaaaaacagtaaagctttctgattaagtaaaatttaaatgggcagtaccataatttaaaaaactaatactttaaagagagagacaaagatattttgtgcctttgacaaattaaatctaatagtggaaaaatgtttcttaattaagcactttactagtgaaaaagatctcacaatttatgccaaatcaggtactgtattttcatgtattaacacataaccttttgtttgaatactatagttttcagtggacagttgctattccaagaaaattaagcttttgagtactttagcaattcccagcgtattacatacacccagtgataaggttctttgcatgttttgtgttatgtattactctgactctttagagattatataaatcctccaaaagttagacgaaacaagatagtacattatgagtcttaattttatcattgtggaaaaatgtgtactaactcctgattttgttaattttataacataggttgaattttagagtggggtttttataagtaatggaggataaaatgggtgggagaatgtgctgagcatatattactacctgaaagagcatagacctcattaactatttatttttctataagatgtataggttgagattttaagtctgaatattttatacat

SEQ ID NO: 16722 - DNA, 2280 bp, Homo sapiens
ttgtttttatattgcagattggtttttcagcagcagatgctgtaacaggactgaaattggtagaagagggagtacccaaagaacatttagccttattggcagttccaatggttcctttgcagataatactgcctctgattatcagcaaatacactgcaggtccccagccattaaacacattttacaaagccatgccctacaggttacagtgtacagcatgtatgtttctataatggctttcaatgcaaaggttagtgatccacttattggaggaacatacatgacccttttaaataccgtgtccaatctgggaggaaactggccttctacagtagctctttggcttgtagatcccctcacagtaaaagagtgtgtaggagcatcaaaccagaattgtcgaacacctgatgctgttgagctttgcaaaaaactgggtggctcatgtgttacagccctggatggttattatgtggagtccattatttgtgttttcattggatttggttggtggttctttcttggtccaaaatttaaaaagttacaggatgaaggatcatcttcgtggaaatgcaaaaggaacaattaatatatatgctactggacattctagcaaggtaattgtagtttagttttaattcggagagcaatgataatcagtgcacaggagtataaaatattattttaaacagcgaaattaataatataaaatgccaaatggttgaaaaaatagaaacctttctgtatatttgatcatattttttttttgccttgtcaatgtatttaaagtttacttaaggtcaggaaattctaaaacaacttttctggccttgttatttgatgtatatcttttaaatttactgaccaaagcatgttttaagctgcaatgcagtagtcacgggtggtaaccatgtagtcaggtattgttattagtacctatcactgctgagctgtatttaaaattttggtacaatatataaaatggagaagagcttgatattcaggtactaaccacaactagtctgacattgttggcagttaaaatcttattttgaattgtaaattagttaaattttatgtggaatttgctgagaaaagaatatagactactgaaatgtcattttagttatttttcttatgaccacattgtacaaatgaatctgtgttaaaaagactattttaaatgtatttcctgcttttgtaagcattaaagatttataagaaaattattcaaactattttttataaaatgaaagttatgatttttaaacttattgattcctcttgcccctaccccctctttttggaagatattttgattccttataaacttttaccctaagcttatatatgttttctgtcacaagtgcttcctggcacacagacagccaatggaggggatcaaattcagtgttgtatgtatgtttatggcaacattttgaaaataaaaattaaatgtttttcttcaagtagtttttttttaattgctgagagaaaaaaacagtaaagctttctgattaagtaaaatttaaatgggcagtaccataatttaaaaaactaatactttaaagagagagacaaagatattttgtgcctttgacaaattaaatctaatagtggaaaaatgtttcttaattaagcactttactagtgaaaaagatctcacaatttatgccaaatcaggtactgtattttcatgtattaacacataaccttttgtttgaatactatagttttcagtggacagttgctattccaagaaaattaagcttttgagtactttagcaattcccagcgtattacatacacccagtgataaggttctttgcatgttttgtgttatgtattactctgactctttagagattatataaatcctccaaaagttagacgaaacaagatagtacattatgagtcttaattttatcattgtggaaaaatgtgtactaactcctgattttgttaattttataacataggttgaattttagagtggggtttttataagtaatggaggataaaatgggtgggagaaaatggcacacagcacctgaagaaagatggggcagtgacctctagaactcatgcattgccattggaaagcctgtgttgggcatcgatgtcagatcctgaagaatcacctggaaaaaatcccatcctagaggcaaggaggctacaccaaaccatacactacagtactttgtcacatggttgtccattatcatgtattagagtctaaatgattacttgaataaagaaaaaaaaccacttaactcttacata

SEQ ID NO: 16723 - DNA, 2088 bp, Homo sapiens
  misc_feature (67)..(67): n is a, c, g, or t
agagaaagtgctctctgccgcattgatagcagcgagagctggaggtgttgggtcgggagaccagccnttcgatcccgccgcaggtaggagctggtttccatcctggcaccacggcacacacctccagcctcgagcccggcgctgctgcccgggggtctccttcaggctctttgacgccgttccagggggcacctatccaggcatcctctgggcctctagccagaggactggctcccggcttcagcactccgggctgcagtaagaagtgcccttatcgctctgagccctgccaccatcccgtgaaccaccgaaaccctggtccagcgcgacagccttggacctgggactggacggatccaaaacgctcagcctcggccccccacagacggggctctgcatcgtctctgatatgtcacccaccatctcccacaaggacagcagccggcaacggcggccagggaatttcagtcactctctggatatgaagagcggtcccctgccgccaggcggttgggatgacagtcatttggactcagcgggccgggaaggggacagagaagctcttctgggggataccggcactggcgacttcttaaaagccccacagagcttccgggccgaactaagcagcattttgctactactctttctttacgtgcttcagggtattcccctgggcttggcgggaagcatcccactcattttgcaaagcaaaaatgttagctatacagaccaagctttcttcagttttgtcttttggcccttcagtctcaaattactctgggccccgttggttgatgcggtctacgttaagaacttcggtcgtcgcaaatcttggcttgtcccgacacagtatatactaggactcttcatgatctatttatccactcaggtggaccgtttgcttgggaataccgatgacagaacacccgacgtgattgctctcactgtggcgttctttttgtttgaattcttggccgccactcaggacattgccgtcgatggttgggcgttaactatgttatccagggaaaatgtgggttatgcttctacttgcaattcggtgggccaaacagcgggttactttttgggcaatgttttgtttttggcccttgaatctgccgacttttgtaacaaatatttgcggtttcagcctcaacccagaggaatcgttactctttcagatttcctttttttctggggaactgtatttttaataacaacaacattggttgcccttctgaaaaaagaaaacgaagtatcagtagtaaaagaagaaacacaagggatcacagatacttacaagctgctttttgcaattataaaaatgccagcagttctgacattttgccttctgattctaactgcaaaggttacagtgtacagcatgtatgtttctataatggctttcaatgcaaaggttagtgatccacttattggaggaacatacatgacccttttaaataccgtgtccaatctgggaggaaactggccttctacagtagctctttggcttgtagatcccctcacagtaaaagagtgtgtaggagcatcaaaccagaattgtcgaacacctgatgctgttgagctttgcaaaaaactgggtggctcatgtgttacagccctggatggttattatgtggagtccattatttgtgttttcattggatttggttggtggttctttcttggtccaaaatttaaaaagttacaggatgaaggatcatcttcgtggaaatgcaaaaggaacaattaatatatatgctactggacattctagcaaggttgaattttagagtggggtttttataagtaatggaggataaaatgggtgggagaaaatggcacacagcacctgaagaaagatggggcagtgacctctagaactcatgcattgccattggaaagcctgtgttgggcatcgatgtcagatcctgaagaatcacctggaaaaaatcccatcctagaggcaaggaggctacaccaaaccatacactacagtactttgtcacatggttgtccattatcatgtattagagtctaaatgattacttgaataaagaaaaaaaaccacttaactcttacata

SEQ ID NO: 16724 - DNA, 1858 bp, Homo sapiens
  misc_feature (67)..(67): n is a, c, g, or t
agagaaagtgctctctgccgcattgatagcagcgagagctggaggtgttgggtcgggagaccagccnttcgatcccgccgcaggtaggagctggtttccatcctggcaccacggcacacacctccagcctcgagcccggcgctgctgcccgggggtctccttcaggctctttgacgccgttccagggggcacctatccaggcatcctctgggcctctagccagaggactggctcccggcttcagcactccgggctgcagtaagaagtgcccttatcgctctgagccctgccaccatcccgtgaaccaccgaaaccctggtccagcgcgacagccttggacctgggactggacggatccaaaacgctcagcctcggccccccacagacggggctctgcatcgtctctgatatgtcacccaccatctcccacaaggacagcagccggcaacggcggccagggaatttcagtcactctctggatatgaagagcggtcccctgccgccaggcggttgggatgacagtcatttggactcagcgggccgggaaggggacagagaagctcttctgggggataccggcactggcgacttcttaaaagccccacagagcttccgggccgaactaagcagcattttgctactactctttctttacgtgcttcagggtattcccctgggcttggcgggaagcatcccactcattttgcaaagcaaaaatgttagctatacagaccaagctttcttcagttttgtcttttggcccttcagtctcaaattactctgggccccgttggttgatgcggtctacgttaagaacttcggtcgtcgcaaatcttggcttgtcccgacacagtatatactaggactcttcatgatctatttatccactcaggtggaccgtttgcttgggaataccgatgacagaacacccgacgtgattgctctcactgtggcgttctttttgtttgaattcttggccgccactcaggacattgccgtcgatggttgggcgttaactatgttatccagggaaaatgtgggttatgcttctacttgcaattcggtgggccaaacagcgggttactttttgggcaatgttttgtttttggcccttgaatctgccgacttttgtaacaaatatttgcggtttcagcctcaacccagaggaatcgttactctttcagatttcctttttttctggggaactgtatttttaataacaacaacattggttgcccttctgaaaaaagaaaacgaagtatcagtagtaaaagaagaaacacaagggatcacagatacttacaagctgctttttgcaattataaaaatgccagcagttctgacattttgccttctgattctaactgcaaaggttacagtgtacagcatgtatgtttctataatggctttcaatgcaaaggttagtgatccacttattggaggaacatacatgacccttttaaataccgtgtccaatctgggaggaaactggccttctacagtagctctttggcttgtagatcccctcacagtaaaagagtgtgtaggagcatcaaaccagaattgtcgaacacctgatgctgttgagctttgcaaaaaactgggtggctcatgtgttacagccctggatggttattatgtggagtccattatttgtgttttcattggatttggttggtggttctttcttggtccaaaatttaaaaagttacaggatgaaggatcatcttcgtggaaatgcaaaaggaacaattaatatatatgactacagtactttgtcacatggttgtccattatcatgtattagagtctaaatgattacttgaataaagaaaaaaaaccacttaactcttacata

SEQ ID NO: 16725 - DNA, 333 bp, Homo sapiens
gaagtccttgccctcatgccatgtcctggagatttctgatgatatgggctcaggtgcaattattagttcccaaagaagccaggactagactgccaaattaagaggggaaaagaagactaccataagctcaggttcccctaagcctgagaaagcccactgattatgtcctaacagaggggactgcattacaattaatgagggctaattgagtctgatgtgagtagactcttctttagccatcaatctgcctgtggattttgagaaccctcaattttttatatttagtaccatgttcctgacactccagcagtgattttgtctggactgatgggt

SEQ ID NO: 16726 - DNA, 467 bp, Homo sapiens
attatgcagtttaatgtgcagtgcaagtgttttctgccctggggtctggcgcaggccactccagtcctcagggggatccctcagtgcagctgggtcactttcttctcagctctgcttacttttgaaattaagattgttccttgacacttttatggctgttgcgtaggcagagttgagtggctgtgacagagactgggtgaccctcaagcctgaatcatttgcagggtcccccctgagaagtgtgcggccctggcgtccctctctccagccctgccctgggcctggcttgtgaacctgtgatgtcgggactgcagggcccctgctgggccgttttcttaccaggcaaaattcctgcttcacagagttgatgccaggggtgtcaaatcttttgttttccctgggccacattggaagaagaattgtcttgggccacataaaatagaataacactaacaatagttgagcta

SEQ ID NO: 16727 - DNA, 475 bp, Homo sapiens
gcagtagctcccccatgtagtatagttttgtcaaacaggtttgagctataaatgtcagaaaatgtaagatgtttctgaaattcaagtatgaatcagtgaaggttggaaaatttgtttccaaataggattttatcagagacatttttgacatataaaactaacaacgtctctaataagagacccgtttttggcatataaaaccaggtattcgtatattcgagggtttggccctcttctgtggtacccctgtgtgtgtatcctgggaagtcaaggtgggaacaggtatggtcttggctttgtgctctgaagtcttctttttgccttatcacctggcttttggttaagagtcccttgggttgggccaggcgcggtggctcatgcctgtaatcccagcactttgggaggctcaggtgggtggtgagccaagattgcgccactgcactccagcctgggcgacagagcaagactccatctc

SEQ ID NO: 16728 - DNA, 787 bp, Homo sapiens
aatcctgaggcaagacaagttagatacctagatgatttgggatattacatatatgtaatttttttactttttattttgaaataattttcaactttgcaaaaaattgcaaggaatagtacaaagaactcctatctacccatcaccaagattcatcggtcatcaacatgttgccgcattatcttttgcattctctctctatatatatgcttattattttttatgagccatttgggagtaagttgcagatatgtcccctttatgtgattattatttttttttttgagacaaggtctcgccctgtcgccctgtttagagtgcagaggcacgatctcagctgactgcaacctccgcctcccaggctcaaatgatcctcccgcctcaacctctcaagtagctgggaccacaggcgtgtgccaccacacccagctaatttttgtattctttgtagagacggggttttgccttattgtccaggctggtctcgaactcctgggctcaagcaatctgcccaccttggcttcccaaagtgctggaatcacaagtgtaagccactccaccaggccccctttatgtgacttaagatcaaaatgaaaacaaaaattttcctttgtaaaaatcagaacattatacataaggctataatcccctttggctgaccactcttcatcctagtccccttcgtcttgccagaggtgattcttccagaccctttaaggatttacttaaatacttgtacatttacatatgtgtattcatagaaaatgcacagtattgtttgtgtgggttt

SEQ ID NO: 16729 - DNA, 510 bp, Homo sapiens
aataaacattcaaatagcttgctgtaaagttttgtatcatacaaaatctgttacatatatatatattatgagatgcttcagttcaaataacagtgcagtaattcacctatatctaaaagactgccaaattattaaatgtcaggtattgcacttctattctgagtggcagtttacacattttaaattacatcaagggtaaatcaatagtatggaaatcttaatttggtccactttaaatgtaatttcaaggatttctcatttgacctatttacacatgcatccagaaaaaagtaacaaaaaatgtagtcaagttatgtttatttccaaaaaaggcatttaccctagaagaaagtagaatctgttaatacagtttaaagtctgtggagttaaaaaaaataacaaaaaatcaatttgtgattatttctttaagtaaaatataagacattaagtttgcctgtaatcttatggcattactaaactggacaaacaaaataaatactctttgtcgga

SEQ ID NO: 16730 - DNA, 572 bp, Homo sapiens
attggataattggttagaaatagtagatgagtaggtatattaaatgttgaatggatggtcagtattgattctactcttggattctgactaggatatttactctctctctctcagaaacatctatatctttaatattacttgctattgtatttactaactgtcacaagaatagcctgttccacatataaaatacagagttggttctcatgttttttgttgaagggaattcggataactagtgagttgtttgtcattttcatttaagacagaagttaaattctaaaagtatgtcactcagtgaatttttaaaaattatatcttttaataactttaagattgattcttcatctattcatgtctctgttttaaggatgtgggtggtatttatataattcctaattgattctataaaaagtattttaaacaaaagggttatatagaggttatagttattagataatcttgtcagaaacagtgccatttagaatacttggttcagcaaactgtttaatgtcagccaaagtgatttaaaagctttatttaggattaatccatcatctgcttaaatttat

SEQ ID NO: 16731 - DNA, 2071 bp, Homo sapiens
aagcaaagcagctcttatttgaaaaaccactgggttccgagttcattactacaggaaaaactgttctcttctgtggcacagagaaccctgcttcaaagcagaagtagcagttccggagtccagctggctaaaactcatcccagaggataatggcaacccatgccttagaaatcgctgggctgtttcttggtggtgttggaatggtgggcacagtggctgtcactgtcatgcctcagtggagagtgtcggccttcattgaaaacaacatcgtggtttttgaaaacttctgggaaggactgtggatgaattgcgtgaggcaggctaacatcaggatgcagtgcaaaatctatgattccctgctggctctttctccggacctacaggcagccagaggactgatgtgtgctgcttccgtgatgtccttcttggctttcatgatggccatccttggcatgaaatgcaccaggtgcacgggggacaatgagaaggtgaaggctcacattctgctgacggctggaatcatcttcatcatcacgggcatggtggtgctcatccctgtgagctgggttgccaatgccatcatcagagatttctataactcaatagtgaatgttgcccaaaaacgtgagcttggagaagctctctacttaggatggaccacggcactggtgctgattgttggaggagctctgttctgctgcgttttttgttgcaacgaaaagagcagtagctacagatactcgataccttcccatcgcacaacccaaaaaagttatcacaccggaaagaagtcaccgagcgtctactccagaagtcagtatgtgtagttgtgtatgtttttttaactttactataaagccatgcaaatgacaaaaatctatattactttctcaaaatggaccccaaagaaactttgatttactgttcttaactgcctaatcttaattacaggaactgtgcatcagctatttatgattctataagctatttcagcagaatgagatattaaacccaatgctttgattgttctagaaagtatagtaatttgttttctaaggtggttcaagcatctactctttttatcatttacttcaaaatgacattgctaaagactgcattattttactactgtaatttctccacgacatagcattatgtacatagatgagtgtaacatttatatctcacatagagacatgcttatatggttttatttaaaatgaaatgccagtccattacactgaataaatagaactcaactattgcttttcagggaaatcatggatagggttgaagaaggttactattaattgtttaaaaacagcttagggattaatgtcctccatttataatgaagattaaaatgaaggctttaatcagcattgtaaaggaaattgaatggctttctgatatgctgttttttagcctaggagttagaaatcctaacttctttatcctcttctcccagaggctttttttttcttgtgtattaaattaacatttttaaaaagcagatattttgtcaaggggctttgcattcaaactgcttttccagggctatactcagaagaaagataaaagtgtgatctaagaaaaagtgatggttttaggaaagtgaaaatatttttgtttttgtatttgaagaagaatgatgcattttgacaagaaatcatatatgtatggatatattttaataagtatttgagtacagactttgaggtttcatcaatataaataaaagagcagaaaaatatgtcttggttttcatttgcttaccaaaaaaacaacaacaaaaaaagttgtcctttgagaacttcacctgctcctatgtgggtacctgagtcaaaattgtcatttttgttctgtgaaaaataaatttccttcttgtaccatttctgtttagttttactaaaatctgtaaatactgtatttttctgtttattccaaatttgatgaaactgacaatccaatttgaaagtttgtgtcgacgtctgtctagcttaaatgaatgtgttctatttgctttatacatttatattaataaattgtacatttttctaattatttgaca

SEQ ID NO: 16732 - DNA, 6149 bp, Homo sapiens
  misc_feature (1497)..(1497): n is a, c, g, or t
  misc_feature (1778)..(1778): n is a, c, g, or t
ctgggcaccccagcaaaccatattatgctccaggggcgcccactccaagacccctccatgggaagctggaatccctgcatggctgtgtgcaggcattgctccgggagccagcccagccagggctttgggaacagcttgggcaactgtacgagtcagagcacgatagtgaggaggccacacgctgctaccacagcgcccttcgatacggaggaagcttcgctgagctggggccccgcattggccgactgcagcaggcccagctctggaactttcatactggctcctgccagcaccgagccaaggtcctgcccccactggagcaagtgtggaacttgctacaccttgagcacaaacggaactatggagccaagcggggaggtcccccggtgaagcgagctgctgaacccccagtggtgcagcctgtgcctcctgcagcactctcaggcccctcaggggaggagggcctcagccctggaggcaagcgaaggagaggctgcaactctgaacagactggccttcccccagggctgccactgcctccaccaccattaccaccaccaccaccaccaccaccaccaccaccaccaccaccacccctgcctggcctggctaccagccccccatttcagctaaccaagccagggctgtggagtaccctgcatggagatgcctggggcccagagcgcaagggttcagcacccccagagcgccaggagcagcggcactcgctgcctcacccatatccatacccagctccagcgtacaccgcgcacccccctggccaccggctggtcccggctgctcccccaggcccaggcccccgccccccaggagcagagagccatggctgcctgcctgccacccgtccccccggaagtgaccttagagagagcagagttcagaggtcgcggatggactccagcgtttcaccagcagcaaccaccgcctgcgtgccttacgccccttcccggccccctggcctccccggcaccaccaccagcagcagcagtagcagcagcagcaacactggtctccggggcgtggagccgaacccaggcattcccggcgctgaccattaccaaactcccgcgctggaggtctctcaccatggccgcctggggccctcggcacacagcagtcggaaaccgttcttgggggctcccgctgccactccccacctatccctgccacctggaccttcctcaccccctccacccccctgtccccgcctcttacgccccccaccaccccctgcctggttgaagggtccggcctgccgggcagcccgagaggatggagagatcttagaagagctcttctttgggactgagggacccccccgccctgccccaccacccctcccccatcgcgagggcttcttggggcctccggcctcccgcttttctgtgggcactcaggattctcacacccctcccactcccccaaccccaaccaccagcagtagcaacagcaacagtggcagccacagcagcagcnctgctgggcctgtgtcctttcccccaccaccctatctggccagaagtatagacccccttccccggcctcccagcccagcacagaacccccaggacccacctcttgtacccctgactcttgccctgcctccagcccctccttcctcctgccaccaaaatacctcaggaagcttcaggcgcccggagagcccccggcccagggtctccttcccaaagacccccgaggtggggccggggccacccccaggccccctgagtaaagccccccagcctgtgccgccnggggttggggagctgcctgcccgaggccctcgactctttgattttccccccactccgctggaggaccagtttgaggagccagccgaattcaagatcctacctgatgggctggccaacatcatgaagatgctggacgaatccattcgcaaggaagaggaacagcaacaacacgaagcaggcgtggccccccaacccccgctgaaggagccctttgcatctctgcagtctcctttccccaccgacacagcccccaccactactgctcctgctgtcgccgtcaccaccaccaccaccaccaccaccaccaccacggccacccaggaagaggagaagaagccaccaccagccctaccaccaccaccgcctctagccaagttccctccaccctctcagccacagccaccaccacccccaccccccagcccggccagcctgctcaaatccttggcctccgtgctggagggacaaaagtactgttatcgggggactggagcagctgtttccacccggcctgggcccttgcccaccactcagtattcccctggccccccatcaggtgctaccgccctgccgcccacctcagcggcccctagcgcccagggctccccacagccctctgcttcctcgtcatctcagttctctacctcaggcgggccctgggcccgggagcgcagggcgggcgaagagccagtcccgggccccatgacccccacccaaccgcccccacccctatctctgccccctgctcgctctgagtctgaggtgctagaagagatcagccgggcttgcgagacccttgtggagcgggtgggccggagtgccactgacccagccgacccagtggacacagcagagccagcggacagtgggactgagcgactgctgccccccgcacaggccaaggaggaggctggcggggtggcggcagtgtcaggcagctgtaagcggcgacagaaggagcatcagaaggagcatcggcggcacaggcgggcctgtaaggacagtgtgggtcgtcggccccgtgagggcagggcaaaggccaaggccaaggtccccaaagaaaagagccgccgggtgctggggaacctggacctgcagagcgaggagatccaggtcgtgagaagtcccggcccgatcttggcggggcctccaaggccaagccacccacagctccagcccctccatcagctcctgcaccttctgcccagcccacacccccgtcagcctctgtccctggaaagaaggctcgggaggaagccccagggccaccgggtgtcagccgggccgacatgctgaagctgcgctcacttagtgaggggccccccaaggagctgaagatccggctcatcaaggtagagagtggtgacaaggagacctttatcgcctctgaggtggaagagcggcggctgcgcatggcagacctcaccatcagccactgtgctgctgacgtcgtgcgcgccagcaggaatgccaaggtgaaagggaagtttcgagagtcctacctttcccctgcccagtctgtgaaaccgaagatcaacactgaggagaagctgccccgggaaaaactcaacccccctacacccagcatctatctggagagcaaacgggatgccttctcacctgtcctgctgcagttctgtacagaccctcgaaatcccatcacagtgatccggggcctggcgggctccctgcggctcaacttgggcctcttctccaccaagaccctggtggaagcgagtggcgaacacaccgtggaagttcgcacccaggtgcagcagccctcagatgagaactgggatctgacaggcactcggcagatctggccttgtgagagctcccgttcccacaccaccattgccaagtacgcacagtaccaggcctcatccttccaggagtctctgcaggaggagaaggagagtgaggatgaggagtcagaggagccagacagcaccactggaacccctcctagcagcgcaccagacccgaagaaccatcacatcatcaagtttggcaccaacatcgacttgtctgatgctaagcggtggaagccccagctgcaggagctgctgaagctgcccgccttcatgcgggtaacatccacgggcaacatgctgagccacgtgggccacaccatcctgggcatgaacacggtgcagctgtacatgaaggtgcccggcagccgaacgccaggccaccaggagaataacaacttctgctccgtcaacatcaacattggcccaggcgactgcgagtggttcgcggtgcacgagcactactgggagaccatcagcgctttctgtgatcggcacggcgtggactacttgacgggttcctggtggccaatcctggatgatctctatgcatccaatattcctgtgtaccgcttcgtgcagcgacccggagacctcgtgtggattaatgcggggactgtgcactgggtgcaggccaccggctggtgcaacaacattgcctggaacgtggggcccctcaccgcctatcagtaccagctggccctggaacgatacgagtggaatgaggtgaagaacgtcaaatccatcgtgcccatgattcacgtgtcatggaacgtggctcgcacggtcaaaatcagcgaccccgacttgttcaagatgatcaagttctgcctgctgcagtccatgaagcactgccaggtgcaacgcgagagcctggtgcgggcagggaagaaaatcgcttaccagggccgtgtcaaggacgagccagcctactactgcaacgagtgcgatgtggaggtgtttaacatcctgttcgtgacaagtgagaatggcagccgcaacacgtacctggtacactgcgagggctgtgcccggcgccgcagcgcaggcctgcagggcgtggtggtgctggagcagtaccgcactgaggagctggctcaggcctacgacgccttcacgctggtgagggcccggcgggcgcgcgggcagcggaggagggcactggggcaggctgcagggacgggcttcgggagcccggccgcgcctttccctgagcccccgccggctttctccccccaggccccagccagcacgtcgcgatgaggccggacgccccgcccgcctgcctgcccgcgcaaggcgccgcggggccaccagcacatgcctgggctggacctaggtcccgcctgtggccgagaagggggtcgggcccagcccttccaccccattggcagctcccctcacttaatttattaagaaaaactttttttttttttttagcaaatatgaggaaaaaaggaaaaaaaatgggagacgggggagggggctggcagcccctcgcccaccagcgcctcccctcaccgactttggcctttttagcaacagacacaaggaccaggctccggcggcggcgggggtcacatacgggttccctcaccctgccagccgcccgcccgcccggcgcagatgcacgcggctcgtgtatgtacatagacgttacggcagccgaggtttttaatgagattctttctatgggctttacccctcccccggaacctccttttttacttccaatgctagctgtgacccctgtacatgtctctttattcacttggttatgatttgtattttttgttcttttcttgtttttttgtttttaatttataacagtcccactcacctctatttattcatttttgggaaaacccgacctcccacacccccaagccatcctgcccgcccctccagggaccgcccgtcgccgggctctccccgcgccccagtgtgtgtccgggcccggcccgaccgtctccacccgtccgcccgcggctccagccgggttctcatggtgctcaaacccgctcccctcccctacgtcctgcactttctcggaccagtccccccactcccgacccgaccccagccccacctgagggtgagcaactcctgtactgtaggggaagaagtgggaactgaaatggtattttgtaaaaaaaataaataaaataaaaaaattaaaggttttaaagaaagaactatgaggaaaaggaaccccgtccttcccagccccggccaactttaaaaaacacagaccttcacccccacccccttttctttttaagtgtgaaacaacccagggccagggcctcactggggcagggacaccccggggtgagtttctctggggctttattttcgttttgttggttgttttttctccacgctggggctgcggaggggtggggggtttacagtcccgcaccctcgcactgcactgtctctctgccccaggggcagaggggtcttcccaaccctacccctattttcggtgatttttgtgtgagaatattaatattaaaaataaacggagaaaaaaaatcctcgtgcgctaacggctggt

SEQ ID NO: 16733 - DNA, 389 bp, Homo sapiens
gtctcccattttttttccttttttcctcatatttgctaaaaaaaaaaaaaaaaagttgcggccaactttaaaaaacacagaccttcacccccacccccttttctttttaagtgtgaaacaacccagggccagggcctcactggggcagggacaccccggggtgagtttctctggggctttattttcgttttgttggttgttttttctccacgctggggctgcggaggggtggggggtttacagtcccgcaccctcgcactgcactgtctctctgccccaggggcagaggggtcttcccaaccctacccctattttcggtgatttttgtgtgagaatattaatattaaaaataaacggagaaaaaaaatcctcgtgcgctaacggctggt

SEQ ID NO: 16734 - DNA, 6032 bp, Homo sapiens
  misc_feature (1497)..(1497): n is a, c, g, or t
  misc_feature (1778)..(1778): n is a, c, g, or t
ctgggcaccccagcaaaccatattatgctccaggggcgcccactccaagacccctccatgggaagctggaatccctgcatggctgtgtgcaggcattgctccgggagccagcccagccagggctttgggaacagcttgggcaactgtacgagtcagagcacgatagtgaggaggccacacgctgctaccacagcgcccttcgatacggaggaagcttcgctgagctggggccccgcattggccgactgcagcaggcccagctctggaactttcatactggctcctgccagcaccgagccaaggtcctgcccccactggagcaagtgtggaacttgctacaccttgagcacaaacggaactatggagccaagcggggaggtcccccggtgaagcgagctgctgaacccccagtggtgcagcctgtgcctcctgcagcactctcaggcccctcaggggaggagggcctcagccctggaggcaagcgaaggagaggctgcaactctgaacagactggccttcccccagggctgccactgcctccaccaccattaccaccaccaccaccaccaccaccaccaccaccaccaccaccacccctgcctggcctggctaccagccccccatttcagctaaccaagccagggctgtggagtaccctgcatggagatgcctggggcccagagcgcaagggttcagcacccccagagcgccaggagcagcggcactcgctgcctcacccatatccatacccagctccagcgtacaccgcgcacccccctggccaccggctggtcccggctgctcccccaggcccaggcccccgccccccaggagcagagagccatggctgcctgcctgccacccgtccccccggaagtgaccttagagagagcagagttcagaggtcgcggatggactccagcgtttcaccagcagcaaccaccgcctgcgtgccttacgccccttcccggccccctggcctccccggcaccaccaccagcagcagcagtagcagcagcagcaacactggtctccggggcgtggagccgaacccaggcattcccggcgctgaccattaccaaactcccgcgctggaggtctctcaccatggccgcctggggccctcggcacacagcagtcggaaaccgttcttgggggctcccgctgccactccccacctatccctgccacctggaccttcctcaccccctccacccccctgtccccgcctcttacgccccccaccaccccctgcctggttgaagggtccggcctgccgggcagcccgagaggatggagagatcttagaagagctcttctttgggactgagggacccccccgccctgccccaccacccctcccccatcgcgagggcttcttggggcctccggcctcccgcttttctgtgggcactcaggattctcacacccctcccactcccccaaccccaaccaccagcagtagcaacagcaacagtggcagccacagcagcagcnctgctgggcctgtgtcctttcccccaccaccctatctggccagaagtatagacccccttccccggcctcccagcccagcacagaacccccaggacccacctcttgtacccctgactcttgccctgcctccagcccctccttcctcctgccaccaaaatacctcaggaagcttcaggcgcccggagagcccccggcccagggtctccttcccaaagacccccgaggtggggccggggccacccccaggccccctgagtaaagccccccagcctgtgccgccnggggttggggagctgcctgcccgaggccctcgactctttgattttccccccactccgctggaggaccagtttgaggagccagccgaattcaagatcctacctgatgggctggccaacatcatgaagatgctggacgaatccattcgcaaggaagaggaacagcaacaacacgaagcaggcgtggccccccaacccccgctgaaggagccctttgcatctctgcagtctcctttccccaccgacacagcccccaccactactgctcctgctgtcgccgtcaccaccaccaccaccaccaccaccaccaccacggccacccaggaagaggagaagaagccaccaccagccctaccaccaccaccgcctctagccaagttccctccaccctctcagccacagccaccaccacccccaccccccagcccggccagcctgctcaaatccttggcctccgtgctggagggacaaaagtactgttatcgggggactggagcagctgtttccacccggcctgggcccttgcccaccactcagtattcccctggccccccatcaggtgctaccgccctgccgcccacctcagcggcccctagcgcccagggctccccacagccctctgcttcctcgtcatctcagttctctacctcaggcgggccctgggcccgggagcgcagggcgggcgaagagccagtcccgggccccatgacccccacccaaccgcccccacccctatctctgccccctgctcgctctgagtctgaggtgctagaagagatcagccgggcttgcgagacccttgtggagcgggtgggccggagtgccactgacccagccgacccagtggacacagcagagccagcggacagtgggactgagcgactgctgccccccgcacaggccaaggaggaggctggcggggtggcggcagtgtcaggcagctgtaagcggcgacagaaggagcatcagaaggagcatcggcggcacaggcgggcctgtaaggacagtgtgggtcgtcggccccgtgagggcagggcaaaggccaaggccaaggtccccaaagaaaagagccgccgggtgctggggaacctggacctgcagagcgaggagatccaggtcgtgagaagtcccggcccgatcttggcggggcctccaaggccaagccacccacagctccagcccctccatcagctcctgcaccttctgcccagcccacacccccgtcagcctctgtccctggaaagaaggctcgggaggaagccccagggccaccgggtgtcagccgggccgacatgctgaagctgcgctcacttagtgaggggccccccaaggagctgaagatccggctcatcaaggtagagagtggtgacaaggagacctttatcgcctctgaggtggaagagcggcggctgcgcatggcagacctcaccatcagccactgtgctgctgacgtcgtgcgcgccagcaggaatgccaaggtgaaagggaagtttcgagagtcctacctttcccctgcccagtctgtgaaaccgaagatcaacactgaggagaagctgccccgggaaaaactcaacccccctacacccagcatctatctggagagcaaacgggatgccttctcacctgtcctgctgcagttctgtacagaccctcgaaatcccatcacagtgatccggggcctggcgggctccctgcggctcaacttgggcctcttctccaccaagaccctggtggaagcgagtggcgaacacaccgtggaagttcgcacccaggtgcagcagccctcagatgagaactgggatctgacaggcactcggcagatctggccttgtgagagctcccgttcccacaccaccattgccaagtacgcacagtaccaggcctcatccttccaggagtctctgcaggaggagaaggagagtgaggatgaggagtcagaggagccagacagcaccactggaacccctcctagcagcgcaccagacccgaagaaccatcacatcatcaagtttggcaccaacatcgacttgtctgatgctaagcggtggaagccccagctgcaggagctgctgaagctgcccgccttcatgcgggtaacatccacgggcaacatgctgagccacgtgggccacaccatcctgggcatgaacacggtgcagctgtacatgaaggtgcccggcagccgaacgccaggccaccaggagaataacaacttctgctccgtcaacatcaacattggcccaggcgactgcgagtggttcgcggtgcacgagcactactgggagaccatcagcgctttctgtgatcggcacggcgtggactacttgacgggttcctggtggccaatcctggatgatctctatgcatccaatattcctgtgtaccgcttcgtgcagcgacccggagacctcgtgtggattaatgcggggactgtgcactgggtgcaggccaccggctggtgcaacaacattgcctggaacgtggggcccctcaccgcctatcagtaccagctggccctggaacgatacgagtggaatgaggtgaagaacgtcaaatccatcgtgcccatgattcacgtgtcatggaacgtggctcgcacggtcaaaatcagcgaccccgacttgttcaagatgatcaagttctgcctgctgcagtccatgaagcactgccaggtgcaacgcgagagcctggtgcgggcagggaagaaaatcgcttaccagggccgtgtcaaggacgagccagcctactactgcaacgagtgcgatgtggaggtgtttaacatcctgttcgtgacaagtgagaatggcagccgcaacacgtacctggtacactgcgagggctgtgcccggcgccgcagcgcaggcctgcagggcgtggtggtgctggagcagtaccgcactgaggagctggctcaggcctacgacgccttcacgctggccccagccagcacgtcgcgatgaggccggacgccccgcccgcctgcctgcccgcgcaaggcgccgcggggccaccagcacatgcctgggctggacctaggtcccgcctgtggccgagaagggggtcgggcccagcccttccaccccattggcagctcccctcacttaatttattaagaaaaactttttttttttttttagcaaatatgaggaaaaaaggaaaaaaaatgggagacgggggagggggctggcagcccctcgcccaccagcgcctcccctcaccgactttggcctttttagcaacagacacaaggaccaggctccggcggcggcgggggtcacatacgggttccctcaccctgccagccgcccgcccgcccggcgcagatgcacgcggctcgtgtatgtacatagacgttacggcagccgaggtttttaatgagattctttctatgggctttacccctcccccggaacctccttttttacttccaatgctagctgtgacccctgtacatgtctctttattcacttggttatgatttgtattttttgttcttttcttgtttttttgtttttaatttataacagtcccactcacctctatttattcatttttgggaaaacccgacctcccacacccccaagccatcctgcccgcccctccagggaccgcccgtcgccgggctctccccgcgccccagtgtgtgtccgggcccggcccgaccgtctccacccgtccgcccgcggctccagccgggttctcatggtgctcaaacccgctcccctcccctacgtcctgcactttctcggaccagtccccccactcccgacccgaccccagccccacctgagggtgagcaactcctgtactgtaggggaagaagtgggaactgaaatggtattttgtaaaaaaaataaataaaataaaaaaattaaaggttttaaagaaagaactatgaggaaaaggaaccccgtccttcccagccccggccaactttaaaaaacacagaccttcacccccacccccttttctttttaagtgtgaaacaacccagggccagggcctcactggggcagggacaccccggggtgagtttctctggggctttattttcgttttgttggttgttttttctccacgctggggctgcggaggggtggggggtttacagtcccgcaccctcgcactgcactgtctctctgccccaggggcagaggggtcttcccaaccctacccctattttcggtgatttttgtgtgagaatattaatattaaaaataaacggagaaaaaaaatcctcgtgcgctaacggctggt

SEQ ID NO: 16735 - DNA, 2677 bp, Homo sapiens
tgcaggtggctacccccggggttacttgggcctcttctccaccaagaccctggtggaagcgagtggcgaacacaccgtggaagttcgcacccaggtgcagcagccctcagatgagaactgggatctgacaggcactcggcagatctggccttgtgagagctcccgttcccacaccaccattgccaagtacgcacagtaccaggcctcatccttccaggagtctctgcaggaggagaaggagagtgaggatgaggagtcagaggagccagacagcaccactggaacccctcctagcagcgcaccagacccgaagaaccatcacatcatcaagtttggcaccaacatcgacttgtctgatgctaagcggtcagtggggctgaggccagggaagttggggcaggagtgctgctaggacctcgtggcgggggcggggtgtagcctctcgtcgcacttccgcaccgcaggtggaagccccagctgcaggagctgctgaagctgcccgccttcatgcgggtaacatccacgggcaacatgctgagccacgtgggccacaccatcctgggcatgaacacggtgcagctgtacatgaaggtgcccggcagccgaacgccaggccaccaggagaataacaacttctgctccgtcaacatcaacattggcccaggcgactgcgagtggttcgcggtgcacgagcactactgggagaccatcagcgctttctgtgatcggcacggcgtggactacttgacgggttcctggtggccaatcctggatgatctctatgcatccaatattcctgtgtaccgcttcgtgcagcgacccggagacctcgtgtggattaatgcggggactgtgcactgggtgcaggccaccggctggtgcaacaacattgcctggaacgtggggcccctcaccgcctatcagtaccagctggccctggaacgatacgagtggaatgaggtgaagaacgtcaaatccatcgtgcccatgattcacgtgtcatggaacgtggctcgcacggtcaaaatcagcgaccccgacttgttcaagatgatcaagttctgcctgctgcagtccatgaagcactgccaggtgcaacgcgagagcctggtgcgggcagggaagaaaatcgcttaccagggccgtgtcaaggacgagccagcctactactgcaacgagtgcgatgtggaggtgtttaacatcctgttcgtgacaagtgagaatggcagccgcaacacgtacctggtacactgcgagggctgtgcccggcgccgcagcgcaggcctgcagggcgtggtggtgctggagcagtaccgcactgaggagctggctcaggcctacgacgccttcacgctggccccagccagcacgtcgcgatgaggccggacgccccgcccgcctgcctgcccgcgcaaggcgccgcggggccaccagcacatgcctgggctggacctaggtcccgcctgtggccgagaagggggtcgggcccagcccttccaccccattggcagctcccctcacttaatttattaagaaaaactttttttttttttttagcaaatatgaggaaaaaaggaaaaaaaatgggagacgggggagggggctggcagcccctcgcccaccagcgcctcccctcaccgactttggcctttttagcaacagacacaaggaccaggctccggcggcggcgggggtcacatacgggttccctcaccctgccagccgcccgcccgcccggcgcagatgcacgcggctcgtgtatgtacatagacgttacggcagccgaggtttttaatgagattctttctatgggctttacccctcccccggaacctccttttttacttccaatgctagctgtgacccctgtacatgtctctttattcacttggttatgatttgtattttttgttcttttcttgtttttttgtttttaatttataacagtcccactcacctctatttattcatttttgggaaaacccgacctcccacacccccaagccatcctgcccgcccctccagggaccgcccgtcgccgggctctccccgcgccccagtgtgtgtccgggcccggcccgaccgtctccacccgtccgcccgcggctccagccgggttctcatggtgctcaaacccgctcccctcccctacgtcctgcactttctcggaccagtccccccactcccgacccgaccccagccccacctgagggtgagcaactcctgtactgtaggggaagaagtgggaactgaaatggtattttgtaaaaaaaataaataaaataaaaaaattaaaggttttaaagaaagaactatgaggaaaaggaaccccgtccttcccagccccggccaactttaaaaaacacagaccttcacccccacccccttttctttttaagtgtgaaacaacccagggccagggcctcactggggcagggacaccccggggtgagtttctctggggctttattttcgttttgttggttgttttttctccacgctggggctgcggaggggtggggggtttacagtcccgcaccctcgcactgcactgtctctctgccccaggggcagaggggtcttcccaaccctacccctattttcggtgatttttgtgtgagaatattaatattaaaaataaacggagaaaaaaaatcctcgtgcgctaacggctggt

SEQ ID NO: 16736 - DNA, 2365 bp, Homo sapiens
tcatcgagctcgccctattataggctctggaaggatgaggagtcagaggagccagacagcaccactggaacccctcctagcagcgcaccagacccgaagaaccatcacatcatcaagtttggcaccaacatcgacttgtctgatgctaagcggtggaagccccagctgcaggagctgctgaagctgcccgccttcatgcgggtaacatccacgggcaacatgctgagccacgtgggccacaccatcctgggcatgaacacggtgcagctgtacatgaaggtgcccggcagccgaacgccaggccaccaggagaataacaacttctgctccgtcaacatcaacattggcccaggcgactgcgagtggttcgcggtgcacgagcactactgggagaccatcagcgctttctgtgatcggcacggcgtggactacttgacgggttcctggtggccaatcctggatgatctctatgcatccaatattcctgtgtaccgcttcgtgcagcgacccggagacctcgtgtggattaatgcggggactgtgcactgggtgcaggccaccggctggtgcaacaacattgcctggaacgtggggcccctcaccgcctatcagtaccagctggccctggaacgatacgagtggaatgaggtgaagaacgtcaaatccatcgtgcccatgattcacgtgtcatggaacgtggctcgcacggtcaaaatcagcgaccccgacttgttcaagatgatcaagttctgcctgctgcagtccatgaagcactgccaggtgcaacgcgagagcctggtgcgggcagggaagaaaatcgcttaccagggccgtgtcaaggacgagccagcctactactgcaacgagtgcgatgtggaggtgtttaacatcctgttcgtgacaagtgagaatggcagccgcaacacgtacctggtacactgcgagggctgtgcccggcgccgcagcgcaggcctgcagggcgtggtggtgctggagcagtaccgcactgaggagctggctcaggcctacgacgccttcacgctggccccagccagcacgtcgcgatgaggccggacgccccgcccgcctgcctgcccgcgcaaggcgccgcggggccaccagcacatgcctgggctggacctaggtcccgcctgtggccgagaagggggtcgggcccagcccttccaccccattggcagctcccctcacttaatttattaagaaaaactttttttttttttttagcaaatatgaggaaaaaaggaaaaaaaatgggagacgggggagggggctggcagcccctcgcccaccagcgcctcccctcaccgactttggcctttttagcaacagacacaaggaccaggctccggcggcggcgggggtcacatacgggttccctcaccctgccagccgcccgcccgcccggcgcagatgcacgcggctcgtgtatgtacatagacgttacggcagccgaggtttttaatgagattctttctatgggctttacccctcccccggaacctccttttttacttccaatgctagctgtgacccctgtacatgtctctttattcacttggttatgatttgtattttttgttcttttcttgtttttttgtttttaatttataacagtcccactcacctctatttattcatttttgggaaaacccgacctcccacacccccaagccatcctgcccgcccctccagggaccgcccgtcgccgggctctccccgcgccccagtgtgtgtccgggcccggcccgaccgtctccacccgtccgcccgcggctccagccgggttctcatggtgctcaaacccgctcccctcccctacgtcctgcactttctcggaccagtccccccactcccgacccgaccccagccccacctgagggtgagcaactcctgtactgtaggggaagaagtgggaactgaaatggtattttgtaaaaaaaataaataaaataaaaaaattaaaggttttaaagaaagaactatgaggaaaaggaaccccgtccttcccagccccggccaactttaaaaaacacagaccttcacccccacccccttttctttttaagtgtgaaacaacccagggccagggcctcactggggcagggacaccccggggtgagtttctctggggctttattttcgttttgttggttgttttttctccacgctggggctgcggaggggtggggggtttacagtcccgcaccctcgcactgcactgtctctctgccccaggggcagaggggtcttcccaaccctacccctattttcggtgatttttgtgtgagaatattaatattaaaaataaacggagaaaaaaaatcctcgtgcgctaacggctggt

SEQ ID NO: 16737 - DNA, 2974 bp, Homo sapiens
  misc_feature (1497)..(1497): n is a, c, g, or t
  misc_feature (1778)..(1778): n is a, c, g, or t
ctgggcaccccagcaaaccatattatgctccaggggcgcccactccaagacccctccatgggaagctggaatccctgcatggctgtgtgcaggcattgctccgggagccagcccagccagggctttgggaacagcttgggcaactgtacgagtcagagcacgatagtgaggaggccacacgctgctaccacagcgcccttcgatacggaggaagcttcgctgagctggggccccgcattggccgactgcagcaggcccagctctggaactttcatactggctcctgccagcaccgagccaaggtcctgcccccactggagcaagtgtggaacttgctacaccttgagcacaaacggaactatggagccaagcggggaggtcccccggtgaagcgagctgctgaacccccagtggtgcagcctgtgcctcctgcagcactctcaggcccctcaggggaggagggcctcagccctggaggcaagcgaaggagaggctgcaactctgaacagactggccttcccccagggctgccactgcctccaccaccattaccaccaccaccaccaccaccaccaccaccaccaccaccaccacccctgcctggcctggctaccagccccccatttcagctaaccaagccagggctgtggagtaccctgcatggagatgcctggggcccagagcgcaagggttcagcacccccagagcgccaggagcagcggcactcgctgcctcacccatatccatacccagctccagcgtacaccgcgcacccccctggccaccggctggtcccggctgctcccccaggcccaggcccccgccccccaggagcagagagccatggctgcctgcctgccacccgtccccccggaagtgaccttagagagagcagagttcagaggtcgcggatggactccagcgtttcaccagcagcaaccaccgcctgcgtgccttacgccccttcccggccccctggcctccccggcaccaccaccagcagcagcagtagcagcagcagcaacactggtctccggggcgtggagccgaacccaggcattcccggcgctgaccattaccaaactcccgcgctggaggtctctcaccatggccgcctggggccctcggcacacagcagtcggaaaccgttcttgggggctcccgctgccactccccacctatccctgccacctggaccttcctcaccccctccacccccctgtccccgcctcttacgccccccaccaccccctgcctggttgaagggtccggcctgccgggcagcccgagaggatggagagatcttagaagagctcttctttgggactgagggacccccccgccctgccccaccacccctcccccatcgcgagggcttcttggggcctccggcctcccgcttttctgtgggcactcaggattctcacacccctcccactcccccaaccccaaccaccagcagtagcaacagcaacagtggcagccacagcagcagcnctgctgggcctgtgtcctttcccccaccaccctatctggccagaagtatagacccccttccccggcctcccagcccagcacagaacccccaggacccacctcttgtacccctgactcttgccctgcctccagcccctccttcctcctgccaccaaaatacctcaggaagcttcaggcgcccggagagcccccggcccagggtctccttcccaaagacccccgaggtggggccggggccacccccaggccccctgagtaaagccccccagcctgtgccgccnggggttggggagctgcctgcccgaggccctcgactctttgattttccccccactccgctggaggaccagtttgaggagccagccgaattcaagatcctacctgatgggctggccaacatcatgaagatgctggacgaatccattcgcaaggaagaggaacagcaacaacacgaagcaggcgtggccccccaacccccgctgaaggagccctttgcatctctgcagtctcctttccccaccgacacagcccccaccactactgctcctgctgtcgccgtcaccaccaccaccaccaccaccaccaccaccacggccacccaggaagaggagaagaagccaccaccagccctaccaccaccaccgcctctagccaagttccctccaccctctcagccacagccaccaccacccccaccccccagcccggccagcctgctcaaatccttggcctccgtgctggagggacaaaagtactgttatcgggggactggagcagctgtttccacccggcctgggcccttgcccaccactcagtattcccctggccccccatcaggtgctaccgccctgccgcccacctcagcggcccctagcgcccagggctccccacagccctctgcttcctcgtcatctcagttctctacctcaggcgggccctgggcccgggagcgcagggcgggcgaagagccagtcccgggccccatgacccccacccaaccgcccccacccctatctctgccccctgctcgctctgagtctgaggtgctagaagagatcagccgggcttgcgagacccttgtggagcgggtgggccggagtgccactgacccagccgacccagtggacacagcagagccagcggacagtgggactgagcgactgctgccccccgcacaggccaaggaggaggctggcggggtggcggcagtgtcaggcagctgtaagcggcgacagaaggagcatcagaaggagcatcggcggcacaggcgggcctgtaaggacagtgtgggtcgtcggccccgtgagggcagggcaaaggccaaggccaaggtccccaaagaaaagagccgccgggtgctggggacccactgcccaatgcccccaagtgatgcatgcccccaggaggcagcacaaaaagtccaagagaaccagggggactaagaaaatcagctccttggccaccagagctagccgta

SEQ ID NO: 16738 - DNA, 5880 bp, Homo sapiens
  misc_feature (1497)..(1497): n is a, c, g, or t
  misc_feature (1778)..(1778): n is a, c, g, or t
ctgggcaccccagcaaaccatattatgctccaggggcgcccactccaagacccctccatgggaagctggaatccctgcatggctgtgtgcaggcattgctccgggagccagcccagccagggctttgggaacagcttgggcaactgtacgagtcagagcacgatagtgaggaggccacacgctgctaccacagcgcccttcgatacggaggaagcttcgctgagctggggccccgcattggccgactgcagcaggcccagctctggaactttcatactggctcctgccagcaccgagccaaggtcctgcccccactggagcaagtgtggaacttgctacaccttgagcacaaacggaactatggagccaagcggggaggtcccccggtgaagcgagctgctgaacccccagtggtgcagcctgtgcctcctgcagcactctcaggcccctcaggggaggagggcctcagccctggaggcaagcgaaggagaggctgcaactctgaacagactggccttcccccagggctgccactgcctccaccaccattaccaccaccaccaccaccaccaccaccaccaccaccaccaccacccctgcctggcctggctaccagccccccatttcagctaaccaagccagggctgtggagtaccctgcatggagatgcctggggcccagagcgcaagggttcagcacccccagagcgccaggagcagcggcactcgctgcctcacccatatccatacccagctccagcgtacaccgcgcacccccctggccaccggctggtcccggctgctcccccaggcccaggcccccgccccccaggagcagagagccatggctgcctgcctgccacccgtccccccggaagtgaccttagagagagcagagttcagaggtcgcggatggactccagcgtttcaccagcagcaaccaccgcctgcgtgccttacgccccttcccggccccctggcctccccggcaccaccaccagcagcagcagtagcagcagcagcaacactggtctccggggcgtggagccgaacccaggcattcccggcgctgaccattaccaaactcccgcgctggaggtctctcaccatggccgcctggggccctcggcacacagcagtcggaaaccgttcttgggggctcccgctgccactccccacctatccctgccacctggaccttcctcaccccctccacccccctgtccccgcctcttacgccccccaccaccccctgcctggttgaagggtccggcctgccgggcagcccgagaggatggagagatcttagaagagctcttctttgggactgagggacccccccgccctgccccaccacccctcccccatcgcgagggcttcttggggcctccggcctcccgcttttctgtgggcactcaggattctcacacccctcccactcccccaaccccaaccaccagcagtagcaacagcaacagtggcagccacagcagcagcnctgctgggcctgtgtcctttcccccaccaccctatctggccagaagtatagacccccttccccggcctcccagcccagcacagaacccccaggacccacctcttgtacccctgactcttgccctgcctccagcccctccttcctcctgccaccaaaatacctcaggaagcttcaggcgcccggagagcccccggcccagggtctccttcccaaagacccccgaggtggggccggggccacccccaggccccctgagtaaagccccccagcctgtgccgccnggggttggggagctgcctgcccgaggccctcgactctttgattttccccccactccgctggaggaccagtttgaggagccagccgaattcaagatcctacctgatgggctggccaacatcatgaagatgctggacgaatccattcgcaaggaagaggaacagcaacaacacgaagcaggcgtggccccccaacccccgctgaaggagccctttgcatctctgcagtctcctttccccaccgacacagcccccaccactactgctcctgctgtcgccgtcaccaccaccaccaccaccaccaccaccaccacggccacccaggaagaggagaagaagccaccaccagccctaccaccaccaccgcctctagccaagttccctccaccctctcagccacagccaccaccacccccaccccccagcccggccagcctgctcaaatccttggcctccgtgctggagggacaaaagtactgttatcgggggactggagcagctgtttccacccggcctgggcccttgcccaccactcagtattcccctggccccccatcaggtgctaccgccctgccgcccacctcagcggcccctagcgcccagggctccccacagccctctgcttcctcgtcatctcagttctctacctcaggcgggccctgggcccgggagcgcagggcgggcgaagagccagtcccgggccccatgacccccacccaaccgcccccacccctatctctgccccctgctcgctctgagtctgaggtgctagaagagatcagccgggcttgcgagacccttgtggagcgggtgggccggagtgccactgacccagccgacccagtggacacagcagagccagcggacagtgggactgagcgactgctgccccccgcacaggccaaggaggaggctggcggggtggcggcagtgtcaggcagctgtaagcggcgacagaaggagcatcagaaggagcatcggcggcacaggcgggcctgtaaggacagtgtgggtcgtcggccccgtgagggcagggcaaaggccaaggccaaggtccccaaagaaaagagccgccgggtgctggggaacctggacctgcagagcgaggagatccaggtcgtgagaagtcccggcccgatcttggcggggcctccaaggccaagccacccacagctccagcccctccatcagctcctgcaccttctgcccagcccacacccccgtcagcctctgtccctggaaagaaggctcgggaggaagccccagggccaccgggtgtcagccgggccgacatgctgaagctgcgctcacttagtgaggggccccccaaggagctgaagatccggctcatcaaggtagagagtggtgacaaggagacctttatcgcctctgaggtggaagagcggcggctgcgcatggcagacctcaccatcagccactgtgctgctgacgtcgtgcgcgccagcaggaatgccaaggtgaaagggaagtttcgagagtcctacctttcccctgcccagtctgtgaaaccgaagatcaacactgaggagaagctgccccgggaaaaactcaacccccctacacccagcatctatctggagagcaaacgggatgccttctcacctgtcctgctgcagttctgtacagaccctcgaaatcccatcacagtgatccggggcctggcgggctccctgcggctcaacttgggcctcttctccaccaagaccctggtggaagcgagtggcgaacacaccgtggaagttcgcacccaggtgcagcagccctcagatgagaactgggatctgacaggcactcggcagatctggccttgtgagagctcccgttcccacaccaccattgccaagtacgcacagtaccaggcctcatccttccaggagtctctgcaggaggagaaggagagtgaggatgaggagtcagaggagccagacagcaccactggaacccctcctagcagcgcaccagacccgaagaaccatcacatcatcaagtttggcaccaacatcgacttgtctgatgctaagcggtggaagccccagctgcaggagctgctgaagctgcccgccttcatgcgggtaacatccacgggcaacatgctgagccacgtgggccacaccatcctgggcatgaacacggtgcagctgtacatgaaggtgcccggcagccgaacgccaggccaccaggagaataacaacttctgctccgtcaacatcaacattggcccaggcgactgcgagtggttcgcggtgcacgagcactactgggagaccatcagcgctttctgtgatcggcacggcgtggactacttgacgggttcctggtggccaatcctggatgatctctatgcatccaatattcctgtgtaccgcttcgtgcagcgacccggagacctcgtgtggattaatgcggggactgtgcactgggtgcaggccaccggctggtgcaacaacattgcctggaacgtggggcccctcaccgcctatcagtaccagctggccctggaacgatacgagtggaatgaggtgaagaacgtcaaatccatcgtgcccatgattcacgtgtcatggaacgtggctcgcacggtcaaaatcagcgaccccgacttgttcaagatgatcaagttctgcctgctgcagtccatgaagcactgccaggtgcaacgcgagagcctggtgcgggcagggaagaaaatcgcttaccagggccgtgtcaaggacgagccagcctactactgcaacgagtgcgatgtggaggtgtttaacatcctgttcgtgacaagtgagaatggcagccgcaacacgtacctggtacactgcgagggctgtgcccggcgccgcagcgcaggcctgcagggcgtggtggtgctggagcagtaccgcactgaggagctggctcaggcctacgacgccttcacgctggccccagccagcacgtcgcgatgaggccggacgccccgcccgcctgcctgcccgcgcaaggcgccgcggggccaccagcacatgcctgggctggacctaggtcccgcctgtggccgagaagggggtcgggcccagcccttccaccccattggcagctcccctcacttaatttattaagaaaaactttttttttttttttagcaaatatgaggaaaaaaggaaaaaaaatgggagacgggggagggggctggcagcccctcgcccaccagcgcctcccctcaccgactttggcctttttagcaacagacacaaggaccaggctccggcggcggcgggggtcacatacgggttccctcaccctgccagccgcccgcccgcccggcgcagatgcacgcggctcgtgtatgtacatagacgttacggcagccgaggtttttaatgagattctttctatgggctttacccctcccccggaacctccttttttacttccaatgctagctgtgacccctgtacatgtctctttattcacttggttatgatttgtattttttgttcttttcttgtttttttgtttttaatttataacagtcccactcacctctatttattcatttttgggaaaacccgctcccctcccctacgtcctgcactttctcggaccagtccccccactcccgacccgaccccagccccacctgagggtgagcaactcctgtactgtaggggaagaagtgggaactgaaatggtattttgtaaaaaaaataaataaaataaaaaaattaaaggttttaaagaaagaactatgaggaaaaggaaccccgtccttcccagccccggccaactttaaaaaacacagaccttcacccccacccccttttctttttaagtgtgaaacaacccagggccagggcctcactggggcagggacaccccggggtgagtttctctggggctttattttcgttttgttggttgttttttctccacgctggggctgcggaggggtggggggtttacagtcccgcaccctcgcactgcactgtctctctgccccaggggcagaggggtcttcccaaccctacccctattttcggtgatttttgtgtgagaatattaatattaaaaataaacggagaaaaaaaatcctcgtgcgctaacggctggt

SEQ ID NO: 16739 - DNA, 431 bp, Homo sapiens
tgcacaaaacctcacatctgctgatctaattgctgagagagacctgtcccaggagagtgagctgtttgtgcagctggctgctgtaacagaagttctttttcctaactctgttagttctgaaaggactttgaatttgtagtgccttctagtttatgttcttttagaaatgagtaaaggagaggcttaagttgacacagtttgcaggtccggctttgaaagaatgtttgtcaaaaaccaaagctcaaactatttttgcagtttttctgaaagtatgaaaaatttcaaaacagtaacaaagccaagtccccagaaactgagtagaaatagaagttaagtggtttgttgttgttctcaaattgttgggactcttagtgtaatttttaaaagtagttcttgtataaatagcaaatgattcattctaatttttctgt

SEQ ID NO: 16740 - DNA, 429 bp, Homo sapiens
aaccaaaaaaaactatgaaaaccagaatttagactcagtcattatactagagattagaatgaaacgaccccaaacaacccatttcttacctggtctctgagaataagtttatacttttagttttctgagaatatttctcagaatatgtgagttttctgagcacatttttcagcatggggtatggtagataaatcacagggccaaggtttggcagggatagatgggatcattgtgtaccctattgttcttctgatttccaggagaacagaatgagcccatgcaaaacataaacttatgatgattaaaaaaaacacacctatccattcactcatcaataaaaacatattatgatggttatcaagctgtgtcctatgagtgataaaatatttgtaaaatataaaattaaatggcatctattgtgaactctat

SEQ ID NO: 16741 - DNA, 402 bp, Homo sapiens
tttgagttggaaatactagtatgtaataatataaaacacattttatgttttatctttaaaaattatttcccaattctgtccatgaaaagaccttaaatcaaggagcaagccagggacagtgagcagtttgttatctctaaatatttccccatgaaaggaaccagggctccttgaagaaatgggtttctccagatctgggatgggaaatgtataagatgagcctgggtcatctaggcttcttaccagaaagcaaggtagctatcaaacacttacctaaggccagttggggtggctcatgcctgtgattccagtgctttaagggttacaggctgaggagggcagattgcttgaggtcagaagtgtgaaaccagcctgggcaacagagaaagaccccatgtctac

SEQ ID NO: 16742 - DNA, 2146 bp, Homo sapiens
ccgctggtccgccatcgcggacgcagcctcgtgccgggagtcgccgcattgtggtccgcttctctgcactatgtcgggtggcctcctgaaggcgctgcgcagcgactcctacgtggagctgagccagtaccgggaccagcacttccggggtgacaatgaagaacaagaaaaattactgaagaaaagctgtacgttatatgttggaaatctttctttttacacaactgaagaacaaatctatgaactcttcagcaaaagtggtgacataaagaaaatcattatgggtctggataaaatgaagaaaacagcatgtggattctgttttgtggaatattactcacgcgcagatgcggaaaacgccatgcggtacataaatgggacgcgtctggatgaccgaatcattcgcacagactgggacgcaggctttaaggagggcaggcaatacggccgtgggcgatctgggggccaggttcgggatgagtatcggcaggactacgatgctgggagaggaggctatggaaaactggcacagaaccagtgagtggtgagagctctgtcagtgacaaacactcctttggcctgttgaatttgctgaagaacatcacctaaagtctgcacacgagcccatttttaccaagatttgatcagtgtctttactgagctggaagcctctgaaagttattaaaggacagaatccaaaagaatgcctttaattcttgtctgagaatcttggccatgtgtcagattatcagaacaattttgttaccaggtcagaaattgtgttctttgacaacagattggatctgtaatgttgattagtctttagccataaccactacacttttagaaagacagaaaaatgtaagaatttgtttttaccataatgagtcttaagtaggttcatgatctacattggggcctgggattatttttttaattttaagtttgcatgagatagcctaataaatggaggtggggccaggcatggtggctcacacgtgtaatcccaacactttgggaggctgaggaggaaggatagcttgaggccaggagtttgagactagactgggcaacatagcaagaccccgtctctacaaagcaaaacgaaaaacaacaaatggagttgtgctatgttgtattgctttgcacaaaattaggaacaggtgtttgacaattgaatttgttttctgtgaattctaacctctaaaggcatgcttagaggtcaaggaccttcctgtgtagttggtgcaaaagcaatctccacaggacagcactgcttccatgcttcatacatcaggaaatgaggccagaacttgagtatttactaacacgtttttcaaaagatgtcagtgttatacctaaagctaaaaaaaagcaagggtttgtcatagagggaacctctaaataatttcaggggtaggggagatgttgtcaataggaaatgggataaaatatcaagagacaatgaaaacactgccttgacatgaggaccagcaagtttattcttttcattttcagtgatgttgggaatggactgggttttaaaagggagcttgaagagggaatgtttgacagtcacagaaggttcctgcagcagatgcctcttttagccatttctcatttttttcctcaaattttacctactgaggctcaagccttcacagtgagctgatggtctctacaggggaggggagtctagggaatttatttggtatttgtaaggcaagaggtgatttctctctaatatatctgagttattgctcatttaaaactgttaagtccagtataattttccctgatatgaaaaaatgtgcatttttttcacttagcaacaaagtaccttctaatttccaatagtccgtgaaagttggggctgaagtacctaagtgtgaatgtctctcccgttaaactgagtgtagaaatctgaatttttaaaagagctgtaactagttgtaagtgcttaggaagaaactttgcaaacatttaatgaggatacactgttcatttttaaaattccttcacactgtaatttaatgtgttttatattcttttgtagtaaaacaacataactcagatttctacaggagacagtggttttatttggattgtcttctgtaataggtttcaataaagctggatgaactta

SEQ ID NO: 16743 - DNA, 838 bp, Homo sapiens
ccgctggtccgccatcgcggacgcagcctcgtgccgggagtcgccgcattgtggtccgcttctctgcactatgtcgggtggcctcctgaaggcgctgcgcagcgactcctacgtggagctgagccagtaccgggaccagcacttccggggtgacaatgaagaacaagaaaaattactgaagaaaagctgtacgttatatgttggaaatctttctttttacacaactgaagaacaaatctatgaactcttcagcaaaagtggtgacataaagaaaatcattatgggtctggataaaatgaagaaaacagcatgtggattctgttttgtggagtatccttcccatggatctaatgtagctgctgaaccagggtagagctgagagtggtagctcacaagcgtccctgcactcgtccctacgttttccttcatctccctcctactttccacccagtgtgtctctgcccttatactgtaaagctgatactatttatattctcttctgaaatccatgctttatggttctttaacaaaaagtttttcaagaatgtttgcccttcacgtaaaaaaaaaaaatccaaagaatgtggtgaaaatacaaaaatctcgtactgttctaaacccctaatgccctttgccagaggcagtcagttagcagtttcttgggcgtctttcaagaagtaaccctgtgggtgtgcggtagtgtatttcatgtgctgtttttaaaatcatttttttattttttattgttccatttcagcatatgtaggtctttttttaaaatagctgtacagctggccatggtggctggtgtttgtagtgccagctgctcaggaagctg

SEQ ID NO: 16744 - DNA, 738 bp, Homo sapiens
agcaaggctctgaagttgcttaacttttgtctctatttgaaattctagggtgacaatgaagaacaagaaaaattactgaagaaaagctgtacgttatatgttggaaatctttctttttacacaactgaagaacaaatctatgaactcttcagcaaaagtggtgacataaagaaaatcattatgggtctggataaaatgaagaaaacagcatgtggattctgttttgtggagtatccttcccatggatctaatgtagctgctgaaccagggtagagctgagagtggtagctcacaagcgtccctgcactcgtccctacgttttccttcatctccctcctactttccacccagtgtgtctctgcccttatactgtaaagctgatactatttatattctcttctgaaatccatgctttatggttctttaacaaaaagtttttcaagaatgtttgcccttcacgtaaaaaaaaaaaatccaaagaatgtggtgaaaatacaaaaatctcgtactgttctaaacccctaatgccctttgccagaggcagtcagttagcagtttcttgggcgtctttcaagaagtaaccctgtgggtgtgcggtagtgtatttcatgtgctgtttttaaaatcatttttttattttttattgttccatttcagcatatgtaggtctttttttaaaatagctgtacagctggccatggtggctggtgtttgtagtgccagctgctcaggaagctg

SEQ ID NO: 16745 - DNA, 2202 bp, Homo sapiens
ccgctggtccgccatcgcggacgcagcctcgtgccgggagtcgccgcattgtggtccgcttctctgcactatgtcgggtggcctcctgaaggcgctgcgcagcgactcctacgtggagctgagccagtaccgggaccagcacttccgggtgagggaggccgggccgcgagacgggaaggccctgggcaagaacgctgagaaacgggtgacaatgaagaacaagaaaaattactgaagaaaagctgtacgttatatgttggaaatctttctttttacacaactgaagaacaaatctatgaactcttcagcaaaagtggtgacataaagaaaatcattatgggtctggataaaatgaagaaaacagcatgtggattctgttttgtggaatattactcacgcgcagatgcggaaaacgccatgcggtacataaatgggacgcgtctggatgaccgaatcattcgcacagactgggacgcaggctttaaggagggcaggcaatacggccgtgggcgatctgggggccaggttcgggatgagtatcggcaggactacgatgctgggagaggaggctatggaaaactggcacagaaccagtgagtggtgagagctctgtcagtgacaaacactcctttggcctgttgaatttgctgaagaacatcacctaaagtctgcacacgagcccatttttaccaagatttgatcagtgtctttactgagctggaagcctctgaaagttattaaaggacagaatccaaaagaatgcctttaattcttgtctgagaatcttggccatgtgtcagattatcagaacaattttgttaccaggtcagaaattgtgttctttgacaacagattggatctgtaatgttgattagtctttagccataaccactacacttttagaaagacagaaaaatgtaagaatttgtttttaccataatgagtcttaagtaggttcatgatctacattggggcctgggattatttttttaattttaagtttgcatgagatagcctaataaatggaggtggggccaggcatggtggctcacacgtgtaatcccaacactttgggaggctgaggaggaaggatagcttgaggccaggagtttgagactagactgggcaacatagcaagaccccgtctctacaaagcaaaacgaaaaacaacaaatggagttgtgctatgttgtattgctttgcacaaaattaggaacaggtgtttgacaattgaatttgttttctgtgaattctaacctctaaaggcatgcttagaggtcaaggaccttcctgtgtagttggtgcaaaagcaatctccacaggacagcactgcttccatgcttcatacatcaggaaatgaggccagaacttgagtatttactaacacgtttttcaaaagatgtcagtgttatacctaaagctaaaaaaaagcaagggtttgtcatagagggaacctctaaataatttcaggggtaggggagatgttgtcaataggaaatgggataaaatatcaagagacaatgaaaacactgccttgacatgaggaccagcaagtttattcttttcattttcagtgatgttgggaatggactgggttttaaaagggagcttgaagagggaatgtttgacagtcacagaaggttcctgcagcagatgcctcttttagccatttctcatttttttcctcaaattttacctactgaggctcaagccttcacagtgagctgatggtctctacaggggaggggagtctagggaatttatttggtatttgtaaggcaagaggtgatttctctctaatatatctgagttattgctcatttaaaactgttaagtccagtataattttccctgatatgaaaaaatgtgcatttttttcacttagcaacaaagtaccttctaatttccaatagtccgtgaaagttggggctgaagtacctaagtgtgaatgtctctcccgttaaactgagtgtagaaatctgaatttttaaaagagctgtaactagttgtaagtgcttaggaagaaactttgcaaacatttaatgaggatacactgttcatttttaaaattccttcacactgtaatttaatgtgttttatattcttttgtagtaaaacaacataactcagatttctacaggagacagtggttttatttggattgtcttctgtaataggtttcaataaagctggatgaactta

SEQ ID NO: 16746 - DNA, 2142 bp, Homo sapiens
ctttgagggtgttcggatgtaaagatcggagaattgctggatttcagaagagggaaatttttagtccggactatatcacagtatattttgtggaaaaaggggaggcagcagatattcaaagtagacttttcagtatcagcggagggtgacaatgaagaacaagaaaaattactgaagaaaagctgtacgttatatgttggaaatctttctttttacacaactgaagaacaaatctatgaactcttcagcaaaagtggtgacataaagaaaatcattatgggtctggataaaatgaagaaaacagcatgtggattctgttttgtggaatattactcacgcgcagatgcggaaaacgccatgcggtacataaatgggacgcgtctggatgaccgaatcattcgcacagactgggacgcaggctttaaggagggcaggcaatacggccgtgggcgatctgggggccaggttcgggatgagtatcggcaggactacgatgctgggagaggaggctatggaaaactggcacagaaccagtgagtggtgagagctctgtcagtgacaaacactcctttggcctgttgaatttgctgaagaacatcacctaaagtctgcacacgagcccatttttaccaagatttgatcagtgtctttactgagctggaagcctctgaaagttattaaaggacagaatccaaaagaatgcctttaattcttgtctgagaatcttggccatgtgtcagattatcagaacaattttgttaccaggtcagaaattgtgttctttgacaacagattggatctgtaatgttgattagtctttagccataaccactacacttttagaaagacagaaaaatgtaagaatttgtttttaccataatgagtcttaagtaggttcatgatctacattggggcctgggattatttttttaattttaagtttgcatgagatagcctaataaatggaggtggggccaggcatggtggctcacacgtgtaatcccaacactttgggaggctgaggaggaaggatagcttgaggccaggagtttgagactagactgggcaacatagcaagaccccgtctctacaaagcaaaacgaaaaacaacaaatggagttgtgctatgttgtattgctttgcacaaaattaggaacaggtgtttgacaattgaatttgttttctgtgaattctaacctctaaaggcatgcttagaggtcaaggaccttcctgtgtagttggtgcaaaagcaatctccacaggacagcactgcttccatgcttcatacatcaggaaatgaggccagaacttgagtatttactaacacgtttttcaaaagatgtcagtgttatacctaaagctaaaaaaaagcaagggtttgtcatagagggaacctctaaataatttcaggggtaggggagatgttgtcaataggaaatgggataaaatatcaagagacaatgaaaacactgccttgacatgaggaccagcaagtttattcttttcattttcagtgatgttgggaatggactgggttttaaaagggagcttgaagagggaatgtttgacagtcacagaaggttcctgcagcagatgcctcttttagccatttctcatttttttcctcaaattttacctactgaggctcaagccttcacagtgagctgatggtctctacaggggaggggagtctagggaatttatttggtatttgtaaggcaagaggtgatttctctctaatatatctgagttattgctcatttaaaactgttaagtccagtataattttccctgatatgaaaaaatgtgcatttttttcacttagcaacaaagtaccttctaatttccaatagtccgtgaaagttggggctgaagtacctaagtgtgaatgtctctcccgttaaactgagtgtagaaatctgaatttttaaaagagctgtaactagttgtaagtgcttaggaagaaactttgcaaacatttaatgaggatacactgttcatttttaaaattccttcacactgtaatttaatgtgttttatattcttttgtagtaaaacaacataactcagatttctacaggagacagtggttttatttggattgtcttctgtaataggtttcaataaagctggatgaactta

SEQ ID NO: 16747 - DNA, 2637 bp, Homo sapiens
ccgctggtccgccatcgcggacgcagcctcgtgccgggagtcgccgcattgtggtccgcttctctgcactatgtcgggtggcctcctgaaggcgctgcgcagcgactcctacgtggagctgagccagtaccgggaccagcacttccgggtgagggaggccgggccgcgagacgggaaggccctgggcaagaacgctgagaaacggtttgctcttgtctcattgtgtcgcctcccattcagctgaaatccgcaaacgccaagtggggccccggtgcctgctggcgaggcagggaatgggtgctggaagggcgcttggatatcactgaagccacttgctctggaagacggggaactggaggctcgcttatcccattcgctcgcagccgctccctgtaccccagccagtgccgagaggtttgagcggtggtggtggtggcggctcccgtttccacggttgtgcctccgcagacgactacgtagcaagggggaggggtgcccttctctctcccagagtaggcagaggcgccttcctgatgcagatgcggggctttttgctttgttttttaaatcggcgaagcagtgcccttcggcgattcgggccccttctctgggaggatggtgttacggaagctgtacgcgggtgacaatgaagaacaagaaaaattactgaagaaaagctgtacgttatatgttggaaatctttctttttacacaactgaagaacaaatctatgaactcttcagcaaaagtggtgacataaagaaaatcattatgggtctggataaaatgaagaaaacagcatgtggattctgttttgtggaatattactcacgcgcagatgcggaaaacgccatgcggtacataaatgggacgcgtctggatgaccgaatcattcgcacagactgggacgcaggctttaaggagggcaggcaatacggccgtgggcgatctgggggccaggttcgggatgagtatcggcaggactacgatgctgggagaggaggctatggaaaactggcacagaaccagtgagtggtgagagctctgtcagtgacaaacactcctttggcctgttgaatttgctgaagaacatcacctaaagtctgcacacgagcccatttttaccaagatttgatcagtgtctttactgagctggaagcctctgaaagttattaaaggacagaatccaaaagaatgcctttaattcttgtctgagaatcttggccatgtgtcagattatcagaacaattttgttaccaggtcagaaattgtgttctttgacaacagattggatctgtaatgttgattagtctttagccataaccactacacttttagaaagacagaaaaatgtaagaatttgtttttaccataatgagtcttaagtaggttcatgatctacattggggcctgggattatttttttaattttaagtttgcatgagatagcctaataaatggaggtggggccaggcatggtggctcacacgtgtaatcccaacactttgggaggctgaggaggaaggatagcttgaggccaggagtttgagactagactgggcaacatagcaagaccccgtctctacaaagcaaaacgaaaaacaacaaatggagttgtgctatgttgtattgctttgcacaaaattaggaacaggtgtttgacaattgaatttgttttctgtgaattctaacctctaaaggcatgcttagaggtcaaggaccttcctgtgtagttggtgcaaaagcaatctccacaggacagcactgcttccatgcttcatacatcaggaaatgaggccagaacttgagtatttactaacacgtttttcaaaagatgtcagtgttatacctaaagctaaaaaaaagcaagggtttgtcatagagggaacctctaaataatttcaggggtaggggagatgttgtcaataggaaatgggataaaatatcaagagacaatgaaaacactgccttgacatgaggaccagcaagtttattcttttcattttcagtgatgttgggaatggactgggttttaaaagggagcttgaagagggaatgtttgacagtcacagaaggttcctgcagcagatgcctcttttagccatttctcatttttttcctcaaattttacctactgaggctcaagccttcacagtgagctgatggtctctacaggggaggggagtctagggaatttatttggtatttgtaaggcaagaggtgatttctctctaatatatctgagttattgctcatttaaaactgttaagtccagtataattttccctgatatgaaaaaatgtgcatttttttcacttagcaacaaagtaccttctaatttccaatagtccgtgaaagttggggctgaagtacctaagtgtgaatgtctctcccgttaaactgagtgtagaaatctgaatttttaaaagagctgtaactagttgtaagtgcttaggaagaaactttgcaaacatttaatgaggatacactgttcatttttaaaattccttcacactgtaatttaatgtgttttatattcttttgtagtaaaacaacataactcagatttctacaggagacagtggttttatttggattgtcttctgtaataggtttcaataaagctggatgaactta

SEQ ID NO: 16748 - DNA, 2004 bp, Homo sapiens
ccgctggtccgccatcgcggacgcagcctcgtgccgggagtcgccgcattgtggtccgcttctctgcactatgtcgggtggcctcctgaaggcgctgcgcagcgactcctacgtggagctgagccagtaccgggaccagcacttccggggtgacaatgaagaacaagaaaaattactgaagaaaagctatattactcacgcgcagatgcggaaaacgccatgcggtacataaatgggacgcgtctggatgaccgaatcattcgcacagactgggacgcaggctttaaggagggcaggcaatacggccgtgggcgatctgggggccaggttcgggatgagtatcggcaggactacgatgctgggagaggaggctatggaaaactggcacagaaccagtgagtggtgagagctctgtcagtgacaaacactcctttggcctgttgaatttgctgaagaacatcacctaaagtctgcacacgagcccatttttaccaagatttgatcagtgtctttactgagctggaagcctctgaaagttattaaaggacagaatccaaaagaatgcctttaattcttgtctgagaatcttggccatgtgtcagattatcagaacaattttgttaccaggtcagaaattgtgttctttgacaacagattggatctgtaatgttgattagtctttagccataaccactacacttttagaaagacagaaaaatgtaagaatttgtttttaccataatgagtcttaagtaggttcatgatctacattggggcctgggattatttttttaattttaagtttgcatgagatagcctaataaatggaggtggggccaggcatggtggctcacacgtgtaatcccaacactttgggaggctgaggaggaaggatagcttgaggccaggagtttgagactagactgggcaacatagcaagaccccgtctctacaaagcaaaacgaaaaacaacaaatggagttgtgctatgttgtattgctttgcacaaaattaggaacaggtgtttgacaattgaatttgttttctgtgaattctaacctctaaaggcatgcttagaggtcaaggaccttcctgtgtagttggtgcaaaagcaatctccacaggacagcactgcttccatgcttcatacatcaggaaatgaggccagaacttgagtatttactaacacgtttttcaaaagatgtcagtgttatacctaaagctaaaaaaaagcaagggtttgtcatagagggaacctctaaataatttcaggggtaggggagatgttgtcaataggaaatgggataaaatatcaagagacaatgaaaacactgccttgacatgaggaccagcaagtttattcttttcattttcagtgatgttgggaatggactgggttttaaaagggagcttgaagagggaatgtttgacagtcacagaaggttcctgcagcagatgcctcttttagccatttctcatttttttcctcaaattttacctactgaggctcaagccttcacagtgagctgatggtctctacaggggaggggagtctagggaatttatttggtatttgtaaggcaagaggtgatttctctctaatatatctgagttattgctcatttaaaactgttaagtccagtataattttccctgatatgaaaaaatgtgcatttttttcacttagcaacaaagtaccttctaatttccaatagtccgtgaaagttggggctgaagtacctaagtgtgaatgtctctcccgttaaactgagtgtagaaatctgaatttttaaaagagctgtaactagttgtaagtgcttaggaagaaactttgcaaacatttaatgaggatacactgttcatttttaaaattccttcacactgtaatttaatgtgttttatattcttttgtagtaaaacaacataactcagatttctacaggagacagtggttttatttggattgtcttctgtaataggtttcaataaagctggatgaactta

SEQ ID NO: 16749 - DNA, 2097 bp, Homo sapiens
gacggtaactgacctgagccaataaggcgtgacgaaacggggtgtacagattgagatgaacaatgaatcaatttacctgaagcacaaagggcatgattcgtgtatctggtaggaaatgcttgctttctaacacaacttgaagaacgaccactctatgaactcttcagtcctgagtggtgtaccataatggaagatatcagttgagtgcggttctggagtatctatgcaagcaagagacatgccattctggatctctggattttcgtgctatatagtctcacatattactcacgcgcagatgcggaaaacgccatgcggtacataaatgggacgcgtctggatgaccgaatcattcgcacagactgggacgcaggctttaaggagggcaggcaatacggccgtgggcgatctgggggccaggttcgggatgagtatcggcaggactacgatgctgggagaggaggctatggaaaactggcacagaaccagtgagtggtgagagctctgtcagtgacaaacactcctttggcctgttgaatttgctgaagaacatcacctaaagtctgcacacgagcccatttttaccaagatttgatcagtgtctttactgagctggaagcctctgaaagttattaaaggacagaatccaaaagaatgcctttaattcttgtctgagaatcttggccatgtgtcagattatcagaacaattttgttaccaggtcagaaattgtgttctttgacaacagattggatctgtaatgttgattagtctttagccataaccactacacttttagaaagacagaaaaatgtaagaatttgtttttaccataatgagtcttaagtaggttcatgatctacattggggcctgggattatttttttaattttaagtttgcatgagatagcctaataaatggaggtggggccaggcatggtggctcacacgtgtaatcccaacactttgggaggctgaggaggaaggatagcttgaggccaggagtttgagactagactgggcaacatagcaagaccccgtctctacaaagcaaaacgaaaaacaacaaatggagttgtgctatgttgtattgctttgcacaaaattaggaacaggtgtttgacaattgaatttgttttctgtgaattctaacctctaaaggcatgcttagaggtcaaggaccttcctgtgtagttggtgcaaaagcaatctccacaggacagcactgcttccatgcttcatacatcaggaaatgaggccagaacttgagtatttactaacacgtttttcaaaagatgtcagtgttatacctaaagctaaaaaaaagcaagggtttgtcatagagggaacctctaaataatttcaggggtaggggagatgttgtcaataggaaatgggataaaatatcaagagacaatgaaaacactgccttgacatgaggaccagcaagtttattcttttcattttcagtgatgttgggaatggactgggttttaaaagggagcttgaagagggaatgtttgacagtcacagaaggttcctgcagcagatgcctcttttagccatttctcatttttttcctcaaattttacctactgaggctcaagccttcacagtgagctgatggtctctacaggggaggggagtctagggaatttatttggtatttgtaaggcaagaggtgatttctctctaatatatctgagttattgctcatttaaaactgttaagtccagtataattttccctgatatgaaaaaatgtgcatttttttcacttagcaacaaagtaccttctaatttccaatagtccgtgaaagttggggctgaagtacctaagtgtgaatgtctctcccgttaaactgagtgtagaaatctgaatttttaaaagagctgtaactagttgtaagtgcttaggaagaaactttgcaaacatttaatgaggatacactgttcatttttaaaattccttcacactgtaatttaatgtgttttatattcttttgtagtaaaacaacataactcagatttctacaggagacagtggttttatttggattgtcttctgtaataggtttcaataaagctggatgaactta

SEQ ID NO: 16750 - DNA, 2240 bp, Homo sapiens
ccgctggtccgccatcgcggacgcagcctcgtgccgggagtcgccgcattgtggtccgcttctctgcactatgtcgggtggcctcctgaaggcgctgcgcagcgactcctacgtggagctgagccagtaccgggaccagcacttccggggtgacaatgaagaacaagaaaaattactgaagaaaagctgtacgttatatgttggaaatctttctttttacacaactgaagaacaaatctatgaactcttcagcaaaagtggtgacataaagaaaatcattatgggtctggataaaatgaagaaaacagcatgtggattctgttttgtggaatattactcacgcgcagatgcggaaaacgccatgcggtacataaatgggacgcgtctggatgaccgaatcattcgcacagactgggacgcaggctttaaggagggcaggcaatacggccgtgggcgatctgggggccaggttcgggatgagtatcggcaggactacgatgctgggagaggaggctatggaaaactggcacagaaccagtgagtggtgagagctctgtcagtgacaaacactcctttggcctgttgaatttgctgaagaacatcacctaaagtctgcacacgagcccatttttaccaagatttgatcagtgtctttactgagctggaagcctctgaaagttattaaaggacagaatccaaaagaatgcctttaattcttgtctgagaatcttggccatgtgtcagattatcagaacaattttgttaccaggtcagaaattgtgttctttgacaacagattggatctgtaatgttgattagtctttagccataaccactacacttttagaaagacagaaaaatgtaagaatttgtttttaccataatgagtcttaagtaggttcatgatctacattggggcctgggattatttttttaattttaagtttgcatgagatagcctaataaatggaggtggggccaggcatggtggctcacacgtgtaatcccaacactttgggaggctgaggaggaaggatagcttgaggccaggagtttgagactagactgggcaacatagcaagaccccgtctctacaaagcaaaacgaaaaacaacaaatggagttgtgctatgttgtattgctttgcacaaaattaggaacaggtgtttgacaattgaatttgttttctgtgaattctaacctctaaaggcatgcttagaggtcaaggaccttcctgtgtagttggtgcaaaagcaatctccacaggacagcactgcttccatgcttcatacatcaggaaatgaggccagaacttgagtatttactaacacgtttttcaaaagatgtcagtgttatacctaaagctaaaaaaaagcaagggtttgtcatagagggaacctctaaataatttcaggggtaggggagatgttgtcaataggaaatgggataaaatatcaagagacaatgaaaacactgccttgacatgaggaccagcaagtttattcttttcattttcagtgatgttgggaatggactgggttttaaaagggagcttgaagagggaatgtttgacagtcacagaaggttcctgcagcagatgcctcttttagccatttctcatttttttcctcaaattttacctactgaggctcaagccttcacagtgagctgatggtctctacaggggaggggagtctagggaatttatttggtatttgtaaggcaagaggtgatttctctctaatatatctgagttattgctcatttaaaactgttaagtccagtataattttccctgatatgaaaaaatgtgcatttttttcacttagcaacaaagtaccttctaatttccaatagtccgtgaaagttggggctgaagtacctaagtgtgaatgtctctcccgttaaactgagtgtagaaatctgaatttttaaaagagctgtaactagttgtaagtgcttaggaagaaactttgcaaacatttaatgaggatacactgttcatttttaaaattccttcacactgtaatttaatgtgttttatattcttttgtagtaaaacaacataactcagatttctacaggagacagtggttttatttggattgtcttctgtaataggtttcaataaagctggatgaacttatatcgttgttgctgcctgtttcctggcctataaagagggttgtgttctggaattcctgtactctggatacacatgaatgagttccagggggatt

SEQ ID NO: 16751 - DNA, 2269 bp, Homo sapiens
  misc_feature (2269)..(2269): n is a, c, g, or t
ccgctggtccgccatcgcggacgcagcctcgtgccgggagtcgccgcattgtggtccgcttctctgcactatgtcgggtggcctcctgaaggcgctgcgcagcgactcctacgtggagctgagccagtaccgggaccagcacttccggggtgacaatgaagaacaagaaaaattactgaagaaaagctgtacgttatatgttggaaatctttctttttacacaactgaagaacaaatctatgaactcttcagcaaaagtggtgacataaagaaaatcattatgggtctggataaaatgaagaaaacagcatgtggattctgttttgtggaatattactcacgcgcagatgcggaaaacgccatgcggtacataaatgggacgcgtctggatgaccgaatcattcgcacagactgggacgcaggctttaaggagggcaggcaatacggccgtgggcgatctgggggccaggttcgggatgagtatcggcaggactacgatgctgggagaggaggctatggaaaactggcacagaaccagtgagtggtgagagctctgtcagtgacaaacactcctttggcctgttgaatttgctgaagaacatcacctaaagtctgcacacgagcccatttttaccaagatttgatcagtgtctttactgagctggaagcctctgaaagttattaaaggacagaatccaaaagaatgcctttaattcttgtctgagaatcttggccatgtgtcagattatcagaacaattttgttaccaggtcagaaattgtgttctttgacaacagattggatctgtaatgttgattagtctttagccataaccactacacttttagaaagacagaaaaatgtaagaatttgtttttaccataatgagtcttaagtaggttcatgatctacattggggcctgggattatttttttaattttaagtttgcatgagatagcctaataaatggaggtggggccaggcatggtggctcacacgtgtaatcccaacactttgggaggctgaggaggaaggatagcttgaggccaggagtttgagactagactgggcaacatagcaagaccccgtctctacaaagcaaaacgaaaaacaacaaatggagttgtgctatgttgtattgctttgcacaaaattaggaacaggtgtttgacaattgaatttgttttctgtgaattctaacctctaaaggcatgcttagaggtcaaggaccttcctgtgtagttggtgcaaaagcaatctccacaggacagcactgcttccatgcttcatacatcaggaaatgaggccagaacttgagtatttactaacacgtttttcaaaagatgtcagtgttatacctaaagctaaaaaaaagcaagggtttgtcatagagggaacctctaaataatttcaggggtaggggagatgttgtcaataggaaatgggataaaatatcaagagacaatgaaaacactgccttgacatgaggaccagcaagtttattcttttcattttcagtgatgttgggaatggactgggttttaaaagggagcttgaagagggaatgtttgacagtcacagaaggttcctgcagcagatgcctcttttagccatttctcatttttttcctcaaattttacctactgaggctcaagccttcacagtgagctgatggtctctacaggggaggggagtctagggaatttatttggtatttgtaaggcaagaggtgatttctctctaatatatctgagttattgctcatttaaaactgttaagtccagtataattttccctgatatgaaaaaatgtgcatttttttcacttagcaacaaagtaccttctaatttccaatagtccgtgaaagttggggctgaagtacctaagtgtgaatgtctctcccgttaaactgagtgtagaaatctgaatttttaaaagagctgtaactagttgtaagtgcttaggaagaaactttgcaaacatttaatgaggatacactgttcatttttaaaattccttcacactgtaatttaatgtgttttatattcttttgtagtaaaacaacataactcagatttctacaggagacagtggttttatttggattgtcttctgtaataggtttcaataaagctggatgaacttaactttaccaacaacccacaagaccagcaccaacacaaaccacgacacaaccacgcaaccacacaaaaatagcacaagcagacacccaccacacacacgcaccagcaacaccgcacgagcaccn

SEQ ID NO: 16752 - DNA, 1909 bp, Homo sapiens
ctaacaagcaaccattcttgaacttctgctagggctaggtatcttccacctgcaggaacatctaaaatgaaagcaaaacgcactgaagtgagctgaagtgcatatgtcctgcttgaaatgttcacattgtggcatctgaacaggtttcactgtttgtctaacatgtttgtgggaggcatatttgttacaccattcttttccatactgtaactctggattctttccattaaaggttcgggatgagtatcggcaggactacgatgctgggagaggaggctatggaaaactggcacagaaccagtgagtggtgagagctctgtcagtgacaaacactcctttggcctgttgaatttgctgaagaacatcacctaaagtctgcacacgagcccatttttaccaagatttgatcagtgtctttactgagctggaagcctctgaaagttattaaaggacagaatccaaaagaatgcctttaattcttgtctgagaatcttggccatgtgtcagattatcagaacaattttgttaccaggtcagaaattgtgttctttgacaacagattggatctgtaatgttgattagtctttagccataaccactacacttttagaaagacagaaaaatgtaagaatttgtttttaccataatgagtcttaagtaggttcatgatctacattggggcctgggattatttttttaattttaagtttgcatgagatagcctaataaatggaggtggggccaggcatggtggctcacacgtgtaatcccaacactttgggaggctgaggaggaaggatagcttgaggccaggagtttgagactagactgggcaacatagcaagaccccgtctctacaaagcaaaacgaaaaacaacaaatggagttgtgctatgttgtattgctttgcacaaaattaggaacaggtgtttgacaattgaatttgttttctgtgaattctaacctctaaaggcatgcttagaggtcaaggaccttcctgtgtagttggtgcaaaagcaatctccacaggacagcactgcttccatgcttcatacatcaggaaatgaggccagaacttgagtatttactaacacgtttttcaaaagatgtcagtgttatacctaaagctaaaaaaaagcaagggtttgtcatagagggaacctctaaataatttcaggggtaggggagatgttgtcaataggaaatgggataaaatatcaagagacaatgaaaacactgccttgacatgaggaccagcaagtttattcttttcattttcagtgatgttgggaatggactgggttttaaaagggagcttgaagagggaatgtttgacagtcacagaaggttcctgcagcagatgcctcttttagccatttctcatttttttcctcaaattttacctactgaggctcaagccttcacagtgagctgatggtctctacaggggaggggagtctagggaatttatttggtatttgtaaggcaagaggtgatttctctctaatatatctgagttattgctcatttaaaactgttaagtccagtataattttccctgatatgaaaaaatgtgcatttttttcacttagcaacaaagtaccttctaatttccaatagtccgtgaaagttggggctgaagtacctaagtgtgaatgtctctcccgttaaactgagtgtagaaatctgaatttttaaaagagctgtaactagttgtaagtgcttaggaagaaactttgcaaacatttaatgaggatacactgttcatttttaaaattccttcacactgtaatttaatgtgttttatattcttttgtagtaaaacaacataactcagatttctacaggagacagtggttttatttggattgtcttctgtaataggtttcaataaagctggatgaactta

SEQ ID NO: 16753 - DNA, 2103 bp, Homo sapiens
ccgctggtccgccatcgcggacgcagcctcgtgccgggagtcgccgcattgtggtccgcttctctgcactatgtcgggtggcctcctgaaggcgctgcgcagcgactcctacgtggagctgagccagtaccgggaccagcacttccggggtgacaatgaagaacaagaaaaattactgaagaaaagctgtacgttatatgttggaaatctttctttttacacaactgaagaacaaatctatgaactcttcagcaaaagtggtgacataaagaaaatcattatgggtctggataaaatgaagaaaacagcatgtggattctgttttgtggaatattactcacgcgcagatgcggaaaacgccatgcggtacataaatgggacgcgtctggatgaccgaatcattcgcacagactgggacgcaggctttaaggagggcaggcaatacggccgtgggcgatctgggggccaggttcgggatgagtatcggcaggactacgatgctgggagaggaggctatggaaaactggcactttggcctgttgaatttgctgaagaacatcacctaaagtctgcacacgagcccatttttaccaagatttgatcagtgtctttactgagctggaagcctctgaaagttattaaaggacagaatccaaaagaatgcctttaattcttgtctgagaatcttggccatgtgtcagattatcagaacaattttgttaccaggtcagaaattgtgttctttgacaacagattggatctgtaatgttgattagtctttagccataaccactacacttttagaaagacagaaaaatgtaagaatttgtttttaccataatgagtcttaagtaggttcatgatctacattggggcctgggattatttttttaattttaagtttgcatgagatagcctaataaatggaggtggggccaggcatggtggctcacacgtgtaatcccaacactttgggaggctgaggaggaaggatagcttgaggccaggagtttgagactagactgggcaacatagcaagaccccgtctctacaaagcaaaacgaaaaacaacaaatggagttgtgctatgttgtattgctttgcacaaaattaggaacaggtgtttgacaattgaatttgttttctgtgaattctaacctctaaaggcatgcttagaggtcaaggaccttcctgtgtagttggtgcaaaagcaatctccacaggacagcactgcttccatgcttcatacatcaggaaatgaggccagaacttgagtatttactaacacgtttttcaaaagatgtcagtgttatacctaaagctaaaaaaaagcaagggtttgtcatagagggaacctctaaataatttcaggggtaggggagatgttgtcaataggaaatgggataaaatatcaagagacaatgaaaacactgccttgacatgaggaccagcaagtttattcttttcattttcagtgatgttgggaatggactgggttttaaaagggagcttgaagagggaatgtttgacagtcacagaaggttcctgcagcagatgcctcttttagccatttctcatttttttcctcaaattttacctactgaggctcaagccttcacagtgagctgatggtctctacaggggaggggagtctagggaatttatttggtatttgtaaggcaagaggtgatttctctctaatatatctgagttattgctcatttaaaactgttaagtccagtataattttccctgatatgaaaaaatgtgcatttttttcacttagcaacaaagtaccttctaatttccaatagtccgtgaaagttggggctgaagtacctaagtgtgaatgtctctcccgttaaactgagtgtagaaatctgaatttttaaaagagctgtaactagttgtaagtgcttaggaagaaactttgcaaacatttaatgaggatacactgttcatttttaaaattccttcacactgtaatttaatgtgttttatattcttttgtagtaaaacaacataactcagatttctacaggagacagtggttttatttggattgtcttctgtaataggtttcaataaagctggatgaactta

SEQ ID NO: 16754 - DNA, 1661 bp, Homo sapiens
aagctgaggaccatcgttgcaacgatggtcctcagctaattcaacagaaccagtgagtggtgagagctctgtcagtgacaaacactcctttggcctgttgaatttgctgaagaacatcacctaaagtctgcacacgagcccatttttaccaagatttgatcagtgtctttactgagctggaagcctctgaaagttattaaaggacagaatccaaaagaatgcctttaattcttgtctgagaatcttggccatgtgtcagattatcagaacaattttgttaccaggtcagaaattgtgttctttgacaacagattggatctgtaatgttgattagtctttagccataaccactacacttttagaaagacagaaaaatgtaagaatttgtttttaccataatgagtcttaagtaggttcatgatctacattggggcctgggattatttttttaattttaagtttgcatgagatagcctaataaatggaggtggggccaggcatggtggctcacacgtgtaatcccaacactttgggaggctgaggaggaaggatagcttgaggccaggagtttgagactagactgggcaacatagcaagaccccgtctctacaaagcaaaacgaaaaacaacaaatggagttgtgctatgttgtattgctttgcacaaaattaggaacaggtgtttgacaattgaatttgttttctgtgaattctaacctctaaaggcatgcttagaggtcaaggaccttcctgtgtagttggtgcaaaagcaatctccacaggacagcactgcttccatgcttcatacatcaggaaatgaggccagaacttgagtatttactaacacgtttttcaaaagatgtcagtgttatacctaaagctaaaaaaaagcaagggtttgtcatagagggaacctctaaataatttcaggggtaggggagatgttgtcaataggaaatgggataaaatatcaagagacaatgaaaacactgccttgacatgaggaccagcaagtttattcttttcattttcagtgatgttgggaatggactgggttttaaaagggagcttgaagagggaatgtttgacagtcacagaaggttcctgcagcagatgcctcttttagccatttctcatttttttcctcaaattttacctactgaggctcaagccttcacagtgagctgatggtctctacaggggaggggagtctagggaatttatttggtatttgtaaggcaagaggtgatttctctctaatatatctgagttattgctcatttaaaactgttaagtccagtataattttccctgatatgaaaaaatgtgcatttttttcacttagcaacaaagtaccttctaatttccaatagtccgtgaaagttggggctgaagtacctaagtgtgaatgtctctcccgttaaactgagtgtagaaatctgaatttttaaaagagctgtaactagttgtaagtgcttaggaagaaactttgcaaacatttaatgaggatacactgttcatttttaaaattccttcacactgtaatttaatgtgttttatattcttttgtagtaaaacaacataactcagatttctacaggagacagtggttttatttggattgtcttctgtaataggtttcaataaagctggatgaactta

SEQ ID NO: 16755 - DNA, 1240 bp, Homo sapiens
tcacggattactcaatgggacaatattgcaagtacacatgttgtatataaaatctatttttaaaaatctaaaatgggcatggtggctcacacgtgtaatcccaacactttgggaggctgaggaggaaggatagcttgaggccaggagtttgagactagactgggcaacatagcaagaccccgtctctacaaagcaaaacgaaaaacaacaaatggagttgtgctatgttgtattgctttgcacaaaattaggaacaggtgtttgacaattgaatttgttttctgtgaattctaacctctaaaggcatgcttagaggtcaaggaccttcctgtgtagttggtgcaaaagcaatctccacaggacagcactgcttccatgcttcatacatcaggaaatgaggccagaacttgagtatttactaacacgtttttcaaaagatgtcagtgttatacctaaagctaaaaaaaagcaagggtttgtcatagagggaacctctaaataatttcaggggtaggggagatgttgtcaataggaaatgggataaaatatcaagagacaatgaaaacactgccttgacatgaggaccagcaagtttattcttttcattttcagtgatgttgggaatggactgggttttaaaagggagcttgaagagggaatgtttgacagtcacagaaggttcctgcagcagatgcctcttttagccatttctcatttttttcctcaaattttacctactgaggctcaagccttcacagtgagctgatggtctctacaggggaggggagtctagggaatttatttggtatttgtaaggcaagaggtgatttctctctaatatatctgagttattgctcatttaaaactgttaagtccagtataattttccctgatatgaaaaaatgtgcatttttttcacttagcaacaaagtaccttctaatttccaatagtccgtgaaagttggggctgaagtacctaagtgtgaatgtctctcccgttaaactgagtgtagaaatctgaatttttaaaagagctgtaactagttgtaagtgcttaggaagaaactttgcaaacatttaatgaggatacactgttcatttttaaaattccttcacactgtaatttaatgtgttttatattcttttgtagtaaaacaacataactcagatttctacaggagacagtggttttatttggattgtcttctgtaataggtttcaataaagctggatgaactta

SEQ ID NO: 16756 - DNA, 564 bp, Homo sapiens
  misc_feature (3)..(3): n is a, c, g, or t
  misc_feature (12)..(12): n is a, c, g, or t
  misc_feature (26)..(26): n is a, c, g, or t
  misc_feature (37)..(37): n is a, c, g, or t
aanggactgggntttttatttagctngaagagggaangtttttttcctcaaattttacctactgaggctcaagccttcacagtgagctgatggtctctacaggggaggggagtctagggaatttatttggtatttgtaaggcaagaggtgatttctctctaatatatctgagttattgctcatttaaaactgttaagtccagtataattttccctgatatgaaaaaatgtgcatttttttcacttagcaacaaagtaccttctaatttccaatagtccgtgaaagttggggctgaagtacctaagtgtgaatgtctctcccgttaaactgagtgtagaaatctgaatttttaaaagagctgtaactagttgtaagtgcttaggaagaaactttgcaaacatttaatgaggatacactgttcatttttaaaattccttcacactgtaatttaatgtgttttatattcttttgtagtaaaacaacataactcagatttctacaggagacagtggttttatttggattgtcttctgtaataggtttcaataaagctggatgaactta

SEQ ID NO: 16757 - DNA, 499 bp, Homo sapiens
atctagaggatcccgttcaacttctacagccactacagggaggggagtctagggaatttatttggtatttgtaaggcaagaggtgatttctctctaatatatctgagttattgctcatttaaaactgttaagtccagtataattttccctgatatgaaaaaatgtgcatttttttcacttagcaacaaagtaccttctaatttccaatagtccgtgaaagttggggctgaagtacctaagtgtgaatgtctctcccgttaaactgagtgtagaaatctgaatttttaaaagagctgtaactagttgtaagtgcttaggaagaaactttgcaaacatttaatgaggatacactgttcatttttaaaattccttcacactgtaatttaatgtgttttatattcttttgtagtaaaacaacataactcagatttctacaggagacagtggttttatttggattgtcttctgtaataggtttcaataaagctggatgaactta

SEQ ID NO: 16758 - DNA, 694 bp, Homo sapiens
ccgctggtccgccatcgcggacgcagcctcgtgccgggagtcgccgcattgtggtccgcttctctgcactatgtcgggtggcctcctgaaggcgctgcgcagcgactcctacgtggagctgagccagtaccgggaccagcacttccggggtgacaatgaagaacaagaaaaattactgaagaaaagctgtacgttatatgttggaaatctttctttttacacaactgaagaacaaatctatgaactcttcagcaaaagtggtgacataaagaaaatcattatgggtctggataaaatgaagaaaacagcatgtggattctgttttgtggaatattactcacgcgcagatgcggaaaacgccatgcggtacataaatgggacgcgtctggatgaccgaatcattcgcacagactgggacgcaggctttaaggagggcaggcaatacggccgtgggcgatctgggggccaggttcgggatgagtatcggcaggactacgatgctgggagaggaggctatggaaaactggcacagaaccagtgagtggtgagagctctgtcagtgacaaacactcctttggcctgttgaatttgctgaagaacatcacctaaagtctgcacacgagcccatttttaccaagatttgatcagtgtcttaccagcttcatgcgggtaccggccgatcgacgtggggaaa

SEQ ID NO: 16759 - DNA, 789 bp, Homo sapiens
  misc_feature (749)..(749): n is a, c, g, or t
  misc_feature (777)..(777): n is a, c, g, or t
  misc_feature (781)..(781): n is a, c, g, or t
ccgctggtccgccatcgcggacgcagcctcgtgccgggagtcgccgcattgtggtccgcttctctgcactatgtcgggtggcctcctgaaggcgctgcgcagcgactcctacgtggagctgagccagtaccgggaccagcacttccggggtgacaatgaagaacaagaaaaattactgaagaaaagctatattactcacgcgcagatgcggaaaacgccatgcggtacataaatgggacgcgtctggatgaccgaatcattcgcacagactgggacgcaggctttaaggagggcaggcaatacggccgtgggcgatctgggggccaggttcgggatgagtatcggcaggactacgatgctgggagaggaggctatggaaaactggcacagaaccagtgagtggtgagagctctgtcagtgacaaacactcctttggcctgttgaatttgctgaagaacatcacctaaagtctgcacacgagcccatttttaccaagatttgatcagtgtctttactgagctggaagcctctgaaagttattaaaggacagaatccaaaagaatgcctttaattcttgtctgagaatcttggccatgtgtcagattatcagaacaattttgttaccaggtcagaaattgtgttctttgacaacagattggatctgtaatgttgattagtctttagccataaccactacacttttagaaagacagaaaaatgtaagaatttgtttttaccataatgagttncccttttttttaaaaaaaggggtttttnaaangggggggg

SEQ ID NO: 16760 - DNA, 4665 bp, Homo sapiens
  misc_feature (3148)..(3148): n is a, c, g, or t
  misc_feature (3242)..(3242): n is a, c, g, or t
gcgcggccgggactttggctttgacaccgactgcgagcgggagccgtgcggctggtgctgggtctggactggctctggcggatccccgcccgagttgggcgcaggactttttgccggggtaaacgcaactgcggcggcgccgccgcaagccccggtgcagcctcggcggcgggtttcgccgccgctgccgccgcctccgagcagccctgcggcttctattcactctgggagagcgatgctaagtttctcccatagaaagagccgggacacgcagaccgaagcggcgtagtcggcttccagggcctgaccagtgacccacacccgcgcggacgcctaggctggaggcagggggcccgtgctgtcccgggctgggctcaggcttccgagccgcaggtggaagaggaaccggcgccccgcagagcggccgagaggcggccaagtgaaaggtaattttggacacgccaggcatggaagattcggtgtttgtctatagtaacctcttcagtccctgaatcctgcaccttccgtttttctgtgcttgtacggcctactgggcttcctccctagccagagagctcttctgcagtggtgcggccttcccgggagcctgatcctggcggaccatggggagcaccctgggctgccaccgctccatccccagggacccctcggacctgtcccatagccgcaagttcagcgcagcctgtaacttcagcaacattctagtgaatcaggagcggctcaacatcaacactgccacggaggaggagctgatgaccctgcctggggtgacgcgtgccgtggcacgcagcatcgtggagtaccgagagtatatcggtggcttcaagaaggtggaggacctggcattggtcagtggtgtaggcgccaccaagctggagcaggtcaagtttgagatctgtgtgagcagcaagggcagctcagcgcagcactctcccagttccctgcggcgggacctgctagcggagcagcagcctcaccacctggccacagctgtgcccctcaccccacgtgttaacatcaacacagccaccccggcccagctcatgagcgtgcgaggcctctcggagaaaatggccctcagcatcgtggacttccgccgtgagcatgggccctttcgcagcgttgaggacctagtgaggatggatggtatcaatgccgccttcctggacaggatccggcaccaggtgtttgctgagaggtccaggcccccatccacccacacgaacgggggactgaccttcaccgccaagcctcacccgagccccacttccctgagcctgcagagtgaggacctggacctgccgccaggggggcccacccagattatctccactcggccgtccgtggaggcctttggaggcacaagggatgggaggcctgtgctgaggctggccacctggaacttgcagggctgttccgtggagaaggccaacaaccccggggtgcgagaggtggtgtgcatgacactcctggaaaacagcatcaagcttctagctgtgcaagaactgcttgacagagaggccttggaaaagttctgcacggagctaaaccagccgaccctgcccaacatccgcaagtggaaggggccccggggatgctggaaggctgttgttgctgagaagccctcgaatcagctccagaagggagctgggtatgcaggattcctatgggacgcggctgccggcatggagctgagagacgcgggttcacaggagagctcgccaagcaacgggcacgggaagctggcgggccccagcccatacctcgggaggttcaaggtgggaagtcacgacctgacccttgttaaccttcacctggcagccctgaccctcctggggagcgagaatcccagcaagaatcacagtgatggccaccggttggcgagctttgcacagaccctacaggaaaccctgaaaggagaaaaggatgtcattatcttaggggattttggccaagggccagacagcaatgactatgatatcctgaggaaagaaaagttccaccacctgatccccgcgcacaccttcaccaacatcagcaccaagaaccctcaaggctcgaagtctctggacaacatctggatcagtaaaagcttaaagaaggttttcacaggtcactgggctgtggtgagagaaggcctcacgaacccttggattccggataactggtcttggggcggggtggcttctgaacactgcccagtgctagccgagttctacactgaaaaggactggagcaagaaggacgcccctcggaacggcagcggggtggccttggagcgaagtgaagccaacatcaagcacgagcgatgatgacaccaaatccatgtgtccaccctgggacccaggagggcacagccaaggaatgagccctgtggggtgacgcttcagggcagagctgccttttaatttttattctcagagcatcagcacttgaggccttgccccacgccttctctgtggaccattcaggacctccagtgggggtggcgtgccaggcgcgtaccccaccaggtgggcaaagcagaaacctgcggggagcggagacgccttttatctctggatgccacagacctgagcagcattgggctggctgtccgctgctgactggatggcagcacaaagacaatatgagcagagggaggagaagaaggggtgctcaggctgcgggccacagtccagcagcgccagaagcactcatttctgaccaccaggctatgacgttcctgctgcgcattacagaaagcttttaactgtgatcaggcagtctgctcagatacattgagtggcgatttttagttttgttttgaaaaaataaacagattaacctgcctcgctgcagtgagagcatgggacaagtccgccacagccctcccccgcccccttcccccgccccccaacgcgcagtgtgtatttgcaccacggcaggtgcctctgtgtggagctagggtcaagccctgagcagcttcacttcccctgcgccttttatgtccccaccttgaggccttgcagaggcgcctctcaaggccccatcagctcgccgggacctctgtgaagcctctctgtcatctccccttcccagcccctccttcatcccctgcctccttcaccagcctggcttttgcctngagcactatttgtttagttctctttgcaggacaagaattctctcagggtggtatcacctcctccctcctccccactcactccagtttttagccnggagcctcctgtggttgactatcaggaatgtgtgctgtgtcaggatacataggaagttgacctcggggtatcatggagagtgtccctcctagtggctggaggtagggacagttggttgtggggctggagagaggttgtggggaggaagcgaggatgcgtgcctgccactaggcatctgcatccccgagcccaagccaggagggatttcccttaggcaacaccatcccagggagatctgccacaatttgcgtttcacagctgaagacgccgaggcttagagagctcgacctcctcaaggtcacaccactgggtaaatagagggatgcagactcaggttttgctatgtgctcacatttcaactttatgcttaacatgaatggaaaaatatgaaagtaaatagtgaaaaggtgagttatgagcttagattacctagattattccagtatcccatggaagctgaggacttattccgctttccacaccgaacactaaatgtggaccagtatcaagaaccctcctgtccccacgcagtgtaaacccagtggcttctctgacctggagctgatgggccgtgaagggggcccatttttctccaaaggccatccttttggggccacctggctccaaggagcatcgctggtcttggggacgggaagggaaccctcttccaggagctctaagggtacttgggaatcaattgtgtccattctgaggtctctccagtgggagggcggcagctcctgtccctgggttcaggctgtgcttctggaagcatcgaaatgggatgtctgagccttgaggaaaagcagcagggttagcattaaagtcaagaggggcagctcaggatgctaccagggagcacatcgtttctggtgcctcatctaaaggtaaaacctcccctacattcaccagccggatgtcccaaatccctttagccagattgctttttgcaaccaaagctgtggacagaaaagcctccttaagtgagctgaggggacaggaaatccaatcagatgacctttgtgttcgtaatcgggcttgagccagaggctggggagctgagtcccagccaaacctcactggcccttttgcttttcacgcccagggctcagtggcccaggaagtgtgctgggcagcctgttcttactccagctcaacccattgggtgttggctgtttttggttttagttgttgttttgtattttgttgttttaattaataggctttatttgtaagagcagttttatgtttacagaaaaattaggcacaaagggattcccatatccctcctcttctttgcatatttccccctctaattagcatgttgcattagcatggcactttgttacaactgatgaacttgtattcattattagctacagtgttcatagtttatattaaagttcactctttgtgttgtgca

SEQ ID NO: 16761 - DNA, 4943 bp, Homo sapiens
  misc_feature (3148)..(3148): n is a, c, g, or t
  misc_feature (3242)..(3242): n is a, c, g, or t
gcgcggccgggactttggctttgacaccgactgcgagcgggagccgtgcggctggtgctgggtctggactggctctggcggatccccgcccgagttgggcgcaggactttttgccggggtaaacgcaactgcggcggcgccgccgcaagccccggtgcagcctcggcggcgggtttcgccgccgctgccgccgcctccgagcagccctgcggcttctattcactctgggagagcgatgctaagtttctcccatagaaagagccgggacacgcagaccgaagcggcgtagtcggcttccagggcctgaccagtgacccacacccgcgcggacgcctaggctggaggcagggggcccgtgctgtcccgggctgggctcaggcttccgagccgcaggtggaagaggaaccggcgccccgcagagcggccgagaggcggccaagtgaaaggtaattttggacacgccaggcatggaagattcggtgtttgtctatagtaacctcttcagtccctgaatcctgcaccttccgtttttctgtgcttgtacggcctactgggcttcctccctagccagagagctcttctgcagtggtgcggccttcccgggagcctgatcctggcggaccatggggagcaccctgggctgccaccgctccatccccagggacccctcggacctgtcccatagccgcaagttcagcgcagcctgtaacttcagcaacattctagtgaatcaggagcggctcaacatcaacactgccacggaggaggagctgatgaccctgcctggggtgacgcgtgccgtggcacgcagcatcgtggagtaccgagagtatatcggtggcttcaagaaggtggaggacctggcattggtcagtggtgtaggcgccaccaagctggagcaggtcaagtttgagatctgtgtgagcagcaagggcagctcagcgcagcactctcccagttccctgcggcgggacctgctagcggagcagcagcctcaccacctggccacagctgtgcccctcaccccacgtgttaacatcaacacagccaccccggcccagctcatgagcgtgcgaggcctctcggagaaaatggccctcagcatcgtggacttccgccgtgagcatgggccctttcgcagcgttgaggacctagtgaggatggatggtatcaatgccgccttcctggacaggatccggcaccaggtgtttgctgagaggtccaggcccccatccacccacacgaacgggggactgaccttcaccgccaagcctcacccgagccccacttccctgagcctgcagagtgaggacctggacctgccgccaggggggcccacccagattatctccactcggccgtccgtggaggcctttggaggcacaagggatgggaggcctgtgctgaggctggccacctggaacttgcagggctgttccgtggagaaggccaacaaccccggggtgcgagaggtggtgtgcatgacactcctggaaaacagcatcaagcttctagctgtgcaagaactgcttgacagagaggccttggaaaagttctgcacggagctaaaccagccgaccctgcccaacatccgcaagtggaaggggccccggggatgctggaaggctgttgttgctgagaagccctcgaatcagctccagaagggagctgggtatgcaggattcctatgggacgcggctgccggcatggagctgagagacgcgggttcacaggagagctcgccaagcaacgggcacgggaagctggcgggccccagcccatacctcgggaggttcaaggtgggaagtcacgacctgacccttgttaaccttcacctggcagccctgaccctcctggggagcgagaatcccagcaagaatcacagtgatggccaccggttggcgagctttgcacagaccctacaggaaaccctgaaaggagaaaaggatgtcattatcttaggggattttggccaagggccagacagcaatgactatgatatcctgaggaaagaaaagttccaccacctgatccccgcgcacaccttcaccaacatcagcaccaagaaccctcaaggctcgaagtctctggacaacatctggatcagtaaaagcttaaagaaggttttcacaggtcactgggctgtggtgagagaaggcctcacgaacccttggattccggataactggtcttggggcggggtggcttctgaacactgcccagtgctagccgagttctacactgaaaaggactggagcaagaaggacgcccctcggaacggcagcggggtggccttggagcgaagtgaagccaacatcaagcacgagcgatgatgacaccaaatccatgtgtccaccctgggacccaggagggcacagccaaggaatgagccctgtggggtgacgcttcagggcagagctgccttttaatttttattctcagagcatcagcacttgaggccttgccccacgccttctctgtggaccattcaggacctccagtgggggtggcgtgccaggcgcgtaccccaccaggtgggcaaagcagaaacctgcggggagcggagacgccttttatctctggatgccacagacctgagcagcattgggctggctgtccgctgctgactggatggcagcacaaagacaatatgagcagagggaggagaagaaggggtgctcaggctgcgggccacagtccagcagcgccagaagcactcatttctgaccaccaggctatgacgttcctgctgcgcattacagaaagcttttaactgtgatcaggcagtctgctcagatacattgagtggcgatttttagttttgttttgaaaaaataaacagattaacctgcctcgctgcagtgagagcatgggacaagtccgccacagccctcccccgcccccttcccccgccccccaacgcgcagtgtgtatttgcaccacggcaggtgcctctgtgtggagctagggtcaagccctgagcagcttcacttcccctgcgccttttatgtccccaccttgaggccttgcagaggcgcctctcaaggccccatcagctcgccgggacctctgtgaagcctctctgtcatctccccttcccagcccctccttcatcccctgcctccttcaccagcctggcttttgcctngagcactatttgtttagttctctttgcaggacaagaattctctcagggtggtatcacctcctccctcctccccactcactccagtttttagccnggagcctcctgtggttgactatcaggaatgtgtgctgtgtcaggatacataggaagttgacctcggggtatcatggagagtgtccctcctagtggctggaggtagggacagttggttgtggggctggagagaggttgtggggaggaagcgaggatgcgtgcctgccactaggcatctgcatccccgagcccaagccaggagggatttcccttaggcaacaccatcccagggagatctgccacaatttgcgtttcacagctgaagacgccgaggcttagagagctcgacctcctcaaggtcacaccactgggtaaatagagggatgcagactcaggttttgctatgtgctcacatttcaactttatgcttaacatgaatggaaaaatatgaaagtaaatagtgaaaaggtgagttatgagcttagattacctagattattccagtatcccatggaagctgaggacttattccgctttccacaccgaacactaaatgtggaccagtatcaagaaccctcctgtccccacgcagtgtaaacccagtggcttctctgacctggagctgatgggccgtgaagggggcccatttttctccaaaggccatccttttggggccacctggctccaaggagcatcgctggtcttggggacgggaagggaaccctcttccaggagctctaagggtacttgggaatcaattgtgtccattctgaggtctctccagtgggagggcggcagctcctgtccctgggttcaggctgtgcttctggaagcatcgaaatgggatgtctgagccttgaggaaaagcagcagggttagcattaaagtcaagaggggcagctcaggatgctaccagggagcacatcgtttctggtgcctcatctaaaggtaaaacctcccctacattcaccagccggatgtcccaaatccctttagccagattgctttttgcaaccaaagctgtggacagaaaagcctccttaagtgagctgaggggacaggaaatccaatcagatgacctttgtgttcgtaatcgggcttgagccagaggctggggagctgagtcccagccaaacctcactggcccttttgcttttcacgcccagggctcagtggcccaggaagtgtgctgggcagcctgttcttactccagctcaacccattgggtgttggctgtttttggttttagttgttgttttgtattttgttgttttaattaataggctttatttgtaagagcagttttatgtttacagaaaaattaggcacaaagggattcccatatccctcctcttctttgcatatttccccctctaattagcatgttgcattagcatggcactttgttacaactgatgaacttgtattcattattagctacagtgttcatagtttatattaaagttcactctttgtgttgtgcatcctatgggttttgacaaatgtagaatgacatgtatcaccatgctacagaatcattcagaatagttcctctgatgtaaaaatgcccttgtggtggggcatggtggctcgagcccgtaatcccagcactttgggaggtggaggcgggcagatcatttgaggtcaggagttcgagaccagcttgaccaacatggtgaaaccccatctctactaaaagtacaaaatttagccagatgtggtggcgcatgcctgtattcgcagctacttgggaggctgaagc

SEQ ID NO: 16762 - DNA, 2032 bp, Homo sapiens
tggtctccatattttgaagtggatagttgttccactcctcatcctactgtgtgcaattttattttgcctcagtgacagtcactttacagccatattggtgcaacatgcattagcaaaagaagtgcatgccgcgtgcacgtgtgtgggtgcggcagcagctctccgcagcaagaggtaaacaagacaagcactacggtggttcaagttgaagctggaggtcattttttgcccctgtaagctgagccctgaagaagaaagtcaccatgtatccatctttgttacctttttggatttgacgctgatccagatcctcctgggaccttcaatccgctgcttttacaaggatgaaaaggattctgatgactttttttgaactgtttgggcaggaatgctacagagagaatcaatttctgtgaactgagagtccccaggtgataatttggtgtttcacacacaggcagttttctttttaatgtgtggtgcttgtttagtcatctggctcttgcaaaccctagtgtttgaaaaacagggatgtagttcagcagtgtctgaataaggctgatgactcagaatcatgcagtgcctggcttctcaggccgccgccagccgggactgctttaggcgcgaacccacgcttctgacctgtgctctgtctttgcagttctttctgcacggagctaaaccagccgaccctgcccaacatccgcaagtggaaggggccccggggatgctggaaggctgttgttgctgagaagccctcgaatcagctccagaaggtaccctcgtctgcaaagcctggcctttcccttcatttaatttatacatacttttcccctaatcaagggcatttaaaaatttcctttgccaatatccccggttcaattttgtatttctgcccaatttttaaatccttgccattcatttccaaatgccctggttttcggttcacgtttagattggtaatggactcctgccaagaaggaaatgagagccttagggtgttgggagagaggaggggagaaaggcaacaaatgggtatttctgtcctttgtccttctaatcccttcgccacagttctgtcttctgccaagtttgtgcagagctcattactcgttgactgaaaatttcagattcaccttagttcacacatgaagtatttgcttctagtggtagaaattatgcacataatttcaacatagaaatgttctattgaaatgttcagcagattttggttttgaattttctttcatcagtatcacccatatgagcaggtaagggtaaatctctgtaaatacacgttttccctcatattattattcaaggccagatttattcaccttgcaatgcttaacatcaatggagttttagatttttaaacagactcctgataataaccaggagttgaaaatgtattattacataattttcctataaatgcagatttttaaatccctagtatacctaacatgcttacaaacacatgtgatttatacttaatatgattatgtttataatgtaggctcttaaatcataaatgtatactggattaaaagtggccatttttttgacagtaagcccctactctctttttagctactacttaaagaggtacatgtaaatcttctgtctctgggttttatgtttgggggtgtaaatggctcctgccagctgacagtgagtcagcacacttcagagaaggctggagataaagctgaatttgaatgcatctagttcagggttctcccttccagtccacgtggaaataataagaataataccaccttccttttttgatcgcactttacatgtatgtaggtgtctgagcttcacaagccttttatagtccattcagcactgcattcattcaacaaatcattaatgaaaggtggctatgtaccaggcatattgtttcatgccaggtacacactggtgagaaaaactccatgcctgcatgttttcactctttgcaagacacagtggggatcccggctggagcctgacctggcccctcccgcagggagtgcacagcccg

SEQ ID NO: 16763 - DNA, 944 bp, Homo sapiens
tggtctccatattttgaagtggatagttgttccactcctcatcctactgtgtgcaattttattttgcctcagtgacagtcactttacagccatattggtgcaacatgcattagcaaaagaagtgcatgccgcgtgcacgtgtgtgggtgcggcagcagctctccgcagcaagaggtaaacaagacaagcactacggtggttcaagttgaagctggaggtcattttttgcccctgtaagctgagccctgaagaagaaagtcaccatgtatccatctttgttacctttttggatttgacgctgatccagatcctcctgggaccttcaatccgctgcttttacaaggatgaaaaggattctgatgactttttttgaactgtttgggcaggaatgctacagagagaatcaatttctgtgaactgagagtccccaggtgataatttggtgtttcacacacaggcagttttctttttaatgtgtggtgcttgtttagtcatctggctcttgcaaaccctagtgtttgaaaaacagggatgtagttcagcagtgtctgaataaggctgatgactcagaatcatgcagtgcctggcttctcaggccgccgccagccgggactgctttaggcgcgaacccacgcttctgacctgtgctctgtctttgcagttctgggaagctggcgggccccagcccatacctcgggaggttcaaggtgggaagtcacgacctgacccttgttaaccttcacctggcagccctgaccctcctggggagcgagaatcccagcaagaatcacagtgatggccaccggttggcgagctttgcacagaccctacaggaaaccctgaaaggtaggacattgtcttttgctgtgactcggccactgttttgcagagcagcagggctgcctcttctgagccatctctgaccacttgggctggctgtttgt

SEQ ID NO: 16764 - DNA, 3777 bp, Homo sapiens
  misc_feature (2260)..(2260): n is a, c, g, or t
  misc_feature (2354)..(2354): n is a, c, g, or t
tggtctccatattttgaagtggatagttgttccactcctcatcctactgtgtgcaattttattttgcctcagtgacagtcactttacagccatattggtgcaacatgcattagcaaaagaagtgcatgccgcgtgcacgtgtgtgggtgcggcagcagctctccgcagcaagaggtaaacaagacaagcactacggtggttcaagttgaagctggaggtcattttttgcccctgtaagctgagccctgaagaagaaagtcaccatgtatccatctttgttacctttttggatttgacgctgatccagatcctcctgggaccttcaatccgctgcttttacaaggatgaaaaggattctgatgactttttttgaactgtttgggcaggaatgctacagagagaatcaatttctgtgaactgagagtccccaggtgataatttggtgtttcacacacaggcagttttctttttaatgtgtggtgcttgtttagtcatctggctcttgcaaaccctagtgtttgaaaaacagggatgtagttcagcagtgtctgaataaggctgatgactcagaatcatgcagtgcctggcttctcaggccgccgccagccgggactgctttaggcgcgaacccacgcttctgacctgtgctctgtctttgcagttctttctgcacggagctaaaccagccgaccctgcccaacatccgcaagtggaaggggccccggggatgctggaaggctgttgttgctgagaagccctcgaatcagctccagaagggagctgggtatgcaggattcctatgggacgcggctgccggcatggagctgagagacgcgggttcacaggagagctcgccaagcaacgggcacgggaagctggcgggccccagcccatacctcgggaggttcaaggtgggaagtcacgacctgacccttgttaaccttcacctggcagccctgaccctcctggggagcgagaatcccagcaagaatcacagtgatggccaccggttggcgagctttgcacagaccctacaggaaaccctgaaaggagaaaaggatgtcattatcttaggggattttggccaagggccagacagcaatgactatgatatcctgaggaaagaaaagttccaccacctgatccccgcgcacaccttcaccaacatcagcaccaagaaccctcaaggctcgaagtctctggacaacatctggatcagtaaaagcttaaagaaggttttcacaggtcactgggctgtggtgagagaaggcctcacgaacccttggattccggataactggtcttggggcggggtggcttctgaacactgcccagtgctagccgagttctacactgaaaaggactggagcaagaaggacgcccctcggaacggcagcggggtggccttggagcgaagtgaagccaacatcaagcacgagcgatgatgacaccaaatccatgtgtccaccctgggacccaggagggcacagccaaggaatgagccctgtggggtgacgcttcagggcagagctgccttttaatttttattctcagagcatcagcacttgaggccttgccccacgccttctctgtggaccattcaggacctccagtgggggtggcgtgccaggcgcgtaccccaccaggtgggcaaagcagaaacctgcggggagcggagacgccttttatctctggatgccacagacctgagcagcattgggctggctgtccgctgctgactggatggcagcacaaagacaatatgagcagagggaggagaagaaggggtgctcaggctgcgggccacagtccagcagcgccagaagcactcatttctgaccaccaggctatgacgttcctgctgcgcattacagaaagcttttaactgtgatcaggcagtctgctcagatacattgagtggcgatttttagttttgttttgaaaaaataaacagattaacctgcctcgctgcagtgagagcatgggacaagtccgccacagccctcccccgcccccttcccccgccccccaacgcgcagtgtgtatttgcaccacggcaggtgcctctgtgtggagctagggtcaagccctgagcagcttcacttcccctgcgccttttatgtccccaccttgaggccttgcagaggcgcctctcaaggccccatcagctcgccgggacctctgtgaagcctctctgtcatctccccttcccagcccctccttcatcccctgcctccttcaccagcctggcttttgcctngagcactatttgtttagttctctttgcaggacaagaattctctcagggtggtatcacctcctccctcctccccactcactccagtttttagccnggagcctcctgtggttgactatcaggaatgtgtgctgtgtcaggatacataggaagttgacctcggggtatcatggagagtgtccctcctagtggctggaggtagggacagttggttgtggggctggagagaggttgtggggaggaagcgaggatgcgtgcctgccactaggcatctgcatccccgagcccaagccaggagggatttcccttaggcaacaccatcccagggagatctgccacaatttgcgtttcacagctgaagacgccgaggcttagagagctcgacctcctcaaggtcacaccactgggtaaatagagggatgcagactcaggttttgctatgtgctcacatttcaactttatgcttaacatgaatggaaaaatatgaaagtaaatagtgaaaaggtgagttatgagcttagattacctagattattccagtatcccatggaagctgaggacttattccgctttccacaccgaacactaaatgtggaccagtatcaagaaccctcctgtccccacgcagtgtaaacccagtggcttctctgacctggagctgatgggccgtgaagggggcccatttttctccaaaggccatccttttggggccacctggctccaaggagcatcgctggtcttggggacgggaagggaaccctcttccaggagctctaagggtacttgggaatcaattgtgtccattctgaggtctctccagtgggagggcggcagctcctgtccctgggttcaggctgtgcttctggaagcatcgaaatgggatgtctgagccttgaggaaaagcagcagggttagcattaaagtcaagaggggcagctcaggatgctaccagggagcacatcgtttctggtgcctcatctaaaggtaaaacctcccctacattcaccagccggatgtcccaaatccctttagccagattgctttttgcaaccaaagctgtggacagaaaagcctccttaagtgagctgaggggacaggaaatccaatcagatgacctttgtgttcgtaatcgggcttgagccagaggctggggagctgagtcccagccaaacctcactggcccttttgcttttcacgcccagggctcagtggcccaggaagtgtgctgggcagcctgttcttactccagctcaacccattgggtgttggctgtttttggttttagttgttgttttgtattttgttgttttaattaataggctttatttgtaagagcagttttatgtttacagaaaaattaggcacaaagggattcccatatccctcctcttctttgcatatttccccctctaattagcatgttgcattagcatggcactttgttacaactgatgaacttgtattcattattagctacagtgttcatagtttatattaaagttcactctttgtgttgtgca

SEQ ID NO: 16765 - DNA, 3573 bp, Homo sapiens
  misc_feature (2056)..(2056): n is a, c, g, or t
  misc_feature (2150)..(2150): n is a, c, g, or t
tggtctccatattttgaagtggatagttgttccactcctcatcctactgtgtgcaattttattttgcctcagtgacagtcactttacagccatattggtgcaacatgcattagcaaaagaagtgcatgccgcgtgcacgtgtgtgggtgcggcagcagctctccgcagcaagaggtaaacaagacaagcactacggtggttcaagttgaagctggaggtcattttttgcccctgtaagctgagccctgaagaagaaagtcaccatgtatccatctttgttacctttttggatttgacgctgatccagatcctcctgggaccttcaatccgctgcttttacaaggatgaaaaggattctgatgactttttttgaactgtttgggcaggaatgctacagagagaatcaatttctgtgaactgagagtccccaggtgataatttggtgtttcacacacaggcagttttctttttaatgtgtggtgcttgtttagtcatctggctcttgcaaaccctagtgtttgaaaaacagggatgtagttcagcagtgtctgaataaggctgatgactcagaatcatgcagtgcctggcttctcaggccgccgccagccgggactgctttaggcgcgaacccacgcttctgacctgtgctctgtctttgcagttctgggaagctggcgggccccagcccatacctcgggaggttcaaggtgggaagtcacgacctgacccttgttaaccttcacctggcagccctgaccctcctggggagcgagaatcccagcaagaatcacagtgatggccaccggttggcgagctttgcacagaccctacaggaaaccctgaaaggagaaaaggatgtcattatcttaggggattttggccaagggccagacagcaatgactatgatatcctgaggaaagaaaagttccaccacctgatccccgcgcacaccttcaccaacatcagcaccaagaaccctcaaggctcgaagtctctggacaacatctggatcagtaaaagcttaaagaaggttttcacaggtcactgggctgtggtgagagaaggcctcacgaacccttggattccggataactggtcttggggcggggtggcttctgaacactgcccagtgctagccgagttctacactgaaaaggactggagcaagaaggacgcccctcggaacggcagcggggtggccttggagcgaagtgaagccaacatcaagcacgagcgatgatgacaccaaatccatgtgtccaccctgggacccaggagggcacagccaaggaatgagccctgtggggtgacgcttcagggcagagctgccttttaatttttattctcagagcatcagcacttgaggccttgccccacgccttctctgtggaccattcaggacctccagtgggggtggcgtgccaggcgcgtaccccaccaggtgggcaaagcagaaacctgcggggagcggagacgccttttatctctggatgccacagacctgagcagcattgggctggctgtccgctgctgactggatggcagcacaaagacaatatgagcagagggaggagaagaaggggtgctcaggctgcgggccacagtccagcagcgccagaagcactcatttctgaccaccaggctatgacgttcctgctgcgcattacagaaagcttttaactgtgatcaggcagtctgctcagatacattgagtggcgatttttagttttgttttgaaaaaataaacagattaacctgcctcgctgcagtgagagcatgggacaagtccgccacagccctcccccgcccccttcccccgccccccaacgcgcagtgtgtatttgcaccacggcaggtgcctctgtgtggagctagggtcaagccctgagcagcttcacttcccctgcgccttttatgtccccaccttgaggccttgcagaggcgcctctcaaggccccatcagctcgccgggacctctgtgaagcctctctgtcatctccccttcccagcccctccttcatcccctgcctccttcaccagcctggcttttgcctngagcactatttgtttagttctctttgcaggacaagaattctctcagggtggtatcacctcctccctcctccccactcactccagtttttagccnggagcctcctgtggttgactatcaggaatgtgtgctgtgtcaggatacataggaagttgacctcggggtatcatggagagtgtccctcctagtggctggaggtagggacagttggttgtggggctggagagaggttgtggggaggaagcgaggatgcgtgcctgccactaggcatctgcatccccgagcccaagccaggagggatttcccttaggcaacaccatcccagggagatctgccacaatttgcgtttcacagctgaagacgccgaggcttagagagctcgacctcctcaaggtcacaccactgggtaaatagagggatgcagactcaggttttgctatgtgctcacatttcaactttatgcttaacatgaatggaaaaatatgaaagtaaatagtgaaaaggtgagttatgagcttagattacctagattattccagtatcccatggaagctgaggacttattccgctttccacaccgaacactaaatgtggaccagtatcaagaaccctcctgtccccacgcagtgtaaacccagtggcttctctgacctggagctgatgggccgtgaagggggcccatttttctccaaaggccatccttttggggccacctggctccaaggagcatcgctggtcttggggacgggaagggaaccctcttccaggagctctaagggtacttgggaatcaattgtgtccattctgaggtctctccagtgggagggcggcagctcctgtccctgggttcaggctgtgcttctggaagcatcgaaatgggatgtctgagccttgaggaaaagcagcagggttagcattaaagtcaagaggggcagctcaggatgctaccagggagcacatcgtttctggtgcctcatctaaaggtaaaacctcccctacattcaccagccggatgtcccaaatccctttagccagattgctttttgcaaccaaagctgtggacagaaaagcctccttaagtgagctgaggggacaggaaatccaatcagatgacctttgtgttcgtaatcgggcttgagccagaggctggggagctgagtcccagccaaacctcactggcccttttgcttttcacgcccagggctcagtggcccaggaagtgtgctgggcagcctgttcttactccagctcaacccattgggtgttggctgtttttggttttagttgttgttttgtattttgttgttttaattaataggctttatttgtaagagcagttttatgtttacagaaaaattaggcacaaagggattcccatatccctcctcttctttgcatatttccccctctaattagcatgttgcattagcatggcactttgttacaactgatgaacttgtattcattattagctacagtgttcatagtttatattaaagttcactctttgtgttgtgca

SEQ ID NO: 16766 - DNA, 2852 bp, Homo sapiens
gcgcggccgggactttggctttgacaccgactgcgagcgggagccgtgcggctggtgctgggtctggactggctctggcggatccccgcccgagttgggcgcaggactttttgccggggtaaacgcaactgcggcggcgccgccgcaagccccggtgcagcctcggcggcgggtttcgccgccgctgccgccgcctccgagcagccctgcggcttctattcactctgggagagcgatgctaagtttctcccatagaaagagccgggacacgcagaccgaagcggcgtagtcggcttccagggcctgaccagtgacccacacccgcgcggacgcctaggctggaggcagggggcccgtgctgtcccgggctgggctcaggcttccgagccgcaggtggaagaggaaccggcgccccgcagagcggccgagaggcggccaagtgaaaggtaattttggacacgccaggcatggaagattcggtgtttgtctatagtaacctcttcagtccctgaatcctgcaccttccgtttttctgtgcttgtacggcctactgggcttcctccctagccagagagctcttctgcagtggtgcggccttcccgggagcctgatcctggcggaccatggggagcaccctgggctgccaccgctccatccccagggacccctcggacctgtcccatagccgcaagttcagcgcagcctgtaacttcagcaacattctagtgaatcaggagcggctcaacatcaacactgccacggaggaggagctgatgaccctgcctggggtgacgcgtgccgtggcacgcagcatcgtggagtaccgagagtatatcggtggcttcaagaaggtggaggacctggcattggtcagtggtgtaggcgccaccaagctggagcaggtcaagtttgagatctgtgtgagcagcaagggcagctcagcgcagcactctcccagttccctgcggcgggacctgctagcggagcagcagcctcaccacctggccacagctgtgcccctcaccccacgtgttaacatcaacacagccaccccggcccagctcatgagcgtgcgaggcctctcggagaaaatggccctcagcatcgtggacttccgccgtgagcatgggccctttcgcagcgttgaggacctagtgaggatggatggtatcaatgccgccttcctggacaggatccggcaccaggtgtttgctgagaggtccaggcccccatccacccacacgaacgggggactgaccttcaccgccaagcctcacccgagccccacttccctgagcctgcagagtgaggacctggacctgccgccaggggggcccacccagattatctccactcggccgtccgtggaggcctttggaggcacaagggatgggaggcctgtgctgaggctggccacctggaacttgcagggctgttccgtggagaaggccaacaaccccggggtgcgagaggtggtgtgcatgacactcctggaaaacagcatcaagcttctagctgtgcaagaactgcttgacagagaggccttggaaaagttctgcacggagctaaaccagccgaccctgcccaacatccgcaagtggaaggggccccggggatgctggaaggctgttgttgctgagaagccctcgaatcagctccagaagggagctgggtatgcaggattcctatgggacgcggctgccggcatggagctgagagacgcgggttcacaggagagctcgccaagcaacgggcacgggaagctggcgggccccagcccatacctcgggaggttcaaggtgggaagtcacgacctgacccttgttaaccttcacctggcagccctgaccctcctggggagcgagaatcccagcaagaatcacagtgatggccaccggttggcgagctttgcacagaccctacaggaaaccctgaaaggagaaaaggatgtcattatcttaggggattttggccaagggccagacagcaatgactatgatatcctgaggaaagaaaagttccaccacctgatccccgcgcacaccttcaccaacatcagcaccaagaaccctcaaggctcgaagtctctggacaacatctggatcagtaaaagcttaaagaaggttttcacaggtcactgggctgtggtgagagaaggcctcacgaacccttggattccggataactggtcttggggcggggtggcttctgaacactgcccagtgctagccgagttctacactgaaaaggactggagcaagaaggacgcccctcggaacggcagcggggtggccttggagcgaagtgaagccaacatcaagcacgagcgatgatgacaccaaatccatgtgtccaccctgggacccaggagggcacagccaaggaatgagccctgtggggtgacgcttcagggcagagctgccttttaatttttattctcagagcatcagcacttgaggccttgccccacgccttctctgtggaccattcaggacctccagtgggggtggcgtgccaggcgcgtaccccaccaggtgggcaaagcagaaacctgcggggagcggagacgccttttatctctggatgccacagacctgagcagcattgggctggctgtccgctgctgactggatggcagcacaaagacaatatgagcagagggaggagaagaaggggtgctcaggctgcgggccacagtccagcagcgccagaagcactcatttctgaccaccaggctatgacgttcctgctgcgcattacagaaagcttttaactgtgatcaggcagtctgctcagatacattgagtggcgatttttagttttgttttgaaaaaataaacagattaacctgc

SEQ ID NO: 16767 - DNA, 1314 bp, Homo sapiens
gcgcggccgggactttggctttgacaccgactgcgagcgggagccgtgcggctggtgctgggtctggactggctctggcggatccccgcccgagttgggcgcaggactttttgccggggtaaacgcaactgcggcggcgccgccgcaagccccggtgcagcctcggcggcgggtttcgccgccgctgccgccgcctccgagcagccctgcggcttctattcactctgggagagcgatgctaagtttctcccatagaaagagccgggacacgcagaccgaagcggcgtagtcggcttccagggcctgaccagtgacccacacccgcgcggacgcctaggctggaggcagggggcccgtgctgtcccgggctgggctcaggcttccgagccgcaggtggaagaggaaccggcgccccgcagagcggccgagaggcggccaagtgaaaggtaattttggacacgccaggcatggaagattcggtgtttgtctatagtaacctcttcagtccctgaatcctgcaccttccgtttttctgtgcttgtacggcctactgggcttcctccctagccagagagctcttctgcagtggtgcggccttcccgggagcctgatcctggcggaccatggggagcaccctgggctgccaccgctccatccccagggacccctcggacctgtcccatagccgcaagttcagcgcagcctgtaacttcagcaacattctagtgaatcaggaccttttatctctggatgccacagacctgagcagcattgggctggctgtccgctgctgactggatggcagcacaaagacaatatgagcagagggaggagaagaaggggtgctcaggctgcgggccacagtccagcagcgccagaagcactcatttctgaccaccaggctatgacgttcctgctgcgcattacagaaagcttttaactgtgatcaggcagtctgctcagatacattgagtggcgatttttagttttgttttgaaaaaataaacagattaacctgcaaaaaaaaaaaaacgaaacaacacaaaaagaaacaacaaaaacaaacaccaccaacaagacaacaaagcaaaaaaaagacataaaaaacaaaacaaaaaacagagcgggggcagcagcacaaacgaaaaatctgcaccccgaaggggggcccacgaaactaagagcagacaaggagcccaggaagaacaacaagaggggccgcccccacacaagaagagacgacatcataacaaaaaccaaccaacaagaggcgccagaagacaaacaacacgagcaagcacacgcacaaccccg

SEQ ID NO: 16768 - DNA, 212 bp, Homo sapiens
gtgaggacaggaaccaccatgggtgttgggtgtgaaggcaacttgtgcgtgacctcatctatggatgcaaatgaatggattcttttgcgggtagggagggtgcaagagtttttaatcaatgttcttgaagcctcagccaataccgtcacctgagaatgggctgtccttctgctccagaattttctgaatacagctgggcttgtgacccatgt

SEQ ID NO: 16769 - DNA, 410 bp, Homo sapiens
aggaattttaatttccccctgtgagtattgtgagtgggggtaggggctctggggtctgttttgctctgacaccaattttactcacttaaatttgtctttattcatagagatttttgttcaccaagaatgggtgctgatggtagcatgtaggggtaaagtgggtaatagaccagtgaagttgtggattaaaaagcatatatcctcaagacagttggtgggcaacaccatttctatataaggaaaactgtatctcattactgttaggagtttgttaatggaattaagaaacacagtctatcgttgtgctacctataaacttctgaagtcctctgttatgtatagtgctatccacatgtaaaggtcccaactgacaaaataacttacaaaggaactacttttttcttcactag

SEQ ID NO: 16770 - DNA, 654 bp, Homo sapiens
ccgttttcctcttaggaccattcattgtgttaggaccgcggaacaaggaaggaccggttggggccatgtgaataatttagtagggtctggaatcctgcagagcgaatgcctcagagtagaaagtaaatagacggtgttgatattagcgcagagctgggcatctggaaatatcaagtcagaacattagggccgataacctatgcaggagtcagcatttctgttttcacctttgtcgtgtttaagtcagtattgttggaacttttcttacatttttctacaagacattttctgatttcccagttgttagccagcaactaatgatgcgagcagttatcaattaaacagctgttaactcttgccttcattcacagatacaatgttgcgcattcaaaatgtgaagaccgttctcttaggttctttttttattttcctggcaaaagagaccaaatgggtgtgacctgctcaggcatacccgctgcctgcagctgaatcacaggccttcattcgcttcctgttagctcagataagctgggaggagacagtgacagcctaaaagtaaatttctgtttgaagtgagataaaaatctttcactttcttctgtaagtctttcctggtccctttagttgttgttgggaaggaaatgcttgattatt

SEQ ID NO: 16771 - DNA, 434 bp, Homo sapiens
ggaaggcattcactgcctccatatgccctctgagaagcagcattttctctgcagagcctgcagacaaggttatctccacttggaaacaaataaacaaaccaaagcaaactctgtccagggtcctgaaagcaagagcacgtctctagcctcagtggtgaagagcatatcttctgccacctgtggacaaatgttcacattctatgggcccaggtggacatttgcagagagcagcccccaagcctgctttccaccccacctttactgagaagctagggccctgaccaatggtagaggctactatgtaggaagtgcctgtacttaagaggcaagggtgtggtgttgtgaaaaaaatatccaatttcatgcaccaatgcccagattttgtgtgatgataacccttcaagtgtagggatagaaaaaggggatcactaaca

SEQ ID NO: 16772 - DNA, 407 bp, Homo sapiens
ggtagagatggagtgtcgctatgttgcctaggcttgtctcaagctcctgggctcaagcaatcctcccgccttggcctcctaaagcacagggttttacaggcatgggccaccacgcccagccagcagctggactgtatatattctctgggctaggttctaatgccatctgacatttgagcctcacaacccttgccaactgggggaccttggtcacgacacttcatcttttgaggtgcttccttgtctacaaactggttgggggatgtttccagcttcgtaggattgctgggacaattaaggaagacagtgtgtgccaagcagcatgtggctattatccctgtttcccaggtgagaaacagggtcagtgatagagctgggatgtgtgcctgcaggctcaccagccagtc

SEQ ID NO: 16773 - DNA, 523 bp, Homo sapiens
gtgagactccttctcaaaaaaaaaaaaaaaaagacttggtcaatatctctttttgttcctaaagaactgacattttacttaggtgatattttattagattttaggtgcactaactggtacatttcacctattgtatgtatatttaaatttagaggagaaacgtttcaatatgacattgttttccagttagttattggagggcacaggagactgcagacagtcagctaaggacaggctgatgactctcggtggcctctcacagaacattccctcagcatgtgccttgtgtgttatcccattaaatagctaatcctcttattgtcctttctcttaggacagccttttgttagaaacctttgtcccaggccctgagggatccttcctctggtctttatgagacaagagctgtgtgctgctcagtagcagatcacaggctcctctgtggacttcacaccttttctgaataatgcgaggcagtattaaagggggagacgaggtgtgatcacttccattttttcactgt

SEQ ID NO: 16774 - DNA, 242 bp, Homo sapiens
tgcacacttctccttgtgtctccaaaaggattccatgtgaaataggagtagagacctccaatacctcgcccatctgttaaaactgcagcgtgggtaccctggcaggctcattagctgccgtggactgctgcggagtggctggagactgtcaggctacgctgggccgatcttctgggtaggtgtatctacacccgtgtatctagtgatttactctcctctggaagagaaacgcgggcacaccc

SEQ ID NO: 16775 - DNA, 322 bp, Homo sapiens
tcaaaccattttctttcttttttttaactaacccagcacaaagctgattttttttttagttttcttactgttgagaccttgattagtaaactggacaaagaacttgaacagatagttcacaaagaaagagaacttggtaaactgtggaaatgttcaggttggcagtaataaaaccactttttaattagctgctgtactacctggttattttttatctttatatttcagtaatgtatgttttactcgatggagcagtctactgtgcaagtgggagaatatgataaagttggaggagcagataaatagaatattgacattatga

SEQ ID NO: 16776 - DNA, 1977 bp, Homo sapiens
cggggcagccagccccgccccattgacgtgcagaccttgaatcgaaacccaggctcctgcaggcactggcacagctacagcgagggcctcggccatccaagggtctcccaggtgaccttccctccaccccaggaagctatgacagaggccgggaagctgcccctaccgctacccccacggctggactggtttgtgcacacccagatgggccagctggcccaagacggggtccccgagtggttccatggtgcaatctcaagagaggatgctgagaacttgctggagtcacagccactgggatcctttctcatcagggtcagtcacagccatgtgggctacacactctcctacaaagcccaaagcagctgctgccatttcatggtgaagctcttggatgatgggactttcatgatccccggggagaaggtggcccacacctcgctggacgccctggtcaccttccaccagcagaagccaattgagccgcgcagggagctgctgacacagccctgcaggcagaaggatcccgcaaacgtggattacgaggatctcttcctctactccaacgcagtggccgaggaagctgcctgcccggtgtctgcccctgaggaggcctccccaaagccagtcctgtgtcaccaatcaaaggaaaggaagccgtcagcagagatgaacagaataaccaccaaggaagccacttcctcctgccccccaaaatcccctcttggagagacccgccagaaactctggaggagcctcaaaatgctccccgagagaggccagagggtccggcagcagctaaaaagccacctcgccactgtgaacttgtcgtcactcttggatgtccggagatccacggtgatctcaggccctgggaccggaaaaggcagccaagatcactcaggggatcccacctcgggggacagaggctacacggatccctgtgtggccacatctctcaaaagcccctcacagccccaggcaccaaaagacagaaaggtccccaccaggaaggccgagaggtcggtcagctgcattgaggtgaccccaggggacaggagttggcaccaaatggtagtgagagccctatcctcccaggagtccaagccagagcaccagggcttggcagagcctgagaacgaccagctcccggaggagtaccaacaaccgccaccctttgcccctgggtactgctagagaacaggtccaccctggctctgggactcgctgccaggggctgccacactcctgaatgccttaacatttcttccatggccccacaccatggcatccgggggtcttcgggaacccgggaaatggaataaagatgtttttggggtctgttcctgcactcacccatggggtgagctggttattttagcaacaatcatcagagtgacgctgatggtttggggcaccagctatacatcagccccagtgccagaccttctattcattattttacgcctcagagcaaggccctcagggagggtcatcctccatgttttgaagaagagactgaggttcagagaggataagaggcgtgaccaaggccacagagctatgggtgtcagcaccaggatttgaagccaggtgaatccgagcccttttcccatatcatctgtttgttctgttgtctaaaagcacactgcaagccgggctcagtggctcatgcctgtagtcccagcactctgtggggccgaggcaggcagatcgcttgaggtcaggagttcgagaccagcctggccaacatggtgaaaccccgtctatactaaaaaattcaaaaattacccggacgtggtggcgcatgcctgtaatcccagctacttgggagcctgaggcgggagaattgcttgaacccgggaggcagaggttgcagtgagccgagatcgcatcactgcagtccagcctggatgacagagtgagactccatctcaaaaaataaataaataaataaaaatgaaattaaaaaataaa

SEQ ID NO: 16777 - DNA, 2016 bp, Homo sapiens
  misc_feature (18)..(19): n is a, c, g, or t
  misc_feature (29)..(29): n is a, c, g, or t
cacaaggaggtcatccannggtctcccangtgaccttccctccaccccaggaagctatgacagaggccgggaagctgcccctaccgctacccccacggctggactggtttgtgcacacccagatgggccagctggcccaagacggggtccccgagtggttccatggtgcaatctcaagagaggatgctgagaacttgctggagtcacagccactgggatcctttctcatcagggtcagtcacagccatgtgggctacacactctcctacaaagcccaaagcagctgctgccatttcatggtgaagctcttggatgatgggactttcatgatccccggggagaaggtggcccacacctcgctggacgccctggtcaccttccaccagcagaagccaattgagccgcgcagggagctgctgacacagccctgcaggcagaaggatcccgcaaacgtggattacgaggatctcttcctctactccaacgcagtggccgaggaagctgcctgcccggtgtctgcccctgaggagacggagtcttgctttgtcgaccaagctggagtggaatggcacagtctaggctcgctgcaacctccgcctcccaggttcaagcgattctcctgcctcagcctcctgagtagctgggactacagcctccccaaagccagtcctgtgtcaccaatcaaaggaaaggaagccgtcagcagagatgaacagaataaccaccaaggaagccacttcctcctgccccccaaaatcccctcttggagagacccgccagaaactctggaggagcctcaaaatgctccccgagagaggccagagggtccggcagcagctaaaaagccacctcgccactgtgaacttgtcgtcactcttggatgtccggagatccacggtgatctcaggccctgggaccggaaaaggcagccaagatcactcaggggatcccacctcgggggacagaggctacacggatccctgtgtggccacatctctcaaaagcccctcacagccccaggcaccaaaagacagaaaggtccccaccaggaaggccgagaggtcggtcagctgcattgaggtgaccccaggggacaggagttggcaccaaatggtagtgagagccctatcctcccaggagtccaagccagagcaccagggcttggcagagcctgagaacgaccagctcccggaggagtaccaacaaccgccaccctttgcccctgggtactgctagagaacaggtccaccctggctctgggactcgctgccaggggctgccacactcctgaatgccttaacatttcttccatggccccacaccatggcatccgggggtcttcgggaacccgggaaatggaataaagatgtttttggggtctgttcctgcactcacccatggggtgagctggttattttagcaacaatcatcagagtgacgctgatggtttggggcaccagctatacatcagccccagtgccagaccttctattcattattttacgcctcagagcaaggccctcagggagggtcatcctccatgttttgaagaagagactgaggttcagagaggataagaggcgtgaccaaggccacagagctatgggtgtcagcaccaggatttgaagccaggtgaatccgagcccttttcccatatcatctgtttgttctgttgtctaaaagcacactgcaagccgggctcagtggctcatgcctgtagtcccagcactctgtggggccgaggcaggcagatcgcttgaggtcaggagttcgagaccagcctggccaacatggtgaaaccccgtctatactaaaaaattcaaaaattacccggacgtggtggcgcatgcctgtaatcccagctacttgggagcctgaggcgggagaattgcttgaacccgggaggcagaggttgcagtgagccgagatcgcatcactgcagtccagcctggatgacagagtgagactccatctcaaaaaataaataaataaataaaaatgaaattaaaaaataaa

SEQ ID NO: 16778 - DNA, 2289 bp, Homo sapiens
cttccctcccttctctacccaggtgaccttccctccaccccaggaagctatgacagaggccgggaagctgcccctaccgctacccccacggctggactggtttgtgcacacccagatgggccagctggcccaagacggggtccccgagtggttccatggtgcaatctcaagagaggatgctgagaacttgctggagtcacagccactgggatcctttctcatcagggtcagtcacagccatgtgggctacacactctcctacaagtaaggcctgggccgggatccagggcaggggcaggtgggctcttgggtttccttggagggggcaaggggtgcttcatgtcatagcttctcagaaagcagcagtaactgaggctgtggatctgagaacgggagctgctagccaagcaatgagtgaagcttttgtccgtagtggcatgttttatctgaggccagcctttgtactcctgtgttataaatgggggaaactgaggcacagcgaggttagtaacctgctgggtgttgcatggccagtgagtgaagaagcctgcatgggaacctggggtagtctggctgtagcagtgacgctgccggcccaagggctggggacttggggcagggatgagggggagtaggatgtcccagcccccgcagtgtctccgcagagcccaaagcagctgctgccatttcatggtgaagctcttggatgatgggactttcatgatccccggggagaaggtggcccacacctcgctggacgccctggtcaccttccaccagcagaagccaattgagccgcgcagggagctgctgacacagccctgcaggcagaaggatcccgcaaacgtggattacgaggatctcttcctctactccaacgcagtggccgaggaagctgcctgcccggtgtctgcccctgaggaggcctccccaaagccagtcctgtgtcaccaatcaaaggaaaggaagccgtcagcagagatgaacagaataaccaccaaggaagccacttcctcctgccccccaaaatcccctcttggagagacccgccagaaactctggaggagcctcaaaatgctccccgagagaggccagagggtccggcagcagctaaaaagccacctcgccactgtgaacttgtcgtcactcttggatgtccggagatccacggtgatctcaggccctgggaccggaaaaggcagccaagatcactcaggggatcccacctcgggggacagaggctacacggatccctgtgtggccacatctctcaaaagcccctcacagccccaggcaccaaaagacagaaaggtccccaccaggaaggccgagaggtcggtcagctgcattgaggtgaccccaggggacaggagttggcaccaaatggtagtgagagccctatcctcccaggagtccaagccagagcaccagggcttggcagagcctgagaacgaccagctcccggaggagtaccaacaaccgccaccctttgcccctgggtactgctagagaacaggtccaccctggctctgggactcgctgccaggggctgccacactcctgaatgccttaacatttcttccatggccccacaccatggcatccgggggtcttcgggaacccgggaaatggaataaagatgtttttggggtctgttcctgcactcacccatggggtgagctggttattttagcaacaatcatcagagtgacgctgatggtttggggcaccagctatacatcagccccagtgccagaccttctattcattattttacgcctcagagcaaggccctcagggagggtcatcctccatgttttgaagaagagactgaggttcagagaggataagaggcgtgaccaaggccacagagctatgggtgtcagcaccaggatttgaagccaggtgaatccgagcccttttcccatatcatctgtttgttctgttgtctaaaagcacactgcaagccgggctcagtggctcatgcctgtagtcccagcactctgtggggccgaggcaggcagatcgcttgaggtcaggagttcgagaccagcctggccaacatggtgaaaccccgtctatactaaaaaattcaaaaattacccggacgtggtggcgcatgcctgtaatcccagctacttgggagcctgaggcgggagaattgcttgaacccgggaggcagaggttgcagtgagccgagatcgcatcactgcagtccagcctggatgacagagtgagactccatctcaaaaaataaataaataaataaaaatgaaattaaaaaataaa

SEQ ID NO: 16779 - DNA, 1343 bp, Homo sapiens
cggggcagccagccccgccccattgacgtgcagaccttgaatcgaaacccaggctcctgcaggcactggcacagctacagcgagggcctcggccatccaagggtctcccaggtgaccttccctccaccccaggaagctatgacagaggccgggaagctgcccctaccgctacccccacggctggactggtttgtgcacacccagatgggccagctggcccaagacggggtccccgagtggttccatggtgcaatctcaagagaggatgctgagaacttgctggagtcacagccactgggatcctttctcatcagggtcagtcacagccatgtgggctacacactctcctacaaagcccaaagcagctgctgccatttcatggtgaagctcttggatgatgggactttcatgatccccggggagaaggtggcccacacctcgctggacgccctggtcaccttccaccagcagaagccaattgagccgcgcagggagctgctgacacagccctgcaggcagaaggatcccgcaaacgtggattacgaggatctcttcctctactccaacgcagtggccgaggaagctgcctgcccggtgtctgcccctgaggaggcctccccaaagccagtcctgtgtcaccaatcaaaggaaaggaagccgtcagcagagatgaacagaataaccaccaaggaagccacttcctcctgccccccaaaatcccctcttggagagacccgccagaaactctggaggagcctcaaaatgctccccgagagaggccagagggtccggcagcagctaaaaagccacctcgccactgtgaacttgtcgtcactcttggatgtccggagatccacggtgatctcaggccctgggaccggaaaaggcagccaagatcactcaggggatcccacctcgggggacagaggctacacggatccctgtgtggccacatctctcaaaagcccctcacagccccaggcaccaaaagacagaaaggtccccaccaggaaggccgagaggtcggtcagctgcattgaggtgaccccaggggacaggagttggcaccaaatggtagtgagagccctatcctcccaggagtccaagccagagcaccagggcttggcagagcctgagaacgaccagctcccggaggagtaccaacaaccgccaccctttgcccctgggtactgctagagaacaggtccaccctggctctgggactcgctgccaggggctgccacactcctgaatgccttaacatttcttccatggccccacaccatggcatccgggggtcttcgggaacccgggaaatggaataaagatgtttttggggtctg

SEQ ID NO: 16780 - DNA, 1324 bp, Homo sapiens
cttccctcccttctctacccaggtgaccttccctccaccccaggaagctatgacagaggccgggaagctgcccctaccgctacccccacggctggactggtttgtgcacacccagatgggccagctggcccaagacggggtccccgagtggttccatggtgcaatctcaagagaggatgctgagaacttgctggagtcacagccactgggatcctttctcatcagggtcagtcacagccatgtgggctacacactctcctacaagtaaggcctgggccgggatccagggcaggggcaggtgggctcttgggtttccttggagggggcaaggggtgcttcatgtcatagcttctcagaaagcagcagtaactgaggctgtggatctgagaacgggagctgctagccaagcaatgagtgaagcttttgtccgtagtggcatgttttatctgaggccagcctttgtactcctgtgttataaatgggggaaactgaggcacagcgaggttagtaacctgctgggtgttgcatggccagtgagtgaagaagcctgcatgggaacctggggtagtctggctgtagcagtgacgctgccggcccaagggctggggacttggggcagggatgagggggagtaggatgtcccagcccccgcagtgtctccgcagagcccaaagcagctgctgccatttcatggtgaagctcttggatgatgggactttcatgatccccggggagaaggtggcccacacctcgctggacgccctggtcaccttccaccagcagaagccaattgagccgcgcagggagctgctgacacagccctgcaggcagaaggatcccgcaaacgtggattacgaggatctcttcctctactccaacgcagtggccgaggaagctgcctgcccggtgtctgcccctgaggaggtatgtatatgacaggaggctggcacctcccacctggctgaggggcaggagtggaggtggtcaacagcttccagaggaggctccttctagaatgagaatgcgatcctacagcttggtgctttaaacctttccagtgcttttgcaacaccgagattaaaattcaaactacaatctgaggtcctctttctgcctgtcacctacccagcgccagccctgctgccataccgtctgttgttcagacacaccaagctagcctcggggtctctgcgtgtgccggccccacctcaggtcctttgcacaaactgtgtgcctgcccctagatttcccatgtcttcattcatttctctttcaagtgcctccttccccagccccagacctaaagcaacaccttctggattct

SEQ ID NO: 16781 - DNA, 930 bp, Homo sapiens
  misc_feature (18)..(19): n is a, c, g, or t
  misc_feature (29)..(29): n is a, c, g, or t
cacaaggaggtcatccannggtctcccangtgaccttccctccaccccaggaagctatgacagaggccgggaagctgcccctaccgctacccccacggctggactggtttgtgcacacccagatgggccagctggcccaagacggggtccccgagtggttccatggtgcaatctcaagagaggatgctgagaacttgctggagtcacagccactgggatcctttctcatcagggtcagtcacagccatgtgggctacacactctcctacaaagcccaaagcagctgctgccatttcatggtgaagctcttggatgatgggactttcatgatccccggggagaaggtggcccacacctcgctggacgccctggtcaccttccaccagcagaagccaattgagccgcgcagggagctgctgacacagccctgcaggcagaaggatcccgcaaacgtggattacgaggatctcttcctctactccaacgcagtggccgaggaagctgcctgcccggtgtctgcccctgaggaggtatgtatatgacaggaggctggcacctcccacctggctgaggggcaggagtggaggtggtcaacagcttccagaggaggctccttctagaatgagaatgcgatcctacagcttggtgctttaaacctttccagtgcttttgcaacaccgagattaaaattcaaactacaatctgaggtcctctttctgcctgtcacctacccagcgccagccctgctgccataccgtctgttgttcagacacaccaagctagcctcggggtctctgcgtgtgccggccccacctcaggtcctttgcacaaactgtgtgcctgcccctagatttcccatgtcttcattcatttctctttcaagtgcctccttccccagccccagacctaaagcaacaccttctggattct

SEQ ID NO: 16782 - DNA, 420 bp, Homo sapiens
tgtgggtggggcatattttcttataacgcttagtgggcgtggcctaggtactaagaaactgctattcaagggatggtccctgagacctgccttccagggtccgtgcaggacctttccccctccctagtgctgagctacaggccccttccgccctgcagaaggatcccgcaaacgtggattacgaggatctcttcctctactccaacgcagtggccgaggaagctgcctgcccggtgtctgcccctgaggaggtatgtatatgacaggaggctggcacctcccacctggctgaggggcaggagtggaggtggtcaacagcttccagaggaggctccttctagaatgagaatgcgatcctacagcttggtgctttaaacctttccagtgcttttgcaacaccgagattaaaattcaaactac

SEQ ID NO: 16783 - DNA, 812 bp, Homo sapiens
gaaattgatccagacccattcccatctcccagcttcctccagggcggggcactagagtgcatcatcaaacgaggaaattgatccagaccccttcccatctcccagcttcctccagggggacactagagtgcatcatcaaacgaggaaattggtccagaccccttcccatctcccagcttcctccagggggacactagagtgcatcatcaaacgaggaaattgatccattccccacaggatccacctgccaacttagcactgctggcattcatggtagtaactaaggggaatccctccaagcagcatggtggaatggagagagcaagcagactctagcttctgacaccatcacctatgaactgtgtgacccatgtaattcatgtaagctgctgtgtcttagagtccatgcctctaaagtaagaatcatcatgatgcttagttcacagagaattaagtgagctgacataggagagtgcctgatataacgcaggactcagtaattgttagtttcctttctcttttggtagatgaaccacagtttacaagcagagtctgagaaggttcttagaggagcaggcactcgtgcttgtccctgactaagctcagaccattgtctctgtagacactaaagatcaccaagtgcagccctgcacagcccatcccagtgagtactaggctaggtttttaatcctagctcaggcacttattagctgtaggagtttgagcagttttttaatctccttggattcagttttctcatctgtaaaattgggttaaggataattctttccttagagtaagaaaaggaaagg

SEQ ID NO: 16784 - DNA, 503 bp, Homo sapiens
cagagtctcgctctgtcgccaggctggagtgcagtggcgcgatctcagctcactgcaagctccgcctcccaggttcacgccattctcctgcctcagccttccgagtagctgggattacaggctcccaccaccatgcccggctaatttttttgtgttttttagtagagacggggtttcaccgtgttagccaggatggtctcgatctcctgacctcgtgatccgcttgcctcggcctcccaaagtgctgggattacaggcatgagccaccacgcccggcctcatcaatagtattttcaaagcactctatatgctttgtcgtctaccacgttttgcaatgtgcttggcataaaccaatgcccccatggaaagataatacattggaagagtgcaactgggcaaaggtgaagttaaaggaagtatctgaaattccaggaggactcagggtagttgtcggtataaaaccctgcctcacagatcgtttggcttggggctctctctgcagc

SEQ ID NO: 16785 - DNA, 673 bp, Homo sapiens
aagctttctgtcatcaactattgggttataggaaagataggataaattctttctgtttatttccctgcttttgtggtaatgaattgatttccaacaccctccaacagtgacagttttattgttattacctttatggactgagatatttaaacatactttatatattttaatccattatatatgttacgtctgtatgtatgtatattgaacactgaacattattccatctttgtcctgtcaaagctttctcaggcttgctccttagtccttttgctataatcacagcagtcttttttaagcttccatgtttcctgtgaaacagcatttcgggttcattttgtacatttcatgcttcagacctggaatcagccactttcccaggaagttctggtagtgttagcaggaaagcaggaaaatagtgtttgaggataatattctagtactaatagcactcattgctactgaattgttcattgtttcttaggccttttcagtggacagagctaagaaataggagtgtgtgtgtgtgcgtgtgtgtgtgtgaagaaagtgcttcaaaccataaaatgtgttttagggtcttctgaaagttgctgcataattttaaagagttttaagctaggctttataccacattccccttaactacattatgaggtatccttatcttctg

SEQ ID NO: 16786 - DNA, 758 bp, Homo sapiens
acaagtcctgcatgttgcctctgatgggacaagatgactgtttttacctccatatcagtggtttagcatttagctacggtgtataaatgaggtaatgagagggacattcaacaaacaaaagaattccaacatccatccaaatagcatttaagaactgcccccactcccttgcctttagatttttccttcagtgtctgtctcaaatgatggggtcagactgttcattatgtctgatttcttctccccagctccattgcctgtatccattccttccttcttcttagagttggtggtggccagactagaccagggagggtgctgctgacaatgacattgtaattgtagaaatcgtgtgcctgacacaggtctaaggactttccaaagtattagtcagtcagtcagtcctcacacaggattgtaggtactgtcataactccatttcatagttgaggaaaccaaggaccaaagagaaataactcacatgaagtcacacacttgataagtgatgggatgtctcatcccaagccctgccctcttaaccaagatggccttgtgtctgatccatgtcagaaaacagaatagccgacataaactcatttgttagccaggtgtggtagcccacgcctgttgtcccagctactccagaggctgaagcaggaggatttttgagcccaggagtctgaggctgcagtgagctatcattgtgccactgtactccagcctggacaacagattgaggccttgactctaaaaaaaaa

SEQ ID NO: 16787 - DNA, 258 bp, Homo sapiens
gactgttggggctcagtgagttacacaatcctagttattctcaaaattaagtcatggctgtgctccccagtggcacagctctgaaaacaaattgggagcctggtagattagacctgcagtgcaatggatcatccctcttactttctggtgcaccacatatagtcagtctcctagggtttagaataagggccaaaacaggccgggcgcggtgctcatgcctgtaatcccaacactttgggaggccgaggcgggcgtatc

SEQ ID NO: 16788 - DNA, 671 bp, Homo sapiens
ttaggattttgcagcctggactgggcttggctggagtccctcttctggtctgcccggtggtcactcacgtgactacagccagctggtcagcggcctgcctggaacagccccaccagggtcccagggccgggccccgctgtcacctgggttctcttccgtgtcgtccccacgcctcctcaggtccccacagcagcgtggccacacatttgatggcctcaggggaccaaagtagaagcactgagacatcctgaggcttgggccgggactgacgtggtacccctcacaccacactttgtgtactggggcaagtccaggcccagccagtgccagtgctgacttctctcagtgcctgcttcactctgtctcgtcagcacccccttttgcactgcctcccccgtctgcccaaagttcacccacacaccctgctccgctggccaccaccccgatcccagccatgtcctcatcctggctgtggccatctgcctgcaatctcttccctgtaagacctcagttggaccaggtgcccacctgctctgagctctccagagcacaggtggaggccatggtctccgcagaccccgcgggcctgtcaccggtcgagggtcttgactgcacattgtccaggttcttggccttttgaacaaagaattggacaaaacacccagcaaagc

SEQ ID NO: 16789 - DNA, 697 bp, Homo sapiens
ggttcaaatgattttcctgcctcacctcccaagtggttgggactacaggcgcctgccaccatgcccggctaatttttgtatttttagtagagacggtttcaccatgttgcctagggtagtctcaaactcctgagctcaggcagtcatcctgcctaggcctcccaaagcgctaggattacaggtgtgagtcactgtgcccggccgatatgcctgttttttaatcaaccaatttttaaaaaatttaccagagccaactcggaattaacatttgtaactgctaatattgagtatatgtatgtgtttacttaacaagtaaactctttacttgcactatatcatttaattcttaaaaccaccctatgaaattggttcagtaatatattcccattttacagatgagggaactgaagcatcaaactgaaccgcgacttgtccaaagtcacatagtaagtggaggtggaactgggctttaaatccaagcctacatacagactagagttcacacttttaggcttggcataaactgcctataaactataaaaaagtaaaactccataaaatctcaggtacttggactaccttcagtctgagaggtgggggatgggggagacagcaaatttttatgtttattaaaggctggaatattaaagcaaaaacaaagttcctttttcttttttttaatttaaatttgtatttt

SEQ ID NO: 16790 - DNA, 370 bp, Homo sapiens
ctcatggtacccctggcctgttctggtagattcactcatgcatcatcaccagtcctgtggggaagtggaaatttggtgtacataccaggtgcactttcattcttctcaaaatgttatgacaaatagcaaagagaacaccttttcttttatcattagctcatccttaagcatctcgttaggggtaaagcaattaaaaaaaaaaaacaagttttagctggacgtggtggcgtgcccctgtcatcctagctgctctggaggctgaagtgagagggtcccttgagtccaggagttggaggctgcagtgagctatgattatgccactgcactccagcctgggtaacagagcaagactctcatctctgaaaaaaaa

SEQ ID NO: 16791 - DNA, 433 bp, Homo sapiens
gagaactgccctggggccaggcctggaggagatgagatacctggggatgaggcggccatcgcacagcgggacacatggggctgggaagtgcagggacaggatgcgggtagagatgtgggggccagcctcagcagcataagaggacgggagtggaggggactgtgccagagagtgagcggggaaggtgaggtggggacagcccagcggtcacagtgggcagggtaagggccactccatatgggacagtgtggctgtgaaagccagacgggccgggagcggtggctcaagcctgtaatcctagcactttgagaggccaaggcaaggaggatcccttgagcccaggaggtcgaggctgcaataagctatgatcatgccactgctctccagcctgcgcgacagagtgaggccctatctctaaaaaagtaaagtcaga

SEQ ID NO: 16792 - DNA, 809 bp, Homo sapiens
tgaagatagggatgggcagatgctcggcctgggctggactgcaggtcaggtgagcgggccgaaagaggggagaggaaactaagtggggagaggaggctggatgagtggggtcgggagggccaggctcccgtggaggcctagaatcacagtggcagctgtgcttcccaggggctgcctggcagcaggaccacgtggggctcccccacttagtgcttcttttcacaggaagactcttgaaaggatgctttctgttcctgtggacatgtacacagggttcattactcacaggtgatttacagttggcacttttataataaaatcctctttgtagtgtatttatgattcattaaccatgtaaaaccctgtggacgttaagtaaatactgtggactcttgatctctcacggctgtgaaaggaggcgtggggaggagagagcaacttagcctcgaggtggtgcggccaggtgaacggggaggaccatctgtagcagtgctgtccaatagaagcaaaaagaggccacatatgcaagtttagatttttctagtaaacacattttaaaaataaaagtaaaagcagtttttactaacatgtatttaatttaatgaaatacatccaaagtattagatttcaacatgaaatcaatatttgaaaaatcattagtgaactattttgcattcttccttcacactaagccccagtgtctgtgtgtcctttatgcagccaccacatctccactcgcatgagccgtgtggcaggtgcccggtggccacgcgcagctgctgtgagggacagtgcgtggcgatagcctt

SEQ ID NO: 16793 - DNA, 1025 bp, Homo sapiens
atcgcttgaacccaagaggtggaggctgcagtgagccaagattgagccatggcactccagcctggggacaagagagacttcgtctcaaaaaaaaaaaaaaacaaaaaaacatactttttgaaaattagtggtctgtaattgtaatcttgcagtagttgtttattgaatactagcataagtaaggattgaatgggatagtaaaggttgtctttgcccttgaggaactcaggctcattgaggggggtaccgttccttgaatgtttcctttttttctgcagcaaatacacacattcaaaacatctactgcacacaagcaaactcagagaggaccagcctggctgagaggagttgaccatccccctcaggactgacttcctttccttcaacattattatataattaaagtcctagactatatagaagtgacaggtatgctctctatgcatttattattatgggaggtgttttacttggaagcagtactttctccatgttaagtgctttgagctctgaagggccatcttaatccattctctctgacctcagaggttgtcaagacctatagaagagtttctatcaagccacattaggaaaaatgtggatgtctactttttggcttcactttttttaggatttgtatttaaggtaatttctttgagaacaggtaaaaggaaatggttcaattaaaaaggaaagggtcatttaagtaagttactaatttttgtgaacacctatatgtcttagatatgacctgatgggcagagaaggcatactagctttaaattaggattaaatcccggttttacaattaccatgtattgcatttcccaaaataaactactctgaatcttggtttccttatccataatgtagggatgataaaacttgcagtataagctaatgttttaggatgcatttggagactgcattataaggttacagagaagataacaacagaaacatttgagagcttactttgcgcctgacactgtgctaagagatttcaagtattaatatagttataa

SEQ ID NO: 16794 - DNA, 526 bp, Homo sapiens
ggtcaggctggtctcgaactcctgacctcatgatccacccaccttggcctcacaaagtgctgggatttcaggtgtgaaggtgtgagccaccgcatctggccttccttgtggtttttttgtttgtttgttttgttttgtttttttgagatggagtctcactctgtcacccaggctggagtgcagtggtgcaatctcggctcattgcaacccctgcctcccctcaggagtgtgagccagggtgatctcccactcctgacctcaagggttcaagtgattctcgtgcctcagcctcccgagtagctgggactacaggcacttgccaccatgtctggctaatttttgtatttttagtagagacagggtttcagcatgttgcccaggttggtcttgaactcctggcctcaagtgatccacccaccttggcctcccaaagtgctgggattacaggcgtgagccaccacacccagccccagcagaggtttcgaggtagaatttctcccagaatgctgtggctcttctgtctgtc

SEQ ID NO: 16795 - DNA, 377 bp, Homo sapiens
acagacccagggggaaatggagcaaaccaaagcagtgattacttggatctctatactggacaggctcactgtagcaaaagagatgcttagaagcagactcagctgtaggacatgaaagagaatctaaccatatttttgaggcatggtggtgtccaaaatgtatggtgataggagatgggaagcagcgaagataaaaagttatccttgtggtgttccaacttgaaacagtgggttaatgtctggtagtcaggttaaacacagagagctaccattttggaggttggctgtcaagatatagacacttggatgttaggaaataagatagagatccagttactgagtaaaatcacttatatgattatcttctttaaaaaaaa

SEQ ID NO: 16796 - DNA, 358 bp, Homo sapiens
aaatatgaatgcatggtccattcaaaggaaaaaacaaaatccccagaaatagtctctgaagaaatataggcactgagcttactagataaagacttttaaatagctgacttaaattttctcaaggagctaaagaaaaacatgaatggatgactaaaataaatcaggaatattatatatgaacaaaatgagaatatcaacaaagagataatatattttaaaaagaagtaaacaaattatggagctaaaacatacaataacaactgaaaatttcactagaagggttcaacagcagatttgaagaaacagaagaactaatcatagaacttgaagacaagtcatttgacattattgaatctga

SEQ ID NO: 16797 - DNA, 111 bp, Homo sapiens
gaaggcattccagagatctttgaggctgtccctcccatcacaggcccagggctctaggaggtcagattggttttcaggagggtttgtggggtggtactaattctgtaggca

SEQ ID NO: 16798 - DNA, 169 bp, Homo sapiens
cacacaatattcaagctattctgtaaactccccgtagcagaaattttgtcttatttactactaaatccccagtatctagtataatgtgatctatgatggatactaaagagatattataataaataattacccatttttacagaaaattatgttttttatcatcccgcat

SEQ ID NO: 16799 - DNA, 400 bp, Homo sapiens
aatactggtaagcatgtaaaagggtggtaaatatataggctttaagtttagatagatctaaatattattaaaattaccaaattattgtttttaaaaagtattagtttcctaggacaaatagagatttttagataaggctggatttgtaatactttaagcaacaggtcacagtgcttaagtatttaatgccgatttggcaagcagctgatgttttatataatgctgtcgggtattttatatttgcgtgtattttctgatgcactggatccagcacttcatgtcacgtcatatatctgtttataatgtatacaaatgtattttcatatatatttgatgtttgatggctttgaaactttaatcttgaaatagattttaaatttttattaaaactatttaaata

SEQ ID NO: 16800 - DNA, 261 bp, Homo sapiens
ttttttttttttttttttttgagacggagtctcgctctgtcgcccaggccggactgcggactgtactttgcttttttctagaattcaatttttaagtttacaaccccaattccttataaaagaaacaggatgactaatattcattgaaatcaccatggataatcttatgtaatccctacaataaccacacaagataaatactactactatcaccatgttacagtgaacagaagcataattacattaaataacttgcccaga

SEQ ID NO: 16801 - DNA, 690 bp, Homo sapiens
gcctgaccatggtggcgtatgggcttgtggagtgcgtggagtccaagaacccgatcagaccccacgctccaggacaggtcaaccaggcagaggatgaagaaatacaaacaaaaatgtgagagcagtgaggtccgaggaggatgaactcagaaagcaccagccagagaattttcttagaagatgcctcaggacatagagcggctcctcatcaccatctcagcacaatttggccattctgaagagatcatgttatttcactctttatgtattttttttctattctaacaaatttttcgtccaccatcttaacagagatcaagtgtatacatgaaggtatcagttcatttaattttagatgcaaaagaaaaaggtctaacgtacaatcagccaattagaatttgcctgaaatcatagactcaccctagttttattgctgtagttgtttttaagaattggaagcctgcttaaaaaatgtagttgagccccataattttacaaatgggcgaacttttaaacttctaactctacttggatcaaaacctcatacattttacaaaggggtcctgacaagtcagctgactcaacctcacagagtcagggggtgacaaagccagactggggctcaggattcctgaaacgtgtggggtctgcgtttctaaataaagacggttatttaatggaaaaaactcc

SEQ ID NO: 16802 - DNA, 629 bp, Homo sapiens
attcttttgcctaattcttgtttatctgtcaagattcaattcaggtgtcatttcccctgcaaactatttcttgatctgccaaaaagtatctctccttatgctgtcctggcatctgtctactgggcatttactgttgtgtattggaactgtgtgatgacttgtcttgcacatttctctcttatctgctcagagccagagatcatgtcatactatgtctgaatctttttaatgctgatattctgatatatgctttgcatatagaaaataataaaggtttattgaaactgataaaaataatctttttatatttagtcattcagaatcagctaggcagtccacttctgactaaaaaaatgaagttatttttctgtgtgtgtagtagaagttcagtaattcttctgaatactctattgtttttaagatcttgctatattaattttcataattgcatatttaagtctacttaatttcttcatatgacaaacaattttcattttattttgagctaataaggttaacatgattatgagttgtttacattttgtgaaaagttttactttttaagtgatcaaacatctggtattttccaatagtggcagaagtagtattacatcactgttagagtagca

SEQ ID NO: 16803 - DNA, 355 bp, Homo sapiens
agagagcttgtgcaggaaaactcccccttaaaataaccatcagatctcctgagacagactatcatgagaacagcacgggaaagacctgccctcgtgattccattacctcccaccgggtccctcccacaacacgtgggaattcaagatgagatttaggtggagacgcagtcaaaccatatcagaagataaacattaaatagcaaaaagacatcaaatattcataaattaacatataatccaatgatatctcaattaaaaatttaatagctttttaaatctgaggaatgcaggagctgattctaaagtttttaataataaaaagcacaagaatagccaaaacatttaaaaaagaaaa

SEQ ID NO: 16804 - DNA, 588 bp, Homo sapiens
atatgtgggttggtcaagcaatgaatacctactcagtaaaaatacaaaattaaattctattggtctagatacagggtttctcaacagcagcactattgacatttggggccagataattgactttgttggtggtggctgtcctgcacattggaggatattgctgcaatcctggcctttacccactaccagtagcatcctccccgaagatgtcacaaccaaaagtgtctccagacattgccaaatatcccctggggagcaaaaatgcctgccccgggttaagaagcactgagaatttctagtagggagattaaaaagcaatactcagaagggagaaaaatagactttatcctgtaagtaacattaagatagaaacattttatagaattcccatgtacttcttacccaagagaaaagagtggttttgtccaccaaaaatagttacaagaatgttcatagcaactttattcataattataaataatggaaactacaaaaatgctcgacaccaaaatgaataaataaattggaggatgtacatacaatggaatactgctctcagcaatgaataaagtgaacatttaacgcaga

SEQ ID NO: 16805 - DNA, 649 bp, Homo sapiens
tttcattgaccattatattagggttggtatgctggtaaaaagttttcttagtttttcttcatcaaagaatgtcgtaattttttttttcatgtctgaagagtatttttactggatataggatgtgggttcacagttcttttatttaagcacttcaaaaagtacttccagtggggcgccaagatggccaactaaaagcagctatggtgtgtggctcttacagagaggaacgaaagggacgagtaaatgcagcacctttaactgaaacatccaggtacttgcattgggactgatcagggaaacaactcaacccacagagaatggagaagagcaggacagggcagggcagggcaacagcttacctgggagcaacatggatacaagagaacctacccctgcccagggaagcagtgagtgaatatgtgaccctgggaaaccatgcccctcccacagatctttacaagtccggtcaggagatccccttgtgaatccattccaccagggccttcggtctgacacacagaactgtgtatagtctcaacagaaaagctgctcaggcatgcatggagacccgggaactttacatactctggctctagtatccctaacaaaggtgattgcaacttaggcagggcgggagcttggacatcca

SEQ ID NO: 16806 - DNA, 716 bp, Homo sapiens
  misc_feature (711)..(711): n is a, c, g, or t
caaaatctgagccagatcaatttaggaagtttattttcccaaagttaagaatgcacgcaagtgaaatggcctcaggaagtcctgacatgtgcctaaggtggttgggacacagctcggttttatacattttagggagacatgagacatcaatcaacatatgtaagatgaacattggctcagtctggaaaggtgggacaactcgaagcaaggagggagcccccaggttataggtagatgagagacaaatggtcgcattctttcgagtttctgatgagcctctccaaagggggaatcagatatgcatttatctcagtgagcagggggtgattttgagtagaatgggggcaggttggccctaagccgttcccagcttgactttcccctttagcctagtgatttgggggccccaaggtttattttcctttcgcgtagcttcgccactaatgtgtcctggtgtcttctctcctcagcctgtttctcatcctggaaactgaggtgtgctggcgcagggcgatagcgcagtggggtggggttgggaggaaacccttatctgtggccgatggccctccgttgttctattattaaaactctgggaaactgctattcttaatttatttttaaagaccctgagaagcaaatctttaatttttttgtttttgtgagatcgcaccattgcactccagcctgggtaacaagagtagattccatctntaatt

SEQ ID NO: 16807 - DNA, 488 bp, Homo sapiens
agtaaaaaaaagctgaatacaaaaaaagctgaatatgtgttttatatccttgtgaattcaaagtaaaaaggaaaaaaaactcaaaaaccaaatatatgtatgcagtttgagcccaaatttttaattaagtaaccatataattacatgtagacatgtataaaccttgagatatgtaaagaccagaaaaatatttaaaagttaatagttacatcatctgtggtcacaacaccctgaaaatgcctaatattggaaacttaagcaggattgatccaggttattacttggatgggagaccagatgctataggctgaaaaaagaaagcataagtacgcacaagttaatacttaataattatctcctaatgataggactataagttctatctcttttctttacattgttcagtattttcaaatttccctttgaaaatgtgttatgtacttgaattattagaaaaaataaatgtcatttaaaaagcaaaaaaaaac

SEQ ID NO: 16808 - DNA, 234 bp, Homo sapiens
tgaatcctaaaaattagcaattgatagaattttaaataagtgagcatgcaaaggaagatatgattataaattgtgataaggattgtaatggaaaaataaaaacatatgagaaagggtaaagggaccaattttatatcaaatcaagaagtatcttataggaagtaatattcaaattgtgatctgaaggatagataaaaatttctagaacacagggcagagattaaattggttaga

SEQ ID NO: 16809 - DNA, 488 bp, Homo sapiens
gacaaattcattcttcatcttagccagcgccatggagtgagtccagctctctgtgtctggccccgctgtgaaccccctgaggctatccacagttggatatcttcctgttccttccctgccctaccctcttcaaatgcaaacttgggggggctcaagattattccataccctttatctccaagctagtccatgcctgttggtatagacatctaccctacacacacctgcccgcaccctctctattctcatctccttttttgttcttcatctcaaacctccacactgctgctcaaaaatgaacaaaggtgaatgaggaaaccagggcatcatgacacctaaaagatctttgtgacttcccagttgttgaaagacatgattgggaaagagtggctgagtgtgcaaggtggattccaacccagatcctccggggcttgtaagagttgagagaaaagcagtaagtgtcccaataaatctttattgatttaaaa

SEQ ID NO: 16810 - DNA, 1012 bp, Homo sapiens
gggggctgtatgtggaattgcaaggccaaagacatctcgggtcaactcttctcaggaccagatccaagtcgccagtgagaacacacattcaggcagcctccaccagcgccctgcctcaggagcgaggctccctgcttcatgtgggcaagagctgcccttgttttcccagcgggcagttgggggtctggagcctaggaagcaaagtgaagcacacactcctgcttccttccttccctgcagttgagacgggagtcttactttgttgcccaggctggtctcaaactcctggcttcaagcaatccttccactttggccttccaaagtgctgggattacaggcatgagccaccatgcccagcctccttctcttactagctgagaactaagagaagacactctggagacagaggaggaaacagtgacgatgccacatgatgaatacataatggagggtgaagacaaggctccgtcaggggcaccaaggagggaaacccagttctgtggggaaggtatggggcagcttcacaagcccagtgtctgctccctttgtgggagacgtgttgtttcagcatccattcccccttcttttaggaaaagtgcttgaatttccttttcatggaaccacccacctccctctcatccatgcattctattcccagtatcaggggtagacaagtgacttcaggcttggccaattagggttctgactcttggtcaaatcagagtgaatcctgagtcatttgtaaactccaaggaaagggcttgctttgttttctgttgaatgcagtgctctgagatagccggaaatgaaactgctctcttgccacactgaaggctagagaagggcctggccaggaaatgatgccagtgatcaggggtggagctggaagagggggagtgaggaggcccagacatcttgggagccccaaattcacctcaggatttaacttctccgctgctcagccaataaattcctttcttccatgacaaaaaaacaacacaaaaaacgggcg

SEQ ID NO: 16811 - DNA, 937 bp, Homo sapiens
gggattacaggcgcccaccaccacgcccggctaatttttgtatttttaatggagacggggtttcaccttgttggccaggctggtctcaaactcctgacctcaagtgatccacccacctcagcttcccaaagtgctggaattacaggcgtgagccctcgcgcccagttcaacatctttcttaagtgggcccaaggttggggggaaaatctcaccgtagagatatttgttagatatcgagcatgtgctgaagaaggcatctgtgatgattaattttatgtgtcagttggactggaccatggggtgcccagatatcagcttgaacattactctgggtccatctgtgagggcgtggggtaggactggcatttatgttggtggagcaagtaaagcaggctgcctccctaacgcaggggatcctcatccatcagctgagggcccaaatagaacaaaaggctgagttggagggcgcccctcctgcatgaccaactttcaagtggtgacatcagctttcttcctgtttttggacttgaactgaaacatcagctcttcctggatcttcagcctgctggccttcagactagaactacaacctcggctctcctgggtctcggcttgctgactcaccctgcagaacttgggacttgtcagcctctacatttgtatgagccaattccttataatgtctttctgtatatatacatatatctccacatcttattgttctgcttctctggagaaccctgagtaatacagcatcattccaagatcagcagaaatgttagtgcttctggggaattactgcaaagggtacctgaatagcagcacatgctctcagtacccccgccttctgttgtctgctgttgcctgctccctccccaccctttgggttgatttcaggatagagatatggggatgggactggggttgggtgtgcggt

SEQ ID NO: 16812 - DNA, 770 bp, Homo sapiens
gggggctgtatgtggaattgcaaggccaaagacatctcgggtcaactcttctcaggaccagatccaagtcgccagtgagaacacacattcaggcagcctccaccagcgccctgcctcaggagcgaggctccctgcttcatgtgggcaagagctgcccttgttttcccagcgggcagttgggggtctggagcctaggaagcaaagtgaagcacacactcctgcttccttccttccctgcagttggggatcctcatccatcagctgagggcccaaatagaacaaaaggctgagttggagggcgcccctcctgcatgaccaactttcaagtggtgacatcagctttcttcctgtttttggacttgaactgaaacatcagctcttcctggatcttcagcctgctggccttcagactagaactacaacctcggctctcctgggtctcggcttgctgactcaccctgcagaacttgggacttgtcagcctctacatttgtatgagccaattccttataatgtctttctgtatatatacatatatctccacatcttattgttctgcttctctggagaaccctgagtaatacagcatcattccaagatcagcagaaatgttagtgcttctggggaattactgcaaagggtacctgaatagcagcacatgctctcagtacccccgccttctgttgtctgctgttgcctgctccctccccaccctttgggttgatttcaggatagagatatggggatgggactggggttgggtgtgcggt

SEQ ID NO: 16813 - DNA, 269 bp, Homo sapiens
agagagttcggaagcactcttattatcttagcagcagcatgtgtggaaatcatttctcattacagcggagggcaggcattgtgcagagggttaagtgggcctgcttgaagttggttgttgttagctctcatgtctatgccttggtccctttcccctcaggacttggagagcaagctgtttgagtctgatgcaacccctgggctttgactatcatgccaaaaggcagcaaataagtgccttttcttcccttcagaatacatggacaatcc

SEQ ID NO: 16814 - DNA, 676 bp, Homo sapiens
gactatcatgccaaaaggcagcaaataagtgccttttcttcccttcagaatacatggacaatccaaagctctattagtctattattcagaatgaaaagtgtttacaatattcgtcctcttactcctcagtatgtgagactgttcctcgtagcaggtaatttcttccgaattcaaaaactcctcatggaagcatctgtttttgtcatcaaggagggggctgtatgtggaattgcaaggccaaagacatctcgggtcaactcttctcaggaccagatccaagtcgccagtgagaacacacattcaggcagcctccaccagcgccctgcctcaggagcgaggctccctgcttcatgtgggcaagagctgcccttgttttcccagcgggcagttgggggtctggagcctaggaagcaaagtgaagcacacactcctgcttccttccttccctgcagttggtgagtatctggctcagtttaggttaatatcatctcttcagcctggcccagtttaccactatgggaaggagcccagcagcaggggctgccagacctggaaatagatctgctcattgcagtgtggcaggtgcagagaaacagagccagctatagctggaagagaatcttagggcacagagatgcaccaacatgtatgaacaagtcgagacccaagtaccaag

SEQ ID NO: 16815 - DNA, 603 bp, Homo sapiens
agcacctggcttcataaccatctactgatagatgaatgaagccatttaattgtatgggtagaaccacacaaaatatgttggaagcaagtctcacttctctggaattaaatgtttctttggcactacgagatcttactgttcaagctgtgagatttaaagggaaaatgcttcctgctaattattaacagttgccctgtaagagcagagccattatggggtcccgaaccctggcatgctgcccctcccagcagtgagcaacggcagcaagccgggaggaactttaaggcaactgtggccctggcacccacggacctcagattacccaaagagggttgcagtatcagggccaatggagtagggagtgggtaaaaggatttgaaatgagattataggacctaaaagattcttgcttttgttcaggaaataatttaccggttttctttaaggcagtgagacaatccagttgagggtctggagtggtagatcattgccgtgggcctcttcagatacttaaaaataagttgatctgtagttgtgtttgttgggcttcttgtttgtttttttatttaaaaaaaaaaaaggaaagaagaaagacaggaatgg

SEQ ID NO: 16816 - DNA, 304 bp, Homo sapiens
acaagttccactcagttcccacaggttctactcatcctagcaagttccttgcttcccccatttcccatgtcttccctttccaactgccagacacaaaagaaaccgcctcctataatccctataataagccccttattttgaatattaagatatgtgtatgtgtattagatcctagtggttcttttctgatcagaccctgattaaccataccatcctacctaatgctattcccccatcctagttctatcatattatccctttttttgtttgttgtacttagctggtttatctttgtcatctctca

SEQ ID NO: 16817 - DNA, 268 bp, Homo sapiens
tgagtctgtagagtgaagattgcttcctccaagtattcttagtcttaaagacggcacatgaaacatgtcatatttgagaagatacattataaacacatttcttatttgtttcttataatattcttttagaagcagaaagcaggctgggcacgttggttcacacctataatcccagtactttgcaaggccaaggcaggtggatcacttgaggtcaggatttcgagaccagcctgatcaacatggtgaaaccccgtctctactaaaacta

SEQ ID NO: 16818 - DNA, 462 bp, Homo sapiens
aaaacctcattaataattttatttgattacattttgaaaagaatgtattttggatacattggcttaaacaaaacatgattaaaattaacaccatgggtttctttttgcttgcttaacatggctactagggaacctaaaatgacatctatggccagcattctggctcacgttgcattcctgttggacagtgctgtcctggagagttgttcttatacatcacaaattgggcttttctgagtccaaagtgaaaaggaagtcaggtcggtttaggtgttctcattattcatgaagagagaggatgctcctttctcaggagagtcaagcctttcctatcacttgggcataaaaaggcctcgttgggagttgtcaagcactgaaatcctcgtgattggggcatgcattcttgtccccattttacggatgcagaaatcaaggctcagagaagtcaagtggctcacaagt

SEQ ID NO: 16819 - DNA, 723 bp, Homo sapiens
cactaatagatccaaaaggagaggtagactacaatatgataatagtaggagagctaataccccactctcaaaaacagacagatcatccatacagtaaatcaacaaagaaacagtggagttaaactacatactagatctaataggcctaactgcaatttacagaacatttcacccaacggctacagaatattcttttcatcagcacatggaacactctccagaataaactatactttaggccacaaaacaagcttgaaaaaattgtaaaaaatagaaattatattaagtatcttttctgaacacaatagaactagaaatcaataacaagaggaacctcagaaaatacaaacacatgtaagttaaacaacatgttcctgaaagactaatggatcaatgaagaaattaagaaggaaatttaaaaattgcttgaaacgaatgaaaatggcaatacaatgtaacaaaatttatgggatatgacaaaagcagtactaagaatgaagtttataacataaacacctatgtcaaaaaaaaaaaaaaaaaaaggaaagactccaaatgaacaatctaatgatacacctcaaggacctagataataaaaaacaagccaaaccctaaattagtagaagaaaacaaacaataaagatcagagcagaaataaaattgagactaaaaaaaatacagactatcaatgaaacgaaacacttgctttttgaaaagatagta

SEQ ID NO: 16820 - DNA, 951 bp, Homo sapiens
tggctaggtagaggctggggtgaatcggccgaggagagaaagttgaagagtcccagacctactagcattttgcaactatgcttgtaaagtcctcggaaagtttcctcgcgtaccagacagcggcgggggctgatagcaattttagtttttggcctccctatcctctcacatgagaacactgcctggatgcatctcatgatctctggagaatttccccatctttctcttctttccatcgtgtggattcaatagtgtggatttgaaggctgccctgcccccgactctcctgccgcacccctggccattgtaccttttgatgtttagaagttcgtggaagtagacgctgaggtgtgcagaggagctggtggataacagagaatgccagggaagatgagtgctgggtcagggtacttggatgaaacggtgcaggccaggcgggccctaataaaaccctctgccaggtctgggagtcccaggccatctgctcaacgctctgtggtttgtcagacctgcaagcaagccccctgctggggaagcctaggtgtccttgagctgaaccgcactgaagaactcttgtcctcactggctgatgcagcagaactcttgggaaatgtcttagtcctgcagaatcaggagtcaccagatgatgcagagttgagatcatcattgcaaagttctctgttcctgaggaactaaatttaaggaaaaaatgggattttgttttagagttggaaaaaaagcctgattaaagagtttctgcctgttaaaacacaacccacaacacacaacaaaaaaacactcccgggcctcaactcccggggcggggcacaaacgcggccccgaatggcgccggggccatacctgtccctggacccagcttcttgtccacaggggcaactccgccgtccccattcgggacgcgcttaactcgcaaacccggtacccgctagc

SEQ ID NO: 16821 - DNA, 2522 bp, Homo sapiens
cagaggatagaacgttaggctaggtacgaggcctgggtggtagcgagtggccttcccggttggcgcgcgcccggggcggcggcgctggaggagctcgagacggagcctagttatgtctgggaggcgaacgcggtccggaggagccgctcagcgctccgggccaagggccccatctcctactaagcctctgcggaggtcccagcggaaatcaggctctgaactcccgagcatcctccctgaaatctggccgaagacacccagtgcggctgcagtcagaaagcccatcgtcttaaagaggatcgtggcccatgctgtagaggtcccagctgtccaatcacctcgcaggagccctaggatttcctttttcttggagaaagaaaacgagccccctggcagggagcttactaaggaggaccttttcaagacacacagcgtccctgccacccccaccagcactcctgtgccgaaccctgaggccgagtccagctccaaggaaggagagctggacgccagagacttggaaatgtctaagaaagtcaggcgttcctacagccggctggagaccctgggctctgcctctacctccaccccaggccgccggtcctgctttggcttcgaggggctgctgggggcagaagacttgtccggagtctcgccagtggtgtgctccaaactcaccgaggtccccagggtttgtgcaaagccctgggccccagacatgactctccctggaatctccccaccacccgagaaacagaaacgtaagaagaagaaaatgccagagatcttgaaaacggagctggatgagtgggctgcggccatgaatgccgagtttgaagctgctgagcagtttgatctcctggttgaatgagatgcagtggggggtgcacctggccagactctccctcctgtcctgtacatagccacctccctgtggagaggacacttagggtcccctcccctggtcttgttacctgtgtgtgtgctggtgctgcgcatgaggactgtctgcctttgagggcttgggcagcagcggcagccatcttggttttaggaaatggggccgcctggcccagccactcactggtgtcctgtctcttgtcgtcctgtccttcctatctccccaaagtaccatagccagtttccagatgggccacagactggggaggagaatcagtggcccagccagaagttaaagggctgagggttgaggtgagaggcacctctgctcttgttgggaggggtggctgcttggaaataggcccagggctctgccagcctcggcctctccctcctgagttgccttctgttggtggctttcttcttgaacccacctgtgtaaagaggttttcagttccgtgggtttcccctttgattctgtaaatagtcccagagagaattcgtgggctgagggcaattctgtcttggaggaagaagctggacattcagcctgtggagtctgagttttgaaggatgtagggagccttagttgggtctcagaccataagtgtgtactacacagaagctgtgttttctagttctggtctgctgttgagatgtttggtaaatgccaggttgatagggcgctggctgcttggagcaaagggtgcatttcagggtgtggccaccaggtgctgtgagtttctgtggctcatggcctctgggctggtcccttgcacagggcccacgctggagtcttaccactctgctgcaggggtggaaggtggcccctcttgtcacccatacccatttcttacaaaataagttacaccgagtctacttggccctagaagagaaagttgaagagtcccagacctactagcattttgcaactatgcttgtaaagtcctcggaaagtttcctcgcgtaccagacagcggcgggggctgatagcaattttagtttttggcctccctatcctctcacatgagaacactgcctggatgcatctcatgatctctggagaatttccccatctttctcttctttccatcgtgtggattcaatagtgtggatttgaaggctgccctgcccccgactctcctgccgcacccctggccattgtaccttttgatgtttagaagttcgtggaagtagacgctgaggtgtgcagaggagctggtggataacagagaatgccagggaagatgagtgctgggtcagggtacttggatgaaacggtgcaggccaggcgggccctaataaaaccctctgccaggtctgggagtcccaggccatctgctcaacgctctgtggtttgtcagacctgcaagcaagccccctgctggggaagcctaggtgtccttgagctgaaccgcactgaagaactcttgtcctcactggctgatgcagcagaactcttgggaaatgtcttagtcctgcagaatcaggagtcaccagatgatgcagagttgagatcatcattgcaaagttctctgttcctgaggaactaaatttaaggaaaaaatgggattttgttttagagttggaaaaaaagcctgattaaagagtttctgcctgtt

SEQ ID NO: 16822 - DNA, 2553 bp, Homo sapiens
  misc_feature (44)..(44): n is a, c, g, or t
  misc_feature (67)..(67): n is a, c, g, or t
ccacccccccccccacctcccccccccccccccccccccctccnctacggctaggtacgaggctggngtgttagcgagtggccttcccggttggcgcgcgcccggggcggcggcgctggaggagctcgagacggagcctagttatgtctgggaggcgaacgcggtccggaggagccgctcagcgctccgggccaagggccccatctcctactaagcctctgcggaggtcccagcggaaatcaggctctgaactcccgagcatcctccctgaaatctggccgaagacacccagtgcggctgcagtcagaaagcccatcgtcttaaagaggatcgtggcccatgctgtagaggtcccagctgtccaatcacctcgcaggagccctaggatttcctttttcttggagaaagaaaacgagccccctggcagggagcttactaaggaggaccttttcaagacacacagcgtccctgccacccccaccagcactcctgtgccgaaccctgaggccgagtccagctccaaggaaggagagctggacgccagagacttggaaatgtctaagaaagtcaggcgttcctacagccggctggagaccctgggctctgcctctacctccaccccaggccgccggtcctgctttggcttcgaggggctgctgggggcagaagacttgtccggagtctcgccagtggtgtgctccaaactcaccgaggtccccagggtttgtgcaaagccctgggccccagacatgactctccctggaatctccccaccacccgagaaacagaaacgtaagaagaagaaaatgccagagatcttgaaaacggagctggatgagtgggctgcggccatgaatgccgagtttgaagctgctgagcagtttgatctcctggttgaatgagatgcagtggggggtgcacctggccagactctccctcctgtcctgtacatagccacctccctgtggagaggacacttagggtcccctcccctggtcttgttacctgtgtgtgtgctggtgctgcgcatgaggactgtctgcctttgagggcttgggcagcagcggcagccatcttggttttaggaaatggggccgcctggcccagccactcactggtgtcctgtctcttgtcgtcctgtccttcctatctccccaaagtaccatagccagtttccagatgggccacagactggggaggagaatcagtggcccagccagaagttaaagggctgagggttgaggtgagaggcacctctgctcttgttgggaggggtggctgcttggaaataggcccagggctctgccagcctcggcctctccctcctgagttgccttctgttggtggctttcttcttgaacccacctgtgtaaagaggttttcagttccgtgggtttcccctttgattctgtaaatagtcccagagagaattcgtgggctgagggcaattctgtcttggaggaagaagctggacattcagcctgtggagtctgagttttgaaggatgtagggagccttagttgggtctcagaccataagtgtgtactacacagaagctgtgttttctagttctggtctgctgttgagatgtttggtaaatgccaggttgatagggcgctggctgcttggagcaaagggtgcatttcagggtgtggccaccaggtgctgtgagtttctgtggctcatggcctctgggctggtcccttgcacagggcccacgctggagtcttaccactctgctgcaggggtggaaggtggcccctcttgtcacccatacccatttcttacaaaataagttacaccgagtctacttggccctagaagagaaagttgaagagtcccagacctactagcattttgcaactatgcttgtaaagtcctcggaaagtttcctcgcgtaccagacagcggcgggggctgatagcaattttagtttttggcctccctatcctctcacatgagaacactgcctggatgcatctcatgatctctggagaatttccccatctttctcttctttccatcgtgtggattcaatagtgtggatttgaaggctgccctgcccccgactctcctgccgcacccctggccattgtaccttttgatgtttagaagttcgtggaagtagacgctgaggtgtgcagaggagctggtggataacagagaatgccagggaagatgagtgctgggtcagggtacttggatgaaacggtgcaggccaggcgggccctaataaaaccctctgccaggtctgggagtcccaggccatctgctcaacgctctgtggtttgtcagacctgcaagcaagccccctgctggggaagcctaggtgtccttgagctgaaccgcactgaagaactcttgtcctcactggctgatgcagcagaactcttgggaaatgtcttagtcctgcagaatcaggagtcaccagatgatgcagagttgagatcatcattgcaaagttctctgttcctgaggaactaaatttaaggaaaaaatgggattttgttttagagttggaaaaaaagcctgattaaagagtttctgcctgtt

SEQ ID NO: 16823 - DNA, 2708 bp, Homo sapiens
cagaggatagaacgttaggctaggtacgaggcctgggtggtagcgagtggccttcccggttggcgcgcgcccggggcggcggcgctggaggagctcgagacggagcctagttatgtctgggaggcgaacgcggtccggaggagccgctcagcgctccgggccaagggccccatctcctactaagcctctgcggaggtcccagcggaaatcaggctctgaactcccgagcatcctccctgaaatctggccgaagacacccagtgcggctgcagtcagaaagcccatcgtcttaaagaggatcgtggcccatgctgtagaggtcccagctgtccaatcacctcgcaggagccctaggatttcctttttcttggagaaagaaaacgagccccctggcagggagcttactaaggaggaccttttcaagacacacagcgtccctgccacccccaccagcactcctgtgccgaaccctgaggccgagtccagctccaaggaaggagagctggacgccagagacttggaaatgtctaagaaagtcaggcgttcctacagccggctggagaccctgggctctgcctctacctccaccccaggccgccggtcctgctttggcttcgaggggctgctgggggcagaagacttgtccggagtctcgccagtggtgtgctccaaactcaccgaggtccccagggtttgtgcaaagccctgggccccagacatgactctccctggaatctccccaccacccgagaaacagaaacgtaagaagaagaaaatgccagagatcttgaaaacggagctggatgagtgggctgcggccatgaatgccgagtttgaagctgctgagcagtttgatctcctggttgaatgagatgcagtggggggtgcacctggccagactctccctcctgtcctgtacatagccacctccctgtggagaggacacttagggtcccctcccctggtcttgttacctgtgtgtgtgctggtgctgcgcatgaggactgtctgcctttgagggcttgggcagcagcggcagccatcttggttttaggaaatggggccgcctggcccagccactcactggtgtcctgtctcttgtcgtcctgtccttcctatctccccaaagtaccatagccagtttccagatgggccacagactggggaggagaatcagtggcccagccagaagttaaagggctgagggttgaggtgagaggcacctctgctcttgttgggaggggtggctgcttggaaataggcccagggctctgccagcctcggcctctccctcctgagttgccttctgttggtggctttcttcttgaacccacctgtgtaaagaggttttcagttccgtgggtttcccctttgattctgtaaatagtcccagagagaattcgtgggctgagggcaattctgtcttggaggaagaagctggacattcagcctgtggagtctgagttttgaaggatgtagggagccttagttgggtctcagaccataagtgtgtactacacagaagctgtgttttctagttctggtctgctgttgagatgtttggtaaatgccaggttgatagggcgctggctgcttggagcaaagggtgcatttcagggtgtggccaccaggtgctgtgagtttctgtggctcatggcctctgggctggtcccttgcacagggcccacgctggagtcttaccactctgctgcaggggtggaaggtggcccctcttgtcacccatacccatttcttacaaaataagttacaccgagtctacttggccctagaagagaaagttgaagagtcccagacctactagcattttgcaactatgcttgtaaagtcctcggaaagtttcctcgcgtaccagacagcggcgggggctgatagcaattttagtttttggcctccctatcctctcacatgagaacactgcctggatgcatctcatgatctctggagaatttccccatctttctcttctttccatcgtgtggattcaatagtgtggatttgaaggctgccctgcccccgactctcctgccgcacccctggccattgtaccttttgatgtttagaagttcgtggaagtagacgctgaggtgtgcagaggagctggtggataacagagaatgccagggaagatgagtgctgggtcagggtacttggatgaaacggtgcaggccaggcgggccctaataaaaccctctgccaggtctgggagtcccaggccatctgctcaacgctctgtggtttgtcagacctgcaagcaagccccctgctggggaagcctaggtgtccttgagctgaaccgcactgaagaactcttgtcctcactggctgatgcagcagaactcttgggaaatgtcttagtcctgcagaatcaggagtcaccagatgatgcagagttgagatcatcattgcaaagttctctgttcctgaggaactaaatttaaggaaaaaatgggattttgttttagagttggaaaaaaagcctgattaaagagtttctgcctgttaaaacacaacccacaacacacaacaaaaaaacactcccgggcctcaactcccggggcggggcacaaacgcggccccgaatggcgccggggccatacctgtccctggacccagcttcttgtccacaggggcaactccgccgtccccattcgggacgcgcttaactcgcaaacccggtacccgctagc

SEQ ID NO: 16824 - DNA, 2502 bp, Homo sapiens
ggtaattcgaacgttttttgcagcgagtggccttcccggttggcgcgcgcccggggcggcggcgctggaggagctcgagacggagcctagttatgtctgggaggcgaacgcggtccggaggagccgctcagcgctccgggccaagggccccatctcctactaagcctctgcggaggtcccagcggaaatcaggctctgaactcccgagcatcctccctgaaatctggccgaagacacccagtgcggctgcagtcagaaagcccatcgtcttaaagaggatcgtggcccatgctgtagaggtcccagctgtccaatcacctcgcaggagccctaggatttcctttttcttggagaaagaaaacgagccccctggcagggagcttactaaggaggaccttttcaagacacacagcgtccctgccacccccaccagcactcctgtgccgaaccctgaggccgagtccagctccaaggaaggagagctggacgccagagacttggaaatgtctaagaaagtcaggcgttcctacagccggctggagaccctgggctctgcctctacctccaccccaggccgccggtcctgctttggcttcgaggggctgctgggggcagaagacttgtccggagtctcgccagtggtgtgctccaaactcaccgaggtccccagggtttgtgcaaagccctgggccccagacatgactctccctggaatctccccaccacccgagaaacagaaacgtaagaagaagaaaatgccagagatcttgaaaacggagctggatgagtgggctgcggccatgaatgccgagtttgaagctgctgagcagtttgatctcctggttgaatgagatgcagtggggggtgcacctggccagactctccctcctgtcctgtacatagccacctccctgtggagaggacacttagggtcccctcccctggtcttgttacctgtgtgtgtgctggtgctgcgcatgaggactgtctgcctttgagggcttgggcagcagcggcagccatcttggttttaggaaatggggccgcctggcccagccactcactggtgtcctgtctcttgtcgtcctgtccttcctatctccccaaagtaccatagccagtttccagatgggccacagactggggaggagaatcagtggcccagccagaagttaaagggctgagggttgaggtgagaggcacctctgctcttgttgggaggggtggctgcttggaaataggcccagggctctgccagcctcggcctctccctcctgagttgccttctgttggtggctttcttcttgaacccacctgtgtaaagaggttttcagttccgtgggtttcccctttgattctgtaaatagtcccagagagaattcgtgggctgagggcaattctgtcttggaggaagaagctggacattcagcctgtggagtctgagttttgaaggatgtagggagccttagttgggtctcagaccataagtgtgtactacacagaagctgtgttttctagttctggtctgctgttgagatgtttggtaaatgccaggttgatagggcgctggctgcttggagcaaagggtgcatttcagggtgtggccaccaggtgctgtgagtttctgtggctcatggcctctgggctggtcccttgcacagggcccacgctggagtcttaccactctgctgcaggggtggaaggtggcccctcttgtcacccatacccatttcttacaaaataagttacaccgagtctacttggccctagaagagaaagttgaagagtcccagacctactagcattttgcaactatgcttgtaaagtcctcggaaagtttcctcgcgtaccagacagcggcgggggctgatagcaattttagtttttggcctccctatcctctcacatgagaacactgcctggatgcatctcatgatctctggagaatttccccatctttctcttctttccatcgtgtggattcaatagtgtggatttgaaggctgccctgcccccgactctcctgccgcacccctggccattgtaccttttgatgtttagaagttcgtggaagtagacgctgaggtgtgcagaggagctggtggataacagagaatgccagggaagatgagtgctgggtcagggtacttggatgaaacggtgcaggccaggcgggccctaataaaaccctctgccaggtctgggagtcccaggccatctgctcaacgctctgtggtttgtcagacctgcaagcaagccccctgctggggaagcctaggtgtccttgagctgaaccgcactgaagaactcttgtcctcactggctgatgcagcagaactcttgggaaatgtcttagtcctgcagaatcaggagtcaccagatgatgcagagttgagatcatcattgcaaagttctctgttcctgaggaactaaatttaaggaaaaaatgggattttgttttagagttggaaaaaaagcctgattaaagagtttctgcctgtt

SEQ ID NO: 16825 - DNA, 1520 bp, Homo sapiens
cagaggatagaacgttaggctaggtacgaggcctgggtggtagcgagtggccttcccggttggcgcgcgcccggggcggcggcgctggaggagctcgagacggagcctagttatgtctgggaggcgaacgcggtccggaggagccgctcagcgctccgggccaagggccccatctcctactaagcctctgcggaggtcccagcggaaatcaggctctgaactcccgagcatcctccctgaaatctggccgaagacacccagtgcggctgcagtcagaaagcccatcgtcttaaagaggatcgtggcccatgctgtagaggtcccagctgtccaatcacctcgcaggagccctaggatttcctttttcttggagaaagaaaacgagccccctggcagggagcttactaaggaggaccttttcaagacacacagcgtccctgccacccccaccagcactcctgtgccgaaccctgaggccgagtccagctccaaggaaggagagctggacgccagagacttggaaatgtctaagaaagtcaggcgttcctacagccggctggagaccctgggctctgcctctacctccaccccaggccgccggtcctgctttggcttcgaggggctgctgggggcagaagacttgtccggagtctcgccagtggtgtgctccaaactcaccgaggtccccagggtttgtgcaaagccctgggccccagacatgactctccctggaatctccccaccacccgagaaacagaaacgtaagaagaagaaaatgccagagatcttgaaaacggagctggatgagtgggctgcggccatgaatgccgagtttgaagctgctgagcagtttgatctcctggttgaatgagatgcagtggggggtgcacctggccagactctccctcctgtcctgtacatagccacctccctgtggagaggacacttagggtcccctcccctggtcttgttacctgtgtgtgtgctggtgctgcgcatgaggactgtctgcctttgagggctgccctgcccccgactctcctgccgcacccctggccattgtaccttttgatgtttagaagttcgtggaagtagacgctgaggtgtgcagaggagctggtggataacagagaatgccagggaagatgagtgctgggtcagggtacttggatgaaacggtgcaggccaggcgggccctaataaaaccctctgccaggtctgggagtcccaggccatctgctcaacgctctgtggtttgtcagacctgcaagcaagccccctgctggggaagcctaggtgtccttgagctgaaccgcactgaagaactcttgtcctcactggctgatgcagcagaactcttgggaaatgtcttagtcctgcagaatcaggagtcaccagatgatgcagagttgagatcatcattgcaaagttctctgttcctgaggaactaaatttaaggaaaaaatgggattttgttttagagttggaaaaaaagcctgattaaagagtttctgcctgtt

SEQ ID NO: 16826 - DNA, 2731 bp, Homo sapiens
cagaggatagaacgttaggctaggtacgaggcctgggtggtagcgagtggccttcccggttggcgcgcgcccggggcggcggcgctggaggagctcgagacggagcctagttatgtctgggaggcgaacgcggtccggaggagccgctcagcgctccggtgagcggagggcgcgcgggagacgtgaggtcgagccgtttgggggacgcagtccggtgaaagatggcctcttccctcccgctgccgccgccggaggaggcgcccttaaaagggcttgtttgggaatcttctcgctgtctctagaacctgttctctggactctaaggtctagagtcctcctctaccacttaacttttttctctttccagggccaagggccccatctcctactaagcctctgcggaggtcccagcggaaatcaggctctgaactcccgagcatcctccctgaaatctggccgaagacacccagtgcggctgcagtcagaaagcccatcgtcttaaagaggatcgtggcccatgctgtagaggtcccagctgtccaatcacctcgcaggagccctaggatttcctttttcttggagaaagaaaacgagccccctggcagggagcttactaaggaggaccttttcaagacacacagcgtccctgccacccccaccagcactcctgtgccgaaccctgaggccgagtccagctccaaggaaggagagctggacgccagagacttggaaatgtctaagaaagtcaggcgttcctacagccggctggagaccctgggctctgcctctacctccaccccaggccgccggtcctgctttggcttcgaggggctgctgggggcagaagacttgtccggagtctcgccagtggtgtgctccaaactcaccgaggtccccagggtttgtgcaaagccctgggccccagacatgactctccctggaatctccccaccacccgagaaacagaaacgtaagaagaagaaaatgccagagatcttgaaaacggagctggatgagtgggctgcggccatgaatgccgagtttgaagctgctgagcagtttgatctcctggttgaatgagatgcagtggggggtgcacctggccagactctccctcctgtcctgtacatagccacctccctgtggagaggacacttagggtcccctcccctggtcttgttacctgtgtgtgtgctggtgctgcgcatgaggactgtctgcctttgagggcttgggcagcagcggcagccatcttggttttaggaaatggggccgcctggcccagccactcactggtgtcctgtctcttgtcgtcctgtccttcctatctccccaaagtaccatagccagtttccagatgggccacagactggggaggagaatcagtggcccagccagaagttaaagggctgagggttgaggtgagaggcacctctgctcttgttgggaggggtggctgcttggaaataggcccagggctctgccagcctcggcctctccctcctgagttgccttctgttggtggctttcttcttgaacccacctgtgtaaagaggttttcagttccgtgggtttcccctttgattctgtaaatagtcccagagagaattcgtgggctgagggcaattctgtcttggaggaagaagctggacattcagcctgtggagtctgagttttgaaggatgtagggagccttagttgggtctcagaccataagtgtgtactacacagaagctgtgttttctagttctggtctgctgttgagatgtttggtaaatgccaggttgatagggcgctggctgcttggagcaaagggtgcatttcagggtgtggccaccaggtgctgtgagtttctgtggctcatggcctctgggctggtcccttgcacagggcccacgctggagtcttaccactctgctgcaggggtggaaggtggcccctcttgtcacccatacccatttcttacaaaataagttacaccgagtctacttggccctagaagagaaagttgaagagtcccagacctactagcattttgcaactatgcttgtaaagtcctcggaaagtttcctcgcgtaccagacagcggcgggggctgatagcaattttagtttttggcctccctatcctctcacatgagaacactgcctggatgcatctcatgatctctggagaatttccccatctttctcttctttccatcgtgtggattcaatagtgtggatttgaaggctgccctgcccccgactctcctgccgcacccctggccattgtaccttttgatgtttagaagttcgtggaagtagacgctgaggtgtgcagaggagctggtggataacagagaatgccagggaagatgagtgctgggtcagggtacttggatgaaacggtgcaggccaggcgggccctaataaaaccctctgccaggtctgggagtcccaggccatctgctcaacgctctgtggtttgtcagacctgcaagcaagccccctgctggggaagcctaggtgtccttgagctgaaccgcactgaagaactcttgtcctcactggctgatgcagcagaactcttgggaaatgtcttagtcctgcagaatcaggagtcaccagatgatgcagagttgagatcatcattgcaaagttctctgttcctgaggaactaaatttaaggaaaaaatgggattttgttttagagttggaaaaaaagcctgattaaagagtttctgcctgtt

SEQ ID NO: 16827 - DNA, 2315 bp, Homo sapiens
  misc_feature (44)..(44): n is a, c, g, or t
  misc_feature (67)..(67): n is a, c, g, or t
ccacccccccccccacctcccccccccccccccccccccctccnctacggctaggtacgaggctggngtgttagcgagtggccttcccggttggcgcgcgcccggggcggcggcgctggaggagctcgagacggagcctagttatgtctgggaggcgaacgcggtccggaggagccgctcagcgctccgggccaagggccccatctcctactaagcctctgcggaggtcccagcggaaatcaggctctgaactcccgagcatcctccctgaaatctggccgaagacacccagtgcggctgcagtcagaaagcccatcgtcttaaagaggatcgtggcccatgctgtagaggtcccagctgtccaatcacctcgcaggagccctagggccgccggtcctgctttggcttcgaggggctgctgggggcagaagacttgtccggagtctcgccagtggtgtgctccaaactcaccgaggtccccagggtttgtgcaaagccctgggccccagacatgactctccctggaatctccccaccacccgagaaacagaaacgtaagaagaagaaaatgccagagatcttgaaaacggagctggatgagtgggctgcggccatgaatgccgagtttgaagctgctgagcagtttgatctcctggttgaatgagatgcagtggggggtgcacctggccagactctccctcctgtcctgtacatagccacctccctgtggagaggacacttagggtcccctcccctggtcttgttacctgtgtgtgtgctggtgctgcgcatgaggactgtctgcctttgagggcttgggcagcagcggcagccatcttggttttaggaaatggggccgcctggcccagccactcactggtgtcctgtctcttgtcgtcctgtccttcctatctccccaaagtaccatagccagtttccagatgggccacagactggggaggagaatcagtggcccagccagaagttaaagggctgagggttgaggtgagaggcacctctgctcttgttgggaggggtggctgcttggaaataggcccagggctctgccagcctcggcctctccctcctgagttgccttctgttggtggctttcttcttgaacccacctgtgtaaagaggttttcagttccgtgggtttcccctttgattctgtaaatagtcccagagagaattcgtgggctgagggcaattctgtcttggaggaagaagctggacattcagcctgtggagtctgagttttgaaggatgtagggagccttagttgggtctcagaccataagtgtgtactacacagaagctgtgttttctagttctggtctgctgttgagatgtttggtaaatgccaggttgatagggcgctggctgcttggagcaaagggtgcatttcagggtgtggccaccaggtgctgtgagtttctgtggctcatggcctctgggctggtcccttgcacagggcccacgctggagtcttaccactctgctgcaggggtggaaggtggcccctcttgtcacccatacccatttcttacaaaataagttacaccgagtctacttggccctagaagagaaagttgaagagtcccagacctactagcattttgcaactatgcttgtaaagtcctcggaaagtttcctcgcgtaccagacagcggcgggggctgatagcaattttagtttttggcctccctatcctctcacatgagaacactgcctggatgcatctcatgatctctggagaatttccccatctttctcttctttccatcgtgtggattcaatagtgtggatttgaaggctgccctgcccccgactctcctgccgcacccctggccattgtaccttttgatgtttagaagttcgtggaagtagacgctgaggtgtgcagaggagctggtggataacagagaatgccagggaagatgagtgctgggtcagggtacttggatgaaacggtgcaggccaggcgggccctaataaaaccctctgccaggtctgggagtcccaggccatctgctcaacgctctgtggtttgtcagacctgcaagcaagccccctgctggggaagcctaggtgtccttgagctgaaccgcactgaagaactcttgtcctcactggctgatgcagcagaactcttgggaaatgtcttagtcctgcagaatcaggagtcaccagatgatgcagagttgagatcatcattgcaaagttctctgttcctgaggaactaaatttaaggaaaaaatgggattttgttttagagttggaaaaaaagcctgattaaagagtttctgcctgtt

SEQ ID NO: 16828 - DNA, 1731 bp, Homo sapiens
cagaggatagaacgttaggctaggtacgaggcctgggtggtagcgagtggccttcccggttggcgcgcgcccggggcggcggcgctggaggagctcgagacggagcctagttatgtctgggaggcgaacgcggtccggaggagccgctcagcgctccgggccaagggccccatctcctactaagcctctgcggaggtcccagcggaaatcaggctctgaactcccgagcatcctccctgaaatctggccgaagacacccagtgcggctgcagtcagaaagcccatcgtcttaaagaggatcgtggcccatgctgtagaggtcccagctgtccaatcacctcgcaggagccctaggatttcctttttcttggagaaagaaaacgagccccctggcagggagcttactaaggaggaccttttcaagacacacagcgtccctgccacccccaccagcactcctgtgccgaaccctgaggccgagtccagctccaaggaaggagagctggacgccagagacttggaaatgtctaagaaagtcaggcgttcctacagccggctggagaccctgggctctgcctctacctccaccccaggccgccggtcctgctttggcttcgaggggctgctgggggcagaagacttgtccggagtctcgccagtggtgtgctccaaactcaccgaggtccccagggtttgtgcaaagccctgggccccagacatgactctccctggaatctccccaccacccgagaaacagaaacgtaagaagaagaaaatgccagagatcttgaaaacggagctggatgagtgggctgcggccatgaatgccgagtttgaagctgctgagcagtttgatctcctggttgaatgagatgcagtggggggtgcacctggccagactctccctcctgtcctgtacatagccacctccctgtggagaggacacttagggtcccctcccctggtcttgttacctgtgtgtgtgctggtgctgcgcatgaggactgtctgcctttgagggcttgggcagcagcggcagccatcttggttttaggaaatggggccgcctggcccagccactcactggtgtcctgtctcttgtcgtcctgtccttcctatctccccaaagtaccatagccagtttccagatgggccacagactggggaggagaatcagtggcccagccagaagttaaagggctgagggttgaggtgagaggcacctctgctcttgttgggaggggtggctgcttggaaataggcccagggctctgccagcctcggcctctccctcctgagttgccttctgttggtggctttcttcttgaacccacctgtgtaaagaggttttcagttccgtgggtttcccctttgattctgtaaatagtcccagagagaattcgtgggctgagggcaattctgtcttggaggaagaagctggacattcagcctgtggagtctgaggtttgtcagacctgcaagcaagccccctgctggggaagcctaggtgtccttgagctgaaccgcactgaagaactcttgtcctcactggctgatgcagcagaactcttgggaaatgtcttagtcctgcagaatcaggagtcaccagatgatgcagagttgagatcatcattgcaaagttctctgttcctgaggaactaaatttaaggaaaaaatgggattttgttttagagttggaaaaaaagcctgattaaagagtttctgcctgtt

SEQ ID NO: 16829 - DNA, 1622 bp, Homo sapiens
gctggtaccggtctgggatgtatgggactccctgtggagaggacacttagggtcccctcccctggtcttgttacctgtgtgtgtgctggtgctgcgcatgaggactgtctgcctttgagggcttgggcagcagcggcagccatcttggttttaggaaatggggccgcctggcccagccactcactggtgtcctgtctcttgtcgtcctgtccttcctatctccccaaagtaccatagccagtttccagatgggccacagactggggaggagaatcagtggcccagccagaagttaaagggctgagggttgaggtgagaggcacctctgctcttgttgggaggggtggctgcttggaaataggcccagggctctgccagcctcggcctctccctcctgagttgccttctgttggtggctttcttcttgaacccacctgtgtaaagaggttttcagttccgtgggtttcccctttgattctgtaaatagtcccagagagaattcgtgggctgagggcaattctgtcttggaggaagaagctggacattcagcctgtggagtctgagttttgaaggatgtagggagccttagttgggtctcagaccataagtgtgtactacacagaagctgtgttttctagttctggtctgctgttgagatgtttggtaaatgccaggttgatagggcgctggctgcttggagcaaagggtgcatttcagggtgtggccaccaggtgctgtgagtttctgtggctcatggcctctgggctggtcccttgcacagggcccacgctggagtcttaccactctgctgcaggggtggaaggtggcccctcttgtcacccatacccatttcttacaaaataagttacaccgagtctacttggccctagaagagaaagttgaagagtcccagacctactagcattttgcaactatgcttgtaaagtcctcggaaagtttcctcgcgtaccagacagcggcgggggctgatagcaattttagtttttggcctccctatcctctcacatgagaacactgcctggatgcatctcatgatctctggagaatttccccatctttctcttctttccatcgtgtggattcaatagtgtggatttgaaggctgccctgcccccgactctcctgccgcacccctggccattgtaccttttgatgtttagaagttcgtggaagtagacgctgaggtgtgcagaggagctggtggataacagagaatgccagggaagatgagtgctgggtcagggtacttggatgaaacggtgcaggccaggcgggccctaataaaaccctctgccaggtctgggagtcccaggccatctgctcaacgctctgtggtttgtcagacctgcaagcaagccccctgctggggaagcctaggtgtccttgagctgaaccgcactgaagaactcttgtcctcactggctgatgcagcagaactcttgggaaatgtcttagtcctgcagaatcaggagtcaccagatgatgcagagttgagatcatcattgcaaagttctctgttcctgaggaactaaatttaaggaaaaaatgggattttgttttagagttggaaaaaaagcctgattaaagagtttctgcctgtt

SEQ ID NO: 16830 - DNA, 1399 bp, Homo sapiens
  misc_feature (42)..(42): n is a, c, g, or t
  misc_feature (47)..(47): n is a, c, g, or t
  misc_feature (51)..(51): n is a, c, g, or t
  misc_feature (54)..(54): n is a, c, g, or t
  misc_feature (57)..(58): n is a, c, g, or t
  misc_feature (70)..(70): n is a, c, g, or t
  misc_feature (72)..(72): n is a, c, g, or t
  misc_feature (74)..(74): n is a, c, g, or t
  misc_feature (80)..(80): n is a, c, g, or t
  misc_feature (91)..(91): n is a, c, g, or t
  misc_feature (121)..(121): n is a, c, g, or t
  misc_feature (124)..(124): n is a, c, g, or t
  misc_feature (140)..(141): n is a, c, g, or t
  misc_feature (157)..(157): n is a, c, g, or t
aaagcattatatggcggagtaatcgatggaatactccatggncattnaaanagngannatgtcctctgcnanancatcantgaaacccatnaaaaaaaatcagctctgatcttagtttttnctngccttctgctagcttnngaatgtgtttgctctngcgtctctagttcttttaattgtgatgttagggtgtcaattttagatctttcctgctttctctgtggacatttagtgctatatatttccctttgattctgtaaatagtcccagagagaattcgtgggctgagggcaattctgtcttggaggaagaagctggacattcagcctgtggagtctgagttttgaaggatgtagggagccttagttgggtctcagaccataagtgtgtactacacagaagctgtgttttctagttctggtctgctgttgagatgtttggtaaatgccaggttgatagggcgctggctgcttggagcaaagggtgcatttcagggtgtggccaccaggtgctgtgagtttctgtggctcatggcctctgggctggtcccttgcacagggcccacgctggagtcttaccactctgctgcaggggtggaaggtggcccctcttgtcacccatacccatttcttacaaaataagttacaccgagtctacttggccctagaagagaaagttgaagagtcccagacctactagcattttgcaactatgcttgtaaagtcctcggaaagtttcctcgcgtaccagacagcggcgggggctgatagcaattttagtttttggcctccctatcctctcacatgagaacactgcctggatgcatctcatgatctctggagaatttccccatctttctcttctttccatcgtgtggattcaatagtgtggatttgaaggctgccctgcccccgactctcctgccgcacccctggccattgtaccttttgatgtttagaagttcgtggaagtagacgctgaggtgtgcagaggagctggtggataacagagaatgccagggaagatgagtgctgggtcagggtacttggatgaaacggtgcaggccaggcgggccctaataaaaccctctgccaggtctgggagtcccaggccatctgctcaacgctctgtggtttgtcagacctgcaagcaagccccctgctggggaagcctaggtgtccttgagctgaaccgcactgaagaactcttgtcctcactggctgatgcagcagaactcttgggaaatgtcttagtcctgcagaatcaggagtcaccagatgatgcagagttgagatcatcattgcaaagttctctgttcctgaggaactaaatttaaggaaaaaatgggattttgttttagagttggaaaaaaagcctgattaaagagtttctgcctgtt

SEQ ID NO: 16831 - DNA, 765 bp, Homo sapiens
tggctaggtagaggctggggtgaatcggccgaggagagaaagttgaagagtcccagacctactagcattttgcaactatgcttgtaaagtcctcggaaagtttcctcgcgtaccagacagcggcgggggctgatagcaattttagtttttggcctccctatcctctcacatgagaacactgcctggatgcatctcatgatctctggagaatttccccatctttctcttctttccatcgtgtggattcaatagtgtggatttgaaggctgccctgcccccgactctcctgccgcacccctggccattgtaccttttgatgtttagaagttcgtggaagtagacgctgaggtgtgcagaggagctggtggataacagagaatgccagggaagatgagtgctgggtcagggtacttggatgaaacggtgcaggccaggcgggccctaataaaaccctctgccaggtctgggagtcccaggccatctgctcaacgctctgtggtttgtcagacctgcaagcaagccccctgctggggaagcctaggtgtccttgagctgaaccgcactgaagaactcttgtcctcactggctgatgcagcagaactcttgggaaatgtcttagtcctgcagaatcaggagtcaccagatgatgcagagttgagatcatcattgcaaagttctctgttcctgaggaactaaatttaaggaaaaaatgggattttgttttagagttggaaaaaaagcctgattaaagagtttctgcctgtt

SEQ ID NO: 16832 - DNA, 753 bp, Homo sapiens
cagaggatagaacgttaggctaggtacgaggcctgggtggtagcgagtggccttcccggttggcgcgcgcccggggcggcggcgctggaggagctcgagacggagcctagttatgtctgggaggcgaacgcggtccggaggagccgctcagcgctccggtgagcggagggcgcgcgggagacgtgaggtcgagccgtttgggggacgcagtccggtgaaagatggcctcttccctcccgctgccgccgccggaggaggcgcccttaaaagggcttgtttgggaatcttctcgctgtctctagaacctgttctctggactctaaggtctagagtcctcctctaccacttaacttttttctctttccagggccaagggccccatctcctactaagcctctgcggaggtcccagcggaaatcaggctctgaactcccgagcatcctccctgaaatctggccgaagacacccagtgcggctgcagtcagaaagcccatcgtcttaaagaggatcgtggcccatgctgtagaggtcccagctgtccaatcacctcgcaggagccctaggtctcttaggggcagacaaagagcccactccaagctggccaacaagccagtggtgcagcctgttgaggagcaagaacccaagggccctcaggcttccgaggagcggaacttggagccaccttcctcagaacaactggaacccaccgtcacgttcctgtttacactcctgaacacctctgagcccactgag

SEQ ID NO: 16833 - DNA, 2209 bp, Homo sapiens
gcgtgcagcgggcgggtcccccgcccggctaatgttttggccgcttcaagatggcggtgcaggagtcggcggctcagttgtccatgaccctgaaggtccaggagtacccgaccctcaaggtgccctacgagacgctgaacaaacgctttcgcgccgctcagaagaacattgaccgggagaccagccacgtcaccatggtggtggccgagctggagaagacgttgagcggctgccccgccgtggactccgtggtcagcctgctggacggcgtggtggagaagctcagcgtcctcaagaggaaggcggtggaatccatccaggccgaggacgagagcgccaagctgtgcaagcgccggatcgagcacctcaaagagcatagcagcgaccagcccgcggcggccagcgtgtggaagaggaagcgcatggatcgcatgatggtggagcacctgctgcgttgcggctactacaacacggctgtcaagctggcgcgccagagcggcatcgaggacctagtgaatattgagatgttcctgacggccaaagaggtggaggagtccctggagaggcgtgagacggccacctgcctggcctggtgccatgacaacaagtcccggctccggaagatgaagagctgcctggagttcagcctcagaatccaggagttcattgaactcatccggcagaataagagactggacgctgtgagacatgcaagaaagcacttcagccaagcagaagggagccagctggacgaggtgcgccaggccatgggcatgctggccttcccgcccgacacgcacatctccccgtacaaggaccttctggaccctgcacggtggcggatgctgatccagcagttccggtacgacaactaccgactacaccagctgggaaacaattctgtgttcaccctcaccctgcaggctggcctctcagccatcaagacaccacagtgctacaaggaggacggcagctccaagagccctgactgccctgtgtgcagccgctccctgaacaagctggcgcagcccctgcccatggcccactgtgccaactcccgcctggtctgcaagatttctggcgacgtgatgaacgagaacaatccgcccatgatgctgcccaacggctacgtctacggctacaattctctgctttctatccgtcaagatgataaagtcgtgtgcccgagaaccaaagaagtcttccacttctcacaagccgagaaggtgtacatcatgtaggccccacgtcgtgaagcgcacgcctcggggacgggctgcagtgggcggggaggccacgccttcctcctgtcccacgctccagcctgccgcggcgtttctgtttcttgcgaccaaagatccgtgagcaacgataaatactcttaggaagagagaaaataaggtttcataagtttgtacttgaaaacatttggattggtaggattttgtaacacgtcaaccatttgatgcttctgaaaagtactttcaacttgcgaaggaaactcttctttaaagactgacctaaacaccgagggaaacttaagaacgtttaaaatataggagtccgtgatttccctgtgttttcagtttctttccttctgtgaacgatgagacttggagaacgggctggtccttcaccacttcctgttggccctggcctggccggggaaggtggcagcggcaccggactgacctgcagtgacccgcgatgccgcgccacgagggacacttatggcttcattcgagagctgctgccaaaacgcctggcgccgccaccgtcgggggctggcttcgaggacgcccgcctgcctcgcgggtcgtgtccgcgggactgtgttcgtacgtgcatagtttcgatatcacatcgcggggctgtgttcgtagctgcgtcgtttcgatatcacaccctctgtgtgccgccttacttcctgcttcgagaatgtataacgtggaaatccacgggaccaaatttctgcagaggccttgccggatggttccataactgtagagtctaattgctatccattacagaaattaatcgttcagttgaaagaagtactgatgacttttcaaaacaaatgaaccaccgtagctgacagagaaccgtatcgtagaggtttgtagttagtgcttatttttgcatgttgatgttgactagctaataaactgtaaatgtaaaccatgcgaataaaatggttttctatttctca

SEQ ID NO: 16834 - DNA, 2086 bp, Homo sapiens
gcgtgcagcgggcgggtcccccgcccggctaatgttttggccgcttcaagatggcggtgcaggagtcggcggctcagttgtccatgaccctgaaggtccaggagtacccgaccctcaaggtgccctacgagacgctgaacaaacgctttcgcgccgctcagaagaacattgaccgggagaccagccacgtcaccatggtggtggccgagctggagaagacgttgagcggctgccccgccgtggactccgtggtcagcctgctggacggcgtggtggagaagctcagcgtcctcaagaggaaggcggtggaatccatccaggccgaggacgagagcgccaagctgtgcaagcgccggatcgagcacctcaaagagcatagcagcgaccagcccgcggcggccagcgtgtggaagaggaagcgcatggatcgcatgatggtggagcacctgctgcgttgcggctactacaacacggctgtcaagctggcgcgccagagcggcatcgagagctgcctggagttcagcctcagaatccaggagttcattgaactcatccggcagaataagagactggacgctgtgagacatgcaagaaagcacttcagccaagcagaagggagccagctggacgaggtgcgccaggccatgggcatgctggccttcccgcccgacacgcacatctccccgtacaaggaccttctggaccctgcacggtggcggatgctgatccagcagttccggtacgacaactaccgactacaccagctgggaaacaattctgtgttcaccctcaccctgcaggctggcctctcagccatcaagacaccacagtgctacaaggaggacggcagctccaagagccctgactgccctgtgtgcagccgctccctgaacaagctggcgcagcccctgcccatggcccactgtgccaactcccgcctggtctgcaagatttctggcgacgtgatgaacgagaacaatccgcccatgatgctgcccaacggctacgtctacggctacaattctctgctttctatccgtcaagatgataaagtcgtgtgcccgagaaccaaagaagtcttccacttctcacaagccgagaaggtgtacatcatgtaggccccacgtcgtgaagcgcacgcctcggggacgggctgcagtgggcggggaggccacgccttcctcctgtcccacgctccagcctgccgcggcgtttctgtttcttgcgaccaaagatccgtgagcaacgataaatactcttaggaagagagaaaataaggtttcataagtttgtacttgaaaacatttggattggtaggattttgtaacacgtcaaccatttgatgcttctgaaaagtactttcaacttgcgaaggaaactcttctttaaagactgacctaaacaccgagggaaacttaagaacgtttaaaatataggagtccgtgatttccctgtgttttcagtttctttccttctgtgaacgatgagacttggagaacgggctggtccttcaccacttcctgttggccctggcctggccggggaaggtggcagcggcaccggactgacctgcagtgacccgcgatgccgcgccacgagggacacttatggcttcattcgagagctgctgccaaaacgcctggcgccgccaccgtcgggggctggcttcgaggacgcccgcctgcctcgcgggtcgtgtccgcgggactgtgttcgtacgtgcatagtttcgatatcacatcgcggggctgtgttcgtagctgcgtcgtttcgatatcacaccctctgtgtgccgccttacttcctgcttcgagaatgtataacgtggaaatccacgggaccaaatttctgcagaggccttgccggatggttccataactgtagagtctaattgctatccattacagaaattaatcgttcagttgaaagaagtactgatgacttttcaaaacaaatgaaccaccgtagctgacagagaaccgtatcgtagaggtttgtagttagtgcttatttttgcatgttgatgttgactagctaataaactgtaaatgtaaaccatgcgaataaaatggttttctatttctca

SEQ ID NO: 16835 - DNA, 2009 bp, Homo sapiens
gcgtgcagcgggcgggtcccccgcccggctaatgttttggccgcttcaagatggcggtgcaggagtcggcggctcagttgtccatgaccctgaaggtccaggagtacccgaccctcaaggtgccctacgagacgctgaacaaacgctttcgcgccgctcagaagaacattgaccgggagaccagccacgtcaccatggtggtggccgagctggagaagacgttgagcggctgccccgccgtggactccgtggtcagcctgctggacggcgtggtggagaagctcagcgtcctcaagaggaaggcggtggaatccatccaggccgaggacgagagcgccaagctgtgcaagcgccggatcgagcacctcaaagagcatagcagcgaccagcccgcggcggccagcgtgtggaagaggaagcgcatggatcgcatgatggtggagcacctgctgcgttgcggctactacaacacggctgtcaagctggcgcgccagagcggcatcgagacatgcaagaaagcacttcagccaagcagaagggagccagctggacgaggtgcgccaggccatgggcatgctggccttcccgcccgacacgcacatctccccgtacaaggaccttctggaccctgcacggtggcggatgctgatccagcagttccggtacgacaactaccgactacaccagctgggaaacaattctgtgttcaccctcaccctgcaggctggcctctcagccatcaagacaccacagtgctacaaggaggacggcagctccaagagccctgactgccctgtgtgcagccgctccctgaacaagctggcgcagcccctgcccatggcccactgtgccaactcccgcctggtctgcaagatttctggcgacgtgatgaacgagaacaatccgcccatgatgctgcccaacggctacgtctacggctacaattctctgctttctatccgtcaagatgataaagtcgtgtgcccgagaaccaaagaagtcttccacttctcacaagccgagaaggtgtacatcatgtaggccccacgtcgtgaagcgcacgcctcggggacgggctgcagtgggcggggaggccacgccttcctcctgtcccacgctccagcctgccgcggcgtttctgtttcttgcgaccaaagatccgtgagcaacgataaatactcttaggaagagagaaaataaggtttcataagtttgtacttgaaaacatttggattggtaggattttgtaacacgtcaaccatttgatgcttctgaaaagtactttcaacttgcgaaggaaactcttctttaaagactgacctaaacaccgagggaaacttaagaacgtttaaaatataggagtccgtgatttccctgtgttttcagtttctttccttctgtgaacgatgagacttggagaacgggctggtccttcaccacttcctgttggccctggcctggccggggaaggtggcagcggcaccggactgacctgcagtgacccgcgatgccgcgccacgagggacacttatggcttcattcgagagctgctgccaaaacgcctggcgccgccaccgtcgggggctggcttcgaggacgcccgcctgcctcgcgggtcgtgtccgcgggactgtgttcgtacgtgcatagtttcgatatcacatcgcggggctgtgttcgtagctgcgtcgtttcgatatcacaccctctgtgtgccgccttacttcctgcttcgagaatgtataacgtggaaatccacgggaccaaatttctgcagaggccttgccggatggttccataactgtagagtctaattgctatccattacagaaattaatcgttcagttgaaagaagtactgatgacttttcaaaacaaatgaaccaccgtagctgacagagaaccgtatcgtagaggtttgtagttagtgcttatttttgcatgttgatgttgactagctaataaactgtaaatgtaaaccatgcgaataaaatggttttctatttctca

SEQ ID NO: 16836 - DNA, 2046 bp, Homo sapiens
tcgagcggccgcccgggcaggtggagtcggcggctcagttgtccatgaccctgaaggtccaggagtacccgaccctcaaggtgccctacgagacgctgaacaaacgctttcgcgccgctcagaagaacattgaccgggagaccagccacgtcaccatggtggtggccgagctggagaagacgttgagcggctgccccgccgtggactccgtggtcagcctgctggacggcgtggtggagaagctcagcgtcctcaagaggaaggcggtggaatccatccaggccgaggacgagagcgccaagctgtgcaagcgccggatcgagcacctcaaagagcatagcagcgaccagcccgcggcggccagcgtgtggaagaggaagcgcatggatcgcatgatggtggagcacctgctgcgttgcggctactacaacacggctgtcaagctggcgcgccagagcggcatcgagagctgcctggagttcagcctcagaatccaggagttcattgaactcatccggcagaataagagactggacgctgtgagacatgcaagaaagcacttcagccaagcagaagggagccagctggacgaggtgcgccaggccatgggcatgctggccttcccgcccgacacgcacatctccccgtacaaggaccttctggaccctgcacggtggcggaaccttctggaccctgcacggtggcggatgctgatccagcagttccggtacgacaactaccgactacaccagctgggaaacaattctgtgttcaccctcaccctgcaggctggcctctcagccatcaagacaccacagtgctacaaggaggacggcagctccaagagccctgactgccctgtgtgcagccgctccctgaacaagctggcgcagcccctgcccatggcccactgtgccaactcccgcctggtctgcaagatttctggcgacgtgatgaacgagaacaatccgcccatgatgctgcccaacggctacgtctacggctacaattctctgctttctatccgtcaagatgataaagtcgtgtgcccgagaaccaaagaagtcttccacttctcacaagccgagaaggtgtacatcatgtaggccccacgtcgtgaagcgcacgcctcggggacgggctgcagtgggcggggaggccacgccttcctcctgtcccacgctccagcctgccgcggcgtttctgtttcttgcgaccaaagatccgtgagcaacgataaatactcttaggaagagagaaaataaggtttcataagtttgtacttgaaaacatttggattggtaggattttgtaacacgtcaaccatttgatgcttctgaaaagtactttcaacttgcgaaggaaactcttctttaaagactgacctaaacaccgagggaaacttaagaacgtttaaaatataggagtccgtgatttccctgtgttttcagtttctttccttctgtgaacgatgagacttggagaacgggctggtccttcaccacttcctgttggccctggcctggccggggaaggtggcagcggcaccgcgccacgagggacacttatggcttcattcgagagctgctgccaaaacgcctggcgccgccaccgtcgggggctggcttcgaggacgcccgcctgcctcgcgggtcgtgtccgcgggactgtgttcgtacgtgcatagtttcgatatcacatcgcggggctgtgttcgtagctgcgtcgtttcgatatcacaccctctgtgtgccgccttacttcctgcttcgagaatgtataacgtggaaatccacgggaccaaatttctgcagaggccttgccggatggttccataactgtagagtctaattgctatccattacagaaattaatcgttcagttgaaagaagtactgatgacttttcaaaacaaatgaaccaccgtagctgacagagaaccgtatcgtagaggtttgtagttagtgcttatttttgcatgttgatgttgactagctaataaactgtaaatgtaaaccatgcgaataaaatggttttctatttctca

SEQ ID NO: 16837 - DNA, 601 bp, Homo sapiens
gcgtgcagcgggcgggtcccccgcccggctaatgttttggccgcttcaagatggcggtgcaggagtcggcggctcagttgtccatgaccctgaaggtccaggagtacccgaccctcaaggtgccctacgagacgctgaacaaacgctttcgcgccgctcagaagaacattgaccgggagaccagccacgtcaccatggtggtggccgagctggagaagacgttgagcggctgccccgccgtggactccgtggtcagcctgctggacggcgtggtggagaagctcagcgtcctcaagaggaaggttggtcccgcctggcggtccctcttcagtctggggcatggacaccccttttgtctcgaaaatgagtcctaagacaggcaagctgcaatgatgggaacgcgggaggtgcggttgggggcccccttccctgctgtctgccttctggggccactgtcggctgagcaggccagcttcctgttcctgtagggaccgtgttgtcttgctccaggagtgtccagagtccaggccacagggagaccaggatgtatagcaggttgattgattttttttttttttttttttttttgagacagagtccc

SEQ ID NO: 16838 - DNA, 250 bp, Homo sapiens
gctcggtaccccctagttttagaagtttcaatagcagtatcatctaataagccaaagagctttggttgaaaaaaaaaatttgttagagggataaaataaccgaatgtgagtgtcttctggtaacagaaagttctgaccgagccatacacaaccctctgtgtgccgccttacttcctgcttcgagaatgtataacgtggaaatccacgttttagaagtttcaatagcaatttatacatattaccactgctg

SEQ ID NO: 16839 - DNA, 3634 bp, Homo sapiens
  misc_feature (975)..(975): n is a, c, g, or t
  misc_feature (977)..(977): n is a, c, g, or t
gcgtgcagcgggcgggtcccccgcccggctaatgttttggccgcttcaagatggcggtgcaggagtcggcggctcagttgtccatgaccctgaaggtccaggagtacccgaccctcaaggtgccctacgagacgctgaacaaacgctttcgcgccgctcagaagaacattgaccgggagaccagccacgtcaccatggtggtggccgagctggagaagacgttgagcggctgccccgccgtggactccgtggtcagcctgctggacggcgtggtggagaagctcagcgtcctcaagaggaaggcggtggaatccatccaggccgaggacgagagcgccaagctgtgcaagcgccggatcgagcacctcaaagagcatagcagcgaccagcccgcggcggccagcgtgtggaagaggaagcgcatggatcgcatgatggtggagcacctgctgcgttgcggctactacaacacggctgtcaagctggcgcgccagagcggcatcgaggacctagtgaatattgagatgttcctgacggccaaagaggtggaggagtccctggagaggcgtgagacggccacctgcctggcctggtgccatgacaacaagtcccggctccggaagatgaagagctgcctggagttcagcctcagaatccaggagttcattgaactcatccggcagaataagagactggacgctgtgagacatgcaagaaagcacttcagccaagcagaagggagccagctggacgaggtgcgccaggccatgggcatgctggccttcccgcccgacacgcacatctccccgtacaaggaccttctggaccctgcacggtggcggatgctgatccagcagttccggtacgacaactaccgactacaccagctgggaaacaattctgtgttcaccctcaccctgcaggctggcctctcagccatcaagacaccgtatcctacctcccgtgcgcagtgcngnttggctggggttgcatctttggtcatattttaacacgctgaccctgcactttgccactcttgtcctcccaccacagacagccccgagctcccgtgtgctgcacttgcgtggtgtctggatggtcggggtggggccgtgttgaggggcctcggatgcgtcgtgcagccttcactctgggaagtggcgcgcttcctctctcatcatctcagaggccgccatgggcattgatctaaaagcccgattttgatgtgttctggcagccggcagattaccattcagaatagttttcccgtgtgattaccaagaaccttgcctgtgactgactctgtcccgcctgtgactgactctgtcccacctgtgaccgactctgtctgcctgtgactctgtccctgcctgtgactgactccatcctgcctgtgactctgtcccacctgcgactcactgagttcctgcctgtgactcactcggctcccgcctgcaacggacttggtccctgcctgcgactcactgtggccctgcctgtgactgagtctgtcccgtttgtgactgattccttcctgtgactgactctgtcccacctgcaactgacttcttcctgcctgtgacagactctgcccctgcctgcgactgagtctgtcccttcctgcaactgagtccatcccgcctgtgactctgtcctcgcctgtgactgactctgcccctgccctgtgactgtctcacctgtgactgactccgtcctgcctgtgactcagcctcttactgactctacccctgcctgtgactgactctgccctctcctgtgactgactctgtccccacctgtgactgactctgtccccacctgtgactgactgtcctcctgcaactgactctgtccccgcctatgaatgtctttcatgtgacctgcctcaggcccagagggcagtgagtgtttcgcgattgctgctggtacctggctgtgccggggtatgaatgagactcaggccccctcccttgtcccctctttgtggaactctgggcgagagggctggcgtgcttgcccactgcctgttcctaggtgccagcagaacgtccctgctgggtggctcttgtcctgcctggagaggttgcgtggccggggagagggcggcgggcgacggagccactctgtgcctgtggtcctggtgctggaggccggggtgagaaggcgcaggcttcttgtctccaccgaggcctcagtggggctgtttagctgtcgagtgcagcacttcctgtgcctcgaaagacagccccgtgtagtcagcatggcgcccacatagccagaagggcacgcagcccagggcagagtggccacagggggctgggctcaccccggctgccctgagtggcccccaacccttccttgacccgatgctcagacagtgctacaaggaggacggcagctccaagagccctgactgccctgtgtgcagccgctccctgaacaagctggcgcagcccctgcccatggcccactgtgccaactcccgcctggtctgcaagatttctggcgacgtgatgaacgagaacaatccgcccatgatgctgcccaacggctacgtctacggctacaattctctgctttctatccgtcaagatgataaagtcgtgtgcccgagaaccaaagaagtcttccacttctcacaagccgagaaggtgtacatcatgtaggccccacgtcgtgaagcgcacgcctcggggacgggctgcagtgggcggggaggccacgccttcctcctgtcccacgctccagcctgccgcggcgtttctgtttcttgcgaccaaagatccgtgagcaacgataaatactcttaggaagagagaaaataaggtttcataagtttgtacttgaaaacatttggattggtaggattttgtaacacgtcaaccatttgatgcttctgaaaagtactttcaacttgcgaaggaaactcttctttaaagactgacctaaacaccgagggaaacttaagaacgtttaaaatataggagtccgtgatttccctgtgttttcagtttctttccttctgtgaacgatgagacttggagaacgggctggtccttcaccacttcctgttggccctggcctggccggggaaggtggcagcggcaccggactgacctgcagtgacccgcgatgccgcgccacgagggacacttatggcttcattcgagagctgctgccaaaacgcctggcgccgccaccgtcgggggctggcttcgaggacgcccgcctgcctcgcgggtcgtgtccgcgggactgtgttcgtacgtgcatagtttcgatatcacatcgcggggctgtgttcgtagctgcgtcgtttcgatatcacaccctctgtgtgccgccttacttcctgcttcgagaatgtataacgtggaaatccacgggaccaaatttctgcagaggccttgccggatggttccataactgtagagtctaattgctatccattacagaaattaatcgttcagttgaaagaagtactgatgacttttcaaaacaaatgaaccaccgtagctgacagagaaccgtatcgtagaggtttgtagttagtgcttatttttgcatgttgatgttgactagctaataaactgtaaatgtaaaccatgcgaataaaatggttttctatttctca

SEQ ID NO: 16840 - DNA, 2155 bp, Homo sapiens
gcgtgcagcgggcgggtcccccgcccggctaatgttttggccgcttcaagatggcggtgcaggagtcggcggctcagttgtccatgaccctgaaggtccaggagtacccgaccctcaaggtgccctacgagacgctgaacaaacgctttcgcgccgctcagaagaacattgaccgggagaccagccacgtcaccatggtggtggccgagctggagaagacgttgagcggctgccccgccgtggactccgtggtcagcctgctggacggcgtggtggagaagctcagcgtcctcaagaggaaggcggtggaatccatccaggccgaggacgagagcgccaagctgtgcaagcgccggatcgagcacctcaaagagcatagcagcgaccagcccgcggcggccagcgtgtggaagaggaagcgcatggatcgcatgatggtggagcacctgctgcgttgcggctactacaacacggctgtcaagctggcgcgccagagcggcatcgaggacctagtgaatattgagatgttcctgacggccaaagaggtggaggagtccctggagaggcgtgagacggccacctgcctggcctggtgccatgacaacaagtcccggctccggaagatgaagagctgcctggagttcagcctcagaatccaggagttcattgaactcatccggcagaataagagactggacgctgtgagacatgcaagaaagcacttcagccaagcagaagggagccagctggacgaggtgcgccaggccatgggcatgctggccttcccgcccgacacgcacatctccccgtacaaggaccttctggaccctgcacggtggcggatgctgatccagcagttccggtacgacaactaccgactacaccagctgggaaacaattctgtgttcaccctcaccctgcaggctggcctctcagccatcaagacaccacagtgctacaaggaggacggcagctccaagagccctgactgccctgtgtgcagccgctccctgaacaagctggcgcagcccctgcccatggcccactgtgccaactcccgcctggtctgcaagatttctggcgacgtgatgaacgagaacaatccgcccatgatgctgcccaacggctacgtctacggctacaattctctgctttctatccgtcaagatgataaagtcgtgtgcccgagaaccaaagaagtcttccacttctcacaagccgagaaggtgtacatcatgtaggccccacgtcgtgaagcgcacgcctcggggacgggctgcagtgggcggggaggccacgccttcctcctgtcccacgctccagcctgccgcggcgtttctgtttcttgcgaccaaagatccgtgagcaacgataaatactcttaggaagagagaaaataaggtttcataagtttgtacttgaaaacatttggattggtaggattttgtaacacgtcaaccatttgatgcttctgaaaagtactttcaacttgcgaaggaaactcttctttaaagactgacctaaacaccgagggaaacttaagaacgtttagatgagacttggagaacgggctggtccttcaccacttcctgttggccctggcctggccggggaaggtggcagcggcaccggactgacctgcagtgacccgcgatgccgcgccacgagggacacttatggcttcattcgagagctgctgccaaaacgcctggcgccgccaccgtcgggggctggcttcgaggacgcccgcctgcctcgcgggtcgtgtccgcgggactgtgttcgtacgtgcatagtttcgatatcacatcgcggggctgtgttcgtagctgcgtcgtttcgatatcacaccctctgtgtgccgccttacttcctgcttcgagaatgtataacgtggaaatccacgggaccaaatttctgcagaggccttgccggatggttccataactgtagagtctaattgctatccattacagaaattaatcgttcagttgaaagaagtactgatgacttttcaaaacaaatgaaccaccgtagctgacagagaaccgtatcgtagaggtttgtagttagtgcttatttttgcatgttgatgttgactagctaataaactgtaaatgtaaaccatgcgaataaaatggttttctatttctca

SEQ ID NO: 16841 - DNA, 2152 bp, Homo sapiens
gcgtgcagcgggcgggtcccccgcccggctaatgttttggccgcttcaagatggcggtgcaggagtcggcggctcagttgtccatgaccctgaaggtccaggagtacccgaccctcaaggtgccctacgagacgctgaacaaacgctttcgcgccgctcagaagaacattgaccgggagaccagccacgtcaccatggtggtggccgagctggagaagacgttgagcggctgccccgccgtggactccgtggtcagcctgctggacggcgtggtggagaagctcagcgtcctcaagaggaaggcggtggaatccatccaggccgaggacgagagcgccaagctgtgcaagcgccggatcgagcacctcaaagagcatagcagcgaccagcccgcggcggccagcgtgtggaagaggaagcgcatggatcgcatgatggtggagcacctgctgcgttgcggctactacaacacggctgtcaagctggcgcgccagagcggcatcgaggacctagtgaatattgagatgttcctgacggccaaagaggtggaggagtccctggagaggcgtgagacggccacctgcctggcctggtgccatgacaacaagtcccggctccggaagatgaagagctgcctggagttcagcctcagaatccaggagttcattgaactcatccggcagaataagagactggacgctgtgagacatgcaagaaagcacttcagccaagcagaagggagccagctggacgaggtgcgccaggccatgggcatgctggccttcccgcccgacacgcacatctccccgtacaaggaccttctggaccctgcacggtggcggatgctgatccagcagttccggtacgacaactaccgactacaccagctgggaaacaattctgtgttcaccctcaccctgcaggctggcctctcagccatcaagacaccacagtgctacaaggaggacggcagctccaagagccctgactgccctgtgtgcagccgctccctgaacaagctggcgcagcccctgcccatggcccactgtgccaactcccgcctggtctgcaagatttctggcgacgtgatgaacgagaacaatccgcccatgatgctgcccaacggctacgtctacggctacaattctctgctttctatccgtcaagatgataaagtcgtgtgcccgagaaccaaagaagtcttccacttctcacaagccgagaaggtgtacatcatgtaggccccacgtcgtgaagcgcacgcctcggggacgggctgcagtgggcggggaggccacgccttcctcctgtcccacgctccagcctgccgcggcgtttctgtttcttgcgaccaaagatccgtgagcaacgataaatactcttaggaagagagaaaataaggtttcataagtttgtacttgaaaacatttggattggtaggattttgtaacacgtcaaccatttgatgcttctgaaaagtactttcaacttgcgaaggaaactcttctttaaagactgacctaaacaccgagggaaacttaagaacgtttaaaatataggagtccgtgatttccctgtgttttcagtttctttccttctgtgaacgatgagacttggagaacgggctggtccttcaccacttcctgttggccctggcgccacgagggacacttatggcttcattcgagagctgctgccaaaacgcctggcgccgccaccgtcgggggctggcttcgaggacgcccgcctgcctcgcgggtcgtgtccgcgggactgtgttcgtacgtgcatagtttcgatatcacatcgcggggctgtgttcgtagctgcgtcgtttcgatatcacaccctctgtgtgccgccttacttcctgcttcgagaatgtataacgtggaaatccacgggaccaaatttctgcagaggccttgccggatggttccataactgtagagtctaattgctatccattacagaaattaatcgttcagttgaaagaagtactgatgacttttcaaaacaaatgaaccaccgtagctgacagagaaccgtatcgtagaggtttgtagttagtgcttatttttgcatgttgatgttgactagctaataaactgtaaatgtaaaccatgcgaataaaatggttttctatttctca

SEQ ID NO: 16842 - DNA, 2132 bp, Homo sapiens
gcgtgcagcgggcgggtcccccgcccggctaatgttttggccgcttcaagatggcggtgcaggagtcggcggctcagttgtccatgaccctgaaggtccaggagtacccgaccctcaaggtgccctacgagacgctgaacaaacgctttcgcgccgctcagaagaacattgaccgggagaccagccacgtcaccatggtggtggccgagctggagaagacgttgagcggctgccccgccgtggactccgtggtcagcctgctggacggcgtggtggagaagctcagcgtcctcaagaggaaggcggtggaatccatccaggccgaggacgagagcgccaagctgtgcaagcgccggatcgagcacctcaaagagcatagcagcgaccagcccgcggcggccagcgtgtggaagaggaagcgcatggatcgcatgatggtggagcacctgctgcgttgcggctactacaacacggctgtcaagctggcgcgccagagcggcatcgaggacctagtgaatattgagatgttcctgacggccaaagaggtggaggagtccctggagaggcgtgagacggccacctgcctggcctggtgccatgacaacaagtcccggctccggaagatgaagacatgcaagaaagcacttcagccaagcagaagggagccagctggacgaggtgcgccaggccatgggcatgctggccttcccgcccgacacgcacatctccccgtacaaggaccttctggaccctgcacggtggcggatgctgatccagcagttccggtacgacaactaccgactacaccagctgggaaacaattctgtgttcaccctcaccctgcaggctggcctctcagccatcaagacaccacagtgctacaaggaggacggcagctccaagagccctgactgccctgtgtgcagccgctccctgaacaagctggcgcagcccctgcccatggcccactgtgccaactcccgcctggtctgcaagatttctggcgacgtgatgaacgagaacaatccgcccatgatgctgcccaacggctacgtctacggctacaattctctgctttctatccgtcaagatgataaagtcgtgtgcccgagaaccaaagaagtcttccacttctcacaagccgagaaggtgtacatcatgtaggccccacgtcgtgaagcgcacgcctcggggacgggctgcagtgggcggggaggccacgccttcctcctgtcccacgctccagcctgccgcggcgtttctgtttcttgcgaccaaagatccgtgagcaacgataaatactcttaggaagagagaaaataaggtttcataagtttgtacttgaaaacatttggattggtaggattttgtaacacgtcaaccatttgatgcttctgaaaagtactttcaacttgcgaaggaaactcttctttaaagactgacctaaacaccgagggaaacttaagaacgtttaaaatataggagtccgtgatttccctgtgttttcagtttctttccttctgtgaacgatgagacttggagaacgggctggtccttcaccacttcctgttggccctggcctggccggggaaggtggcagcggcaccggactgacctgcagtgacccgcgatgccgcgccacgagggacacttatggcttcattcgagagctgctgccaaaacgcctggcgccgccaccgtcgggggctggcttcgaggacgcccgcctgcctcgcgggtcgtgtccgcgggactgtgttcgtacgtgcatagtttcgatatcacatcgcggggctgtgttcgtagctgcgtcgtttcgatatcacaccctctgtgtgccgccttacttcctgcttcgagaatgtataacgtggaaatccacgggaccaaatttctgcagaggccttgccggatggttccataactgtagagtctaattgctatccattacagaaattaatcgttcagttgaaagaagtactgatgacttttcaaaacaaatgaaccaccgtagctgacagagaaccgtatcgtagaggtttgtagttagtgcttatttttgcatgttgatgttgactagctaataaactgtaaatgtaaaccatgcgaataaaatggttttctatttctca

SEQ ID NO: 16843 - DNA, 2422 bp, Homo sapiens
gcgtgcagcgggcgggtcccccgcccggctaatgttttggccgcttcaagatggcggtgcaggagtcggcggctcagttgtccatgaccctgaaggtccaggagtacccgaccctcaaggtgccctacgagacgctgaacaaacgctttcgcgccgctcagaagaacattgaccgggagaccagccacgtcaccatggtggtggccgagctggagaagacgttgagcggctgccccgccgtggactccgtggtcagcctgctggacggcgtggtggagaagctcagcgtcctcaagaggaaggcggtggaatccatccaggccgaggacgagagcgccaagctgtgcaagcgccggatcgagcacctcaaagagcatagcagcgaccagcccgcggcggccagcgtgtggaagaggaagcgcatggatcgcatgatggtggagcacctgctgcgttgcggctactacaacacggctgtcaagctggcgcgccagagcggcatcgaggacctagtgaatattgagatgttcctgacggccaaagaggtggaggagtccctggagaggcgtgagacggccacctgcctggcctggtgccatgacaacaagtcccggctccggaagatgaagagctgcctggagttcagcctcagaatccaggagttcattgaactcatccggcagaataagagactggacgctgtgagacatgcaagaaagcacttcagccaagcagaagggagccagctggacgaggtgcgccaggccatgggcatgctggccttcccgcccgacacgcacatctccccgtacaaggaccttctggaccctgcacggtggcggatgctgatccagcagttccggtacgacaactaccgactacaccagctgggaaacaattctgtgttcaccctcaccctgcaggctggcctctcagccatcaagacaccacagtgctacaaggaggacggcagctccaagagccctgactgccctgtgtgcagccgctccctgaacaagctggcgcagcccctgcccatggcccactgtgccaactcccgcctggtctgcaagatttctggcgacgtgatgaacgagaacaatccgcccatgatgctgcccaacggctacgtctacggctacaattctctgctttctatccgtcaagatgataaagtcgtgtgcccgagaaccaaagaagtcttccacttctcacaagccgagaaggtgtacatcatgtaggccccacgtcgtgaagcgcacgcctcggggacgggctgcagtgggcggggaggccacgccttcctcctgtcccacgctccagcctgccgcggcgtttctgtttcttgcgaccaaagatccgtgagcaacgataaatactcttaggaagagagaaaataaggtttcataagtttgtacttgaaaacatttggattggtaggattttgtaacacgtcaaccatttgatgcttctgaaaagtactttcaacttgcgaaggaaactcttctttaaagactgacctaaacaccgagggaaacttaagaacgtttaaaatataggagtccgtgatttccctgtgttttcagtttctttccttctgtgaacgatgagacttggagaacgggctggtccttcaccacttcctgttggccctggcctggccggggaaggtggcagcggcaccggactgacctgcagtgacccgcgatgccgcgccacgagggacacttatggcttcattcgagagctgctgccaaaacgcctggcgccgccaccgtcgggggctggcttcgaggacgcccgcctgcctcgcgggtcgtgtccgcgggactgtgttcgtacgtgcatagtttcgatatcacatcgcggggctgtgttcgtagctgcgtcgtttcgatatcacaccctctgtgtgccgccttacttcctgcttcgagaatgtataacgtggaaatccacgggaccaaatttctgcagaggccttgccggatggttccataactgtagagtctaattgctatccattacagaaattaatcgttcagttgaaagaagtactgatgacttttcaaaacaaatgaaccaccgtagctgacagagaaccgtatcgtagaggtttgtagttagtgcttatttttgcatgttgatgttgactagctaataaactgtaaatgtaaaccatgcgaataaaatggttttctatttctcaaaaaaaaaaaaaaaaaggggggcggtaaaaattccggggggccaggttagctgtccagttttggaaggggcctaaggggcgttaagaaaggggcgggtttacctcggggaaggtttggttggggagcttttggggtatggacccagatagcggaaaatgttggtcgtttttggtttgtatatttaaaattaataaggtttttaggcgttattt

SEQ ID NO: 16844 - DNA, 1966 bp, Homo sapiens
tcgagcggccgcccgggcaggtggagtcggcggctcagttgtccatgaccctgaaggtccaggagtacccgaccctcaaggtgccctacgagacgctgaacaaacgctttcgcgccgctcagaagaacattgaccgggagaccagccacgtcaccatggtggtggccgagctggagaagacgttgagcggctgccccgccgtggactccgtggtcagcctgctggacggcgtggtggagaagctcagcgtcctcaagaggaaggacctagtgaatattgagatgttcctgacggccaaagaggtggaggagtccctggagaggcgtgagacggccacctgcctggcctggtgccatgacaacaagtcccggctccggaagatgaagagctgcctggagttcagcctcagaatccaggagttcattgaactcatccggcagaataagagactggacgctgtgagacatgcaagaaagcacttcagccaagcagaagggagccagctggacgaggtgcgccaggccatgggcatgctggccttcccgcccgacacgcacatctccccgtacaaggaccttctggaccctgcacggtggcggatgctgatccagcagttccggtacgacaactaccgactacaccagctgggaaacaattctgtgttcaccctcaccctgcaggctggcctctcagccatcaagacaccacagtgctacaaggaggacggcagctccaagagccctgactgccctgtgtgcagccgctccctgaacaagctggcgcagcccctgcccatggcccactgtgccaactcccgcctggtctgcaagatttctggcgacgtgatgaacgagaacaatccgcccatgatgctgcccaacggctacgtctacggctacaattctctgctttctatccgtcaagatgataaagtcgtgtgcccgagaaccaaagaagtcttccacttctcacaagccgagaaggtgtacatcatgtaggccccacgtcgtgaagcgcacgcctcggggacgggctgcagtgggcggggaggccacgccttcctcctgtcccacgctccagcctgccgcggcgtttctgtttcttgcgaccaaagatccgtgagcaacgataaatactcttaggaagagagaaaataaggtttcataagtttgtacttgaaaacatttggattggtaggattttgtaacacgtcaaccatttgatgcttctgaaaagtactttcaacttgcgaaggaaactcttctttaaagactgacctaaacaccgagggaaacttaagaacgtttaaaatataggagtccgtgatttccctgtgttttcagtttctttccttctgtgaacgatgagacttggagaacgggctggtccttcaccacttcctgttggccctggcctggccggggaaggtggcagcggcaccggactgacctgcagtgacccgcgatgccgcgccacgagggacacttatggcttcattcgagagctgctgccaaaacgcctggcgccgccaccgtcgggggctggcttcgaggacgcccgcctgcctcgcgggtcgtgtccgcgggactgtgttcgtacgtgcatagtttcgatatcacatcgcggggctgtgttcgtagctgcgtcgtttcgatatcacaccctctgtgtgccgccttacttcctgcttcgagaatgtataacgtggaaatccacgggaccaaatttctgcagaggccttgccggatggttccataactgtagagtctaattgctatccattacagaaattaatcgttcagttgaaagaagtactgatgacttttcaaaacaaatgaaccaccgtagctgacagagaaccgtatcgtagaggtttgtagttagtgcttatttttgcatgttgatgttgactagctaataaactgtaaatgtaaaccatgcgaataaaatggttttctatttctca

SEQ ID NO: 16845 - DNA, 2209 bp, Homo sapiens
tgaatcgagctcggtccgatttgctcctagacggggacttggtccctgcctgcgactcactgtggccctgcctgtgactgagtctgtcccgtttgtgactgattccttcctgtgactgactctgtcccacctgcaactgacttcttcctgcctgtgacagactctgcccctgcctgcgactgagtctgtcccttcctgcaactgagtccatcccgcctgtgactctgtcctcgcctgtgactgactctgcccctgccctgtgactgtctcacctgtgactgactccgtcctgcctgtgactcagcctcttactgactctacccctgcctgtgactgactctgccctctcctgtgactgactctgtccccacctgtgactgactctgtccccacctgtgactgactgtcctcctgcaactgactctgtccccgcctatgaatgtctttcatgtgacctgcctcaggcccagagggcagtgagtgtttcgcgattgctgctggtacctggctgtgccggggtatgaatgagactcaggccccctcccttgtcccctctttgtggaactctgggcgagagggctggcgtgcttgcccactgcctgttcctaggtgccagcagaacgtccctgctgggtggctcttgtcctgcctggagaggttgcgtggccggggagagggcggcgggcgacggagccactctgtgcctgtggtcctggtgctggaggccggggtgagaaggcgcaggcttcttgtctccaccgaggcctcagtggggctgtttagctgtcgagtgcagcacttcctgtgcctcgaaagacagccccgtgtagtcagcatggcgcccacatagccagaagggcacgcagcccagggcagagtggccacagggggctgggctcaccccggctgccctgagtggcccccaacccttccttgacccgatgctcagacagtgctacaaggaggacggcagctccaagagccctgactgccctgtgtgcagccgctccctgaacaagctggcgcagcccctgcccatggcccactgtgccaactcccgcctggtctgcaagatttctggcgacgtgatgaacgagaacaatccgcccatgatgctgcccaacggctacgtctacggctacaattctctgctttctatccgtcaagatgataaagtcgtgtgcccgagaaccaaagaagtcttccacttctcacaagccgagaaggtgtacatcatgtaggccccacgtcgtgaagcgcacgcctcggggacgggctgcagtgggcggggaggccacgccttcctcctgtcccacgctccagcctgccgcggcgtttctgtttcttgcgaccaaagatccgtgagcaacgataaatactcttaggaagagagaaaataaggtttcataagtttgtacttgaaaacatttggattggtaggattttgtaacacgtcaaccatttgatgcttctgaaaagtactttcaacttgcgaaggaaactcttctttaaagactgacctaaacaccgagggaaacttaagaacgtttaaaatataggagtccgtgatttccctgtgttttcagtttctttccttctgtgaacgatgagacttggagaacgggctggtccttcaccacttcctgttggccctggcctggccggggaaggtggcagcggcaccggactgacctgcagtgacccgcgatgccgcgccacgagggacacttatggcttcattcgagagctgctgccaaaacgcctggcgccgccaccgtcgggggctggcttcgaggacgcccgcctgcctcgcgggtcgtgtccgcgggactgtgttcgtacgtgcatagtttcgatatcacatcgcggggctgtgttcgtagctgcgtcgtttcgatatcacaccctctgtgtgccgccttacttcctgcttcgagaatgtataacgtggaaatccacgggaccaaatttctgcagaggccttgccggatggttccataactgtagagtctaattgctatccattacagaaattaatcgttcagttgaaagaagtactgatgacttttcaaaacaaatgaaccaccgtagctgacagagaaccgtatcgtagaggtttgtagttagtgcttatttttgcatgttgatgttgactagctaataaactgtaaatgtaaaccatgcgaataaaatggttttctatttctca

SEQ ID NO: 16846 - DNA, 2613 bp, Homo sapiens
  misc_feature (975)..(975): n is a, c, g, or t
  misc_feature (977)..(977): n is a, c, g, or t
  misc_feature (2597)..(2597): n is a, c, g, or t
gcgtgcagcgggcgggtcccccgcccggctaatgttttggccgcttcaagatggcggtgcaggagtcggcggctcagttgtccatgaccctgaaggtccaggagtacccgaccctcaaggtgccctacgagacgctgaacaaacgctttcgcgccgctcagaagaacattgaccgggagaccagccacgtcaccatggtggtggccgagctggagaagacgttgagcggctgccccgccgtggactccgtggtcagcctgctggacggcgtggtggagaagctcagcgtcctcaagaggaaggcggtggaatccatccaggccgaggacgagagcgccaagctgtgcaagcgccggatcgagcacctcaaagagcatagcagcgaccagcccgcggcggccagcgtgtggaagaggaagcgcatggatcgcatgatggtggagcacctgctgcgttgcggctactacaacacggctgtcaagctggcgcgccagagcggcatcgaggacctagtgaatattgagatgttcctgacggccaaagaggtggaggagtccctggagaggcgtgagacggccacctgcctggcctggtgccatgacaacaagtcccggctccggaagatgaagagctgcctggagttcagcctcagaatccaggagttcattgaactcatccggcagaataagagactggacgctgtgagacatgcaagaaagcacttcagccaagcagaagggagccagctggacgaggtgcgccaggccatgggcatgctggccttcccgcccgacacgcacatctccccgtacaaggaccttctggaccctgcacggtggcggatgctgatccagcagttccggtacgacaactaccgactacaccagctgggaaacaattctgtgttcaccctcaccctgcaggctggcctctcagccatcaagacaccgtatcctacctcccgtgcgcagtgcngnttggctggggttgcatctttggtcatattttaacacgctgaccctgcactttgccactcttgtcctcccaccacagacagccccgagctcccgtgtgctgcacttgcgtggtgtctggatggtcggggtggggccgtgttgaggggcctcggatgcgtcgtgcagccttcactctgggaagtggcgcgcttcctctctcatcatctcagaggccgccatgggcattgatctaaaagcccgattttgatgtgttctggcagccggcagattaccattcagaatagttttcccgtgtgattaccaagaaccttgcctgtgactgactctgtcccgcctgtgactgactctgtcccacctgtgaccgactctgtctgcctgtgactctgtccctgcctgtgactgactccatcctgcctgtgactctgtcccacctgcgactcactgagttcctgcctgtgactcactcggctcccgcctgcaacggacttggtccctgcctgcgactcactgtggccctgcctgtgactgagtctgtcccgtttgtgactgattccttcctgtgactgactctgtcccacctgcaactgacttcttcctgcctgtgacagactctgcccctgcctgcgactgagtctgtcccttcctgcaactgagtccatcccgcctgtgactctgtcctcgcctgtgactgactctgcccctgccctgtgactgtctcacctgtgactgactccgtcctgcctgtgactcagcctcttactgactctacccctgcctgtgactgactctgccctctcctgtgactgactctgtccccacctgtgactgactctgtccccacctgtgactgactgtcctcctgcaactgactctgtccccgcctatgaatgtctttcatgtgacctgcctcaggcccagagggcagtgagtgtttcgcgattgctgctggtacctggctgtgccggggtatgaatgagactcaggccccctcccttgtcccctctttgtggaactctgggcgagagggctggcgtgcttgcccactgcctgttcctaggtgccagcagaacgtccctgctgggtggctcttgtcctgcctggagaggttgcgtggccggggagagggcggcgggcgacggagccactctgtgcctgtggtcctggtgctggaggccggggtgagaaggcgcaggcttcttgtctccaccgaggcctcagtggggctgtttagctgtcgagtgcagcacttcctgtgcctcgaaagacagccccgtgtagtcagcatggcgcccacatagccagaagggcacgcagcccagggcagagtggccacagggggctgggctcaccccggctgccctgagtggcccccaacccttccttgacccgatgctcagacagtgctacaaggaggacggcagctccaagagccctgactgccctgtgtgcagccgctccctgaacaagctggcgcagcccctgcccatggcccactgtgccaactcccgcctggtctgcaagatttctggcgacgtgatgaacgagaacaatccgcccatgatgctgcccaacggctacgtctacggctacaattctctgctttctatccgtctaggagcntaatcggtaccgagcc

SEQ ID NO: 16847 - DNA, 638 bp, Homo sapiens
gcgtgcagcgggcgggtcccccgcccggctaatgttttggccgcttcaagatggcggtgcaggagtcggcggctcagttgtccatgaccctgaaggtccaggagtacccgaccctcaaggtgccctacgagacgctgaacaaacgctttcgcgccgctcagaagaacattgaccgggagaccagccacgtcaccatggtggtggccgagctggagaagacgttgagcggctgccccgccgtggactccgtggtcagcctgctggacggcgtggtggagaagctcagcgtcctcaagaggaaggcggtggaatccatccaggccgaggacgagagcgccaagctgtgcaagcgccggatcgagcacctcaaagagcatagcagcgaccagcccgcggcggccagcgtgtggaagaggaagcgcatggatcgcatgatggtggagcacctgctgcgttgcggctactacaacacggctgtcaagctggcgcgccagagcggcatcgaggacctagtgaatattgagatgttcctgacggccaaagaggtggaggagtccctggagaggcgtgagacggccacctgccatgttcctggggtgcccgttttacccaagcagtatccgccgcgagtagttgca

SEQ ID NO: 16848 - DNA, 313 bp, Homo sapiens
tcctttctcccttgcctccacccctcgcgatgtagccccatcccctgcccttctctgcttcccattgttctagaacattccagcatggaaaccccgctgtgcaaggcccctgcactggccgcagaagccgcacctatctgctgaggaacccggttgctgcctggagtgggtgtcgagtactgcctggcagcatagccatgcttcttgaggcattttagcaccctgtaccccaggtactgttccatatgcccctccttctccatgagccccccatgcctgccccgtccttgtgctctgcccgcggcttggccct

SEQ ID NO: 16849 - DNA, 2330 bp, Homo sapiens
tcgagcggccgcccgggcaggtggagtcggcggctcagttgtccatgaccctgaaggtccaggagtacccgaccctcaagaacattccagcatggaaaccccgctgtgcaaggcccctgcactggccgcagaagccgcacctatctgctgaggaacccggttgctgcctggagtgggtgtcgagtactgcctggcagcatagccatgcttcttgaggcattttagcaccctgtaccccaggtgccctacgagacgctgaacaaacgctttcgcgccgctcagaagaacattgaccgggagaccagccacgtcaccatggtggtggccgagctggagaagacgttgagcggctgccccgccgtggactccgtggtcagcctgctggacggcgtggtggagaagctcagcgtcctcaagaggaaggcggtggaatccatccaggccgaggacgagagcgccaagctgtgcaagcgccggatcgagcacctcaaagagcatagcagcgaccagcccgcggcggccagcgtgtggaagaggaagcgcatggatcgcatgatggtggagcacctgctgcgttgcggctactacaacacggctgtcaagctggcgcgccagagcggcatcgaggacctagtgaatattgagatgttcctgacggccaaagaggtggaggagtccctggagaggcgtgagacggccacctgcctggcctggtgccatgacaacaagtcccggctccggaagatgaagagctgcctggagttcagcctcagaatccaggagttcattgaactcatccggcagaataagagactggacgctgtgagacatgcaagaaagcacttcagccaagcagaagggagccagctggacgaggtgcgccaggccatgggcatgctggccttcccgcccgacacgcacatctccccgtacaaggaccttctggaccctgcacggtggcggatgctgatccagcagttccggtacgacaactaccgactacaccagctgggaaacaattctgtgttcaccctcaccctgcaggctggcctctcagccatcaagacaccacagtgctacaaggaggacggcagctccaagagccctgactgccctgtgtgcagccgctccctgaacaagctggcgcagcccctgcccatggcccactgtgccaactcccgcctggtctgcaagatttctggcgacgtgatgaacgagaacaatccgcccatgatgctgcccaacggctacgtctacggctacaattctctgctttctatccgtcaagatgataaagtcgtgtgcccgagaaccaaagaagtcttccacttctcacaagccgagaaggtgtacatcatgtaggccccacgtcgtgaagcgcacgcctcggggacgggctgcagtgggcggggaggccacgccttcctcctgtcccacgctccagcctgccgcggcgtttctgtttcttgcgaccaaagatccgtgagcaacgataaatactcttaggaagagagaaaataaggtttcataagtttgtacttgaaaacatttggattggtaggattttgtaacacgtcaaccatttgatgcttctgaaaagtactttcaacttgcgaaggaaactcttctttaaagactgacctaaacaccgagggaaacttaagaacgtttaaaatataggagtccgtgatttccctgtgttttcagtttctttccttctgtgaacgatgagacttggagaacgggctggtccttcaccacttcctgttggccctggcctggccggggaaggtggcagcggcaccggactgacctgcagtgacccgcgatgccgcgccacgagggacacttatggcttcattcgagagctgctgccaaaacgcctggcgccgccaccgtcgggggctggcttcgaggacgcccgcctgcctcgcgggtcgtgtccgcgggactgtgttcgtacgtgcatagtttcgatatcacatcgcggggctgtgttcgtagctgcgtcgtttcgatatcacaccctctgtgtgccgccttacttcctgcttcgagaatgtataacgtggaaatccacgggaccaaatttctgcagaggccttgccggatggttccataactgtagagtctaattgctatccattacagaaattaatcgttcagttgaaagaagtactgatgacttttcaaaacaaatgaaccaccgtagctgacagagaaccgtatcgtagaggtttgtagttagtgcttatttttgcatgttgatgttgactagctaataaactgtaaatgtaaaccatgcgaataaaatggttttctatttctca

SEQ ID NO: 16850 - DNA, 3511 bp, Homo sapiens
  misc_feature (852)..(852): n is a, c, g, or t
  misc_feature (854)..(854): n is a, c, g, or t
gcgtgcagcgggcgggtcccccgcccggctaatgttttggccgcttcaagatggcggtgcaggagtcggcggctcagttgtccatgaccctgaaggtccaggagtacccgaccctcaaggtgccctacgagacgctgaacaaacgctttcgcgccgctcagaagaacattgaccgggagaccagccacgtcaccatggtggtggccgagctggagaagacgttgagcggctgccccgccgtggactccgtggtcagcctgctggacggcgtggtggagaagctcagcgtcctcaagaggaaggcggtggaatccatccaggccgaggacgagagcgccaagctgtgcaagcgccggatcgagcacctcaaagagcatagcagcgaccagcccgcggcggccagcgtgtggaagaggaagcgcatggatcgcatgatggtggagcacctgctgcgttgcggctactacaacacggctgtcaagctggcgcgccagagcggcatcgagagctgcctggagttcagcctcagaatccaggagttcattgaactcatccggcagaataagagactggacgctgtgagacatgcaagaaagcacttcagccaagcagaagggagccagctggacgaggtgcgccaggccatgggcatgctggccttcccgcccgacacgcacatctccccgtacaaggaccttctggaccctgcacggtggcggatgctgatccagcagttccggtacgacaactaccgactacaccagctgggaaacaattctgtgttcaccctcaccctgcaggctggcctctcagccatcaagacaccgtatcctacctcccgtgcgcagtgcngnttggctggggttgcatctttggtcatattttaacacgctgaccctgcactttgccactcttgtcctcccaccacagacagccccgagctcccgtgtgctgcacttgcgtggtgtctggatggtcggggtggggccgtgttgaggggcctcggatgcgtcgtgcagccttcactctgggaagtggcgcgcttcctctctcatcatctcagaggccgccatgggcattgatctaaaagcccgattttgatgtgttctggcagccggcagattaccattcagaatagttttcccgtgtgattaccaagaaccttgcctgtgactgactctgtcccgcctgtgactgactctgtcccacctgtgaccgactctgtctgcctgtgactctgtccctgcctgtgactgactccatcctgcctgtgactctgtcccacctgcgactcactgagttcctgcctgtgactcactcggctcccgcctgcaacggacttggtccctgcctgcgactcactgtggccctgcctgtgactgagtctgtcccgtttgtgactgattccttcctgtgactgactctgtcccacctgcaactgacttcttcctgcctgtgacagactctgcccctgcctgcgactgagtctgtcccttcctgcaactgagtccatcccgcctgtgactctgtcctcgcctgtgactgactctgcccctgccctgtgactgtctcacctgtgactgactccgtcctgcctgtgactcagcctcttactgactctacccctgcctgtgactgactctgccctctcctgtgactgactctgtccccacctgtgactgactctgtccccacctgtgactgactgtcctcctgcaactgactctgtccccgcctatgaatgtctttcatgtgacctgcctcaggcccagagggcagtgagtgtttcgcgattgctgctggtacctggctgtgccggggtatgaatgagactcaggccccctcccttgtcccctctttgtggaactctgggcgagagggctggcgtgcttgcccactgcctgttcctaggtgccagcagaacgtccctgctgggtggctcttgtcctgcctggagaggttgcgtggccggggagagggcggcgggcgacggagccactctgtgcctgtggtcctggtgctggaggccggggtgagaaggcgcaggcttcttgtctccaccgaggcctcagtggggctgtttagctgtcgagtgcagcacttcctgtgcctcgaaagacagccccgtgtagtcagcatggcgcccacatagccagaagggcacgcagcccagggcagagtggccacagggggctgggctcaccccggctgccctgagtggcccccaacccttccttgacccgatgctcagacagtgctacaaggaggacggcagctccaagagccctgactgccctgtgtgcagccgctccctgaacaagctggcgcagcccctgcccatggcccactgtgccaactcccgcctggtctgcaagatttctggcgacgtgatgaacgagaacaatccgcccatgatgctgcccaacggctacgtctacggctacaattctctgctttctatccgtcaagatgataaagtcgtgtgcccgagaaccaaagaagtcttccacttctcacaagccgagaaggtgtacatcatgtaggccccacgtcgtgaagcgcacgcctcggggacgggctgcagtgggcggggaggccacgccttcctcctgtcccacgctccagcctgccgcggcgtttctgtttcttgcgaccaaagatccgtgagcaacgataaatactcttaggaagagagaaaataaggtttcataagtttgtacttgaaaacatttggattggtaggattttgtaacacgtcaaccatttgatgcttctgaaaagtactttcaacttgcgaaggaaactcttctttaaagactgacctaaacaccgagggaaacttaagaacgtttaaaatataggagtccgtgatttccctgtgttttcagtttctttccttctgtgaacgatgagacttggagaacgggctggtccttcaccacttcctgttggccctggcctggccggggaaggtggcagcggcaccggactgacctgcagtgacccgcgatgccgcgccacgagggacacttatggcttcattcgagagctgctgccaaaacgcctggcgccgccaccgtcgggggctggcttcgaggacgcccgcctgcctcgcgggtcgtgtccgcgggactgtgttcgtacgtgcatagtttcgatatcacatcgcggggctgtgttcgtagctgcgtcgtttcgatatcacaccctctgtgtgccgccttacttcctgcttcgagaatgtataacgtggaaatccacgggaccaaatttctgcagaggccttgccggatggttccataactgtagagtctaattgctatccattacagaaattaatcgttcagttgaaagaagtactgatgacttttcaaaacaaatgaaccaccgtagctgacagagaaccgtatcgtagaggtttgtagttagtgcttatttttgcatgttgatgttgactagctaataaactgtaaatgtaaaccatgcgaataaaatggttttctatttctca

SEQ ID NO: 16851 - DNA, 1228 bp, Homo sapiens
gcgtgcagcgggcgggtcccccgcccggctaatgttttggccgcttcaagatggcggtgcaggagtcggcggctcagttgtccatgaccctgaaggtccaggagtacccgaccctcaaggtgccctacgagacgctgaacaaacgctttcgcgccgctcagaagaacattgaccgggagaccagccacgtcaccatggtggtggccgagctggagaagacgttgagcggctgccccgccgtggactccgtggtcagcctgctggacggcgtggtggagaagctcagcgtcctcaagaggaaggcggtggaatccatccaggccgaggacgagagcgccaagctgtgcaagcgccggatcgagcacctcaaagagcatagcagcgaccagcccgcggcggccagcgtgtggaagaggaagcgcatggatcgcatgatggtggagcacctgctgcgttgcggctactacaacacggctgtcaagctggcgcgccagagcggcatcgaggacctagtgaatattgagatgttcctgacggccaaagaggtggaggagtccctggagaggcgtgagacggccacctgcctggcctggtgccatgacaacaagtcccggctccggaagatgaagagctgcctggagttcagcctcagaatccaggagttcattgaactcatccggcagaataagagactggacgctgtgagacatgcaagaaagcacttcagccaagcagaagggagccagctggacgaggtgcgccaggccatgggcatgctggccttcccgcccgacacgcacatctccccgtacaaggaccttctggaccctgcacggtggcggatgctgatccagcagttccggtacgacaactaccgactacaccagctgggaaacaattctgtgttcaccctcaccctgcaggctggcctctcagccatcaagacaccacagtgctacaaggaggacggcagctccaagagccctgactgccctgtgtgcagccgctccctgaacaagctggcgcagcccctgcccatggcccactgtgccaactcccgcctggtctgcaagatttctggcgacgtgatgaacgagaacaatccgcccatgatgctgcccaacggctacgtctacggctacaatgtgaggggggcagggcaggggggccaggctggcacgcatcgccatcgggacagggctgtgtgggacgggcagggcaggggggc

SEQ ID NO: 16852 - DNA, 680 bp, Homo sapiens
tcgagcggccgcccgggcaggtggagtcggcggctcagttgtccatgaccctgaaggtccaggagtacccgaccctcaagaacattccagcatggaaaccccgctgtgcaaggcccctgcactggccgcagaagccgcacctatctgctgaggaacccggttgctgcctggagtgggtgtcgagtactgcctggcagcatagccatgcttcttgaggcattttagcaccctgtaccccaggagtttcctgacctggggatgaaggccagggtcgttacagtggctcccaggccctttgccctgtagggtgctgggcccagtggcctttctgccgccattcagccaggccagcatgccgagcccagggttttactgccaccttcctctgtctggagcgctccttccacagatgtccatggtcccatgtcctcaccttcaatctttgccaacgtccgtggtcccatgtcctcacctccttcaatcttcgctgagctgtcagcttgtgaagcttctctgactccactgttgaaactgcagccccagcatctcccacttctgcccttttccctcgtgagtcgtgaccgctgtctcacataacggtattttgcttgtttctgaccactgggattataagctcttttgaaggatagagaagaaataaattctccaattaacaaatg

SEQ ID NO: 16853 - DNA, 414 bp, Homo sapiens
atcatctcagctagctgatatcctactctatgagatggtaacattagtttttccattttacagatgagaaaactgagattatgccactgcactccagcttaggtgacagagtgagaccctatctcaaaaaaagaaaaaaaccaaaaaggtagaaaaaggtagaatagagaccaggccatttcctttccttcgatccctccaaataccatgattccttgtcatttctacttggattccctccaccacacctctttggacctcaaaagcatagatttcaattgtcataatctttggtttggcacattctcatcattagttcatactttgttataatgtatgcattataagcatttttttttttttgatacagagtcatgctctgtcacccaggctggagtgcagtggcatgatctc

SEQ ID NO: 16854 - DNA, 237 bp, Homo sapiens
cctgacctgaggtgatctgcccgcctcggcctcccaaagtgctgggattacacgcatgaggcactgtgcctggccaattttaaaatatatttttaagaatgctgatatcaagtatcttcatagattgagaaaaccacagtttggtgcttatatatgacttttaaaaactctcaggaaactaagagtagacagaaagtttcttaacttcataattgctacaccccaaaagccgactgc

SEQ ID NO: 16855 - DNA, 317 bp, Homo sapiens
ctcatgtctatattgagttcatttcatccggttgtcttcataaagagtgacaaaaacagaaggaaacagtacaaaaaattcagattaatttcagagtcttgagtgtattgcgcaattttaggatgttgactgatccttcatcagagattgaaccatgatggtggaagaattacaaagctgtgaaagagattgctgtaagaacaagaattaacactttagaagacaaaatgatttgtagtctctttagttatctaaagtagtatgtatgtaggtaggtaattggtgttcacgaacatgatcaaattggtactgtggag

SEQ ID NO: 16856 - DNA, 380 bp, Homo sapiens
caacatttggatacgaaagcaggagtgcctgtcctcacccaggtccatagggttggagccctagctagggacttgcttttctttaccgggcacttccctgaccccgtatcaacattacttgattaaaatttcaactttgctacttatttgcaaccttatttgtaaccttgggcaagctaattgacttttcttcctcttcagtaaaatgtctctgtgtacatgtgtgtaagtttgcaatgtaaataatagtttttggccgggcgcggtggctcacgcctgtaatcccagcactctgggaggcagagacgggcggatcacgaggtcaggagatcgagaccatcctggctaacacggtgaaaccccgtctctactaaaaatac

SEQ ID NO: 16857 - DNA, 747 bp, Homo sapiens
gcctgacatgagaaaagccctcttgcagatacctcatctccctgctcccttcccctccatctcactcactgttttcagcacctgcacccagcatgcaaatgctgctgtcgagggaaagaaactcaagaaagcagcctcccagcactccactctcaatgcacttatgatcacaaaccacgaatgggcattcccccacacttcctagtaatctcgctgtgactctcccctgtgccctccctctgcttactcttgacagataacctaacctcatttgtcccagagaacaccaagccatcaaaccctaactccctcagagctccttcaacaaatctacaaaccttccacgcccttcttctccttgtctccagcctcatggagtacacattcctgctcttagcaaaggccaagccctccaccaccaccatgcccaagaacttaattcctaccactacccttcttcctgcagcatcaatcagtctttactttgctacaggatcatccccaacagcatgtagacacgttctattgaatcttcaccctaaagattcgcacatgcgtgtgcgcctttgacccccatatatccttctagctaatgacacaattcctctataggaattatctgtgctaatgcttctcaaactttaatgcatagtttacctgggaatcttgtgaaaacgcatattctgattcagtaggtctggagtggagcccaagatttggcaccactaacctagtctctaatcatgt

SEQ ID NO: 16858 - DNA, 138 bp, Homo sapiens
gggagtgaaagcagttgggtttggcttaacccattttgacagtgttactagaggcctttacaatgattgttggtggggagcataatttgacttctttcttgaaccctaagaaaggaccctgggttccatcagggaaaa

SEQ ID NO: 16859 - DNA, 2582 bp, Homo sapiens
gcggccggggaaaaacccggatgagctgggcagcagtgttggcagtcgcggctgcgagatttgggcacttttgggggtgccggtggcccgggccgatggcgcaaggttgggcaggcttctctgaggaggaactgaggagactaaagcagactaaagatccatttgaaccacagcgacgtctccccgcgaagaaaagtcgacaacaacttcagcgagaaaaagcccttgtagagcaaagccaaaaacttgggcttcaagatggatcaacctcattacttccagagcagctgctttcagcaccaaaacagagagttaacgttcaaaaaccacctttttcttcccctactcttccgagtcatttcactctcacctcccccgttggtgatggacaaccacagggcattgaaagtcagccaaaggaactgggacttgagaattcccatgatggtcacaacaatgttgagattctacctccaaagccagattgcaaattggagaaaaagaaagtggaattgttagcaagaaaaatctcgttgggaagtcctccaacaagaacaacggctaatggaagagaaaaataaacgtaaaaaagctcttttggctaaagctattgcagaaagatccaaaagaactcaggcagagaccatgaaactaaagcggatccagaaggagttgcaggctttagatgacatggtgtcagctgacattggaattctcaggaaccggattgatcaggccagcttagactattcatacgctcggaagcggtttgacagggctgaagcagagtacattgcagcaaagctagatatacagcgcaagactgagataaaagagcaactcactgaacacctttgtacgatcatacagcaaaatgagctccgaaaggccaagaagttggaggagttgatgcaacaactagatgtagaagccgatgaagagactttggagcttgaggtggaggtcgagagattgctacacgaacaagaagtagaatcaaggagaccagtggttcgtttagagaggccatttcagcctgcggaggagagtgtgacattagaatttgctaaagagaacagaaagtgtcaagaacaagctgtttccccaaaggtagatgaccagtgtggaaattccagtagcatcccctttcttagtccaaactgcccaaatcaagaaggtaatgacatttcagctgctttggccacatgaagttctggtattcttttgagctaatatggtattgagtaaagtatactttttgcagtagatcatgccctgacctccaataaaaacctctttaaaacaatgctgatttttgaattcatgattagttttagtaaattaataggtttggccattctaaaatccaaaattatgataactgtatttctaggggtatgtttcaccttgattttggcccggttctttcagtgttccgtttaccctttttactgaaagtaagtgacttaaaaggatggaagaaaaactacatggttggagtgtttttagatcagataaatatagaaaagtaaaatggaaaatgatactcaatacctagttaaactcatttcacttctcctgggagacgtattaagactggaagtcctattttatttaatcagtatcagtaaaaagaccaaaaattaccagtgtgaacaagagaaaaacaggaatagaagaaaaaagttgcaggttgaattatctatctggatattactagagttgtaaaacacaacttggaaactggaatttatgtgaagaaccaaacaacttaaaccagcatcacttttgtcttcaatttgccttccagtgattttagtttacaacctgcgttttgttatttgaaacacacacacttatatataaacacatgtaattttactattttattgtctttcctttaatcgatgaattgattaaatttagacaattaaaacatttctaaagtgagactgaaaataatatagaaaatctcattgctacttgtgattatcaaaaaaagtatgtattttctttctaaagttatctataaatatgtttttgatatgttggacatgaattaccctgtcatgaagcgtttaaattgttaaaatgctgattttcttattagtttgttaattgcctgttactagtacttgaccaatacattgtgctatatgtaaatgtgtaaataaatattgtaattttctcacaaagtctgtgaatatcacattatgatttatttatcagaaattccaaaaagtaaaaatattacctttgaggactttttttttttaaaaaaagaattattatcagagaacataagcacaagtataagattgtatccataaaagtttctgaaaaacttagggacatcctgtttttaaatgggtttgtttgagggtattatcttctggtaatatagatgagctttatatttttatattatgtaatttgagttgaaagtataacattttactactgacttctctaaacagaagcatttctatagatagttgtgcttttatatatgaaatacataaaagccaacagtttcattgtctaacacacttctttttctaaggaataaacaagtctgatgt

SEQ ID NO: 16860 - DNA, 682 bp, Homo sapiens
ggtaccggtcaggaattcccgggtcaactactactactaaattagcggccgcgtgaaaataatatagaaaatctcattgctacttgtgattatcaaaaaaagtatgtattttctttctaaagttatctataaatatgtttttgatatgttggacatgaattaccctgtcatgaagcgtttaaattgttaaaatgctgattttcttattagtttgttaattgcctgttactagtacttgaccaatacattgtgctatatgtaaatgtgtaaataaatattgtaattttctcacaaagtctgtgaatatcacattatgatttatttatcagaaattccaaaaagtaaaaatattacctttgaggactttttttttttaaaaaaagaattattatcagagaacataagcacaagtataagattgtatccataaaagtttctgaaaaacttagggacatcctgtttttaaatgggtttgtttgagggtattatcttctggtaatatagatgagctttatatttttatattatgtaatttgagttgaaagtataacattttactactgacttctctaaacagaagcatttctatagatagttgtgcttttatatatgaaatacataaaagccaacagtttcattgtctaacacacttctttttctaaggaataaacaagtctgatgt

SEQ ID NO: 16861 - DNA, 908 bp, Homo sapiens
gcggccggggaaaaacccggatgagctgggcagcagtgttggcagtcgcggctgcgagatttgggcacttttgggggtgccggtggcccgggccgatggcgcaaggttgggcaggcttctctgaggaggaactgaggagactaaagcagactaaagacaaaagaaaagtcaacaaaagacatgaatagatatttcctagaaaaggaaatatgaagagatgctcatcaccaccaaggagcagagaattacaaatcaagaatacagtgagatccatttgaaccacagcgacgtctccccgcgaagaaaagtcgacaacaacttcagcgagaaaaagcccttgtagagcaaagccaaaaacttgggcttcaagatggatcaacctcattacttccagagcagctgctttcagcaccaaaacagagagttaacgttcaaaaaccacctttttcttcccctactcttccgagtcatttcactctcacctcccccgttggtgatggacaaccacagggcattgaaagtcagccaaaggaactgggacttgagaattcccatgatggtcacaacaatgttgagattctacctccaaagccagattgcaaattggagaaaaagaaagtggaattgttagcaagaaaaatctcgttgggaagtcctccaacaagaacaacggctaatggaagagaaaaataaacgtaaaaaagctcttttggctaaagctattgcagaaagatccaaaagaactcaggcagagaccatgaaactaaagcggatccagaaggagttgcaggctttagatgacatggtgtcagctgacattggaattctcaggaaccggattgatcaggccagcttagactattcatacgctcggtgagttggggaaattgaatctgaacaaggagtat

SEQ ID NO: 16862 - DNA, 205 bp, Homo sapiens
ctctagaggataccttctttattgacagtgtggaaattccagtagcatcccctttcttagtccaaactgcccaaatcaagaaggtaatgacatttcagctgctttggccacatgaagttctggtattcttttgagctaatatggtattgagtaaagtatactttttgcagtagatcatgccctgacctccaataaaaacctcttt

SEQ ID NO: 16863 - DNA, 2882 bp, Homo sapiens
gcggccggggaaaaacccggatgagctgggcagcagtgttggcagtcgcggctgcgagatttgggcacttttgggggtgccggtggcccgggccgatggcgcaaggttgggcaggcttctctgaggaggaactgaggagactaaagcagactaaagggtacaagtgccctggcctctggtctgactccagtagactcatgaggagacaaaccacaaagttatgtgatagtagatattgcaagaacttgcttcagagacaagaggaacctcactctgccggggattggatggagcttgggaagatttcacaaagtttgtgtgttagcagaggcgcattttccaggacaaaagaaaagtcaacaaaagacatgaatagatatttcctagaaaaggaaatatgaagagatgctcatcaccaccaaggagcagagaattacaaatcaagaatacagtgagatccatttgaaccacagcgacgtctccccgcgaagaaaagtcgacaacaacttcagcgagaaaaagcccttgtagagcaaagccaaaaacttgggcttcaagatggatcaacctcattacttccagagcagctgctttcagcaccaaaacagagagttaacgttcaaaaaccacctttttcttcccctactcttccgagtcatttcactctcacctcccccgttggtgatggacaaccacagggcattgaaagtcagccaaaggaactgggacttgagaattcccatgatggtcacaacaatgttgagattctacctccaaagccagattgcaaattggagaaaaagaaagtggaattgttagcaagaaaaatctcgttgggaagtcctccaacaagaacaacggctaatggaagagaaaaataaacgtaaaaaagctcttttggctaaagctattgcagaaagatccaaaagaactcaggcagagaccatgaaactaaagcggatccagaaggagttgcaggctttagatgacatggtgtcagctgacattggaattctcaggaaccggattgatcaggccagcttagactattcatacgctcggaagcggtttgacagggctgaagcagagtacattgcagcaaagctagatatacagcgcaagactgagataaaagagcaactcactgaacacctttgtacgatcatacagcaaaatgagctccgaaaggccaagaagttggaggagttgatgcaacaactagatgtagaagccgatgaagagactttggagcttgaggtggaggtcgagagattgctacacgaacaagaagtagaatcaaggagaccagtggttcgtttagagaggccatttcagcctgcggaggagagtgtgacattagaatttgctaaagagaacagaaagtgtcaagaacaagctgtttccccaaaggtagatgaccagtgtggaaattccagtagcatcccctttcttagtccaaactgcccaaatcaagaaggtaatgacatttcagctgctttggccacatgaagttctggtattcttttgagctaatatggtattgagtaaagtatactttttgcagtagatcatgccctgacctccaataaaaacctctttaaaacaatgctgatttttgaattcatgattagttttagtaaattaataggtttggccattctaaaatccaaaattatgataactgtatttctaggggtatgtttcaccttgattttggcccggttctttcagtgttccgtttaccctttttactgaaagtaagtgacttaaaaggatggaagaaaaactacatggttggagtgtttttagatcagataaatatagaaaagtaaaatggaaaatgatactcaatacctagttaaactcatttcacttctcctgggagacgtattaagactggaagtcctattttatttaatcagtatcagtaaaaagaccaaaaattaccagtgtgaacaagagaaaaacaggaatagaagaaaaaagttgcaggttgaattatctatctggatattactagagttgtaaaacacaacttggaaactggaatttatgtgaagaaccaaacaacttaaaccagcatcacttttgtcttcaatttgccttccagtgattttagtttacaacctgcgttttgttatttgaaacacacacacttatatataaacacatgtaattttactattttattgtctttcctttaatcgatgaattgattaaatttagacaattaaaacatttctaaagtgagactgaaaataatatagaaaatctcattgctacttgtgattatcaaaaaaagtatgtattttctttctaaagttatctataaatatgtttttgatatgttggacatgaattaccctgtcatgaagcgtttaaattgttaaaatgctgattttcttattagtttgttaattgcctgttactagtacttgaccaatacattgtgctatatgtaaatgtgtaaataaatattgtaattttctcacaaagtctgtgaatatcacattatgatttatttatcagaaattccaaaaagtaaaaatattacctttgaggactttttttttttaaaaaaagaattattatcagagaacataagcacaagtataagattgtatccataaaagtttctgaaaaacttagggacatcctgtttttaaatgggtttgtttgagggtattatcttctggtaatatagatgagctttatatttttatattatgtaatttgagttgaaagtataacattttactactgacttctctaaacagaagcatttctatagatagttgtgcttttatatatgaaatacataaaagccaacagtttcattgtctaacacacttctttttctaaggaataaacaagtctgatgt

SEQ ID NO: 16864 - DNA, 2694 bp, Homo sapiens
gcggccggggaaaaacccggatgagctgggcagcagtgttggcagtcgcggctgcgagatttgggcacttttgggggtgccggtggcccgggccgatggcgcaaggttgggcaggcttctctgaggaggaactgaggagactaaagcagactaaagacaaaagaaaagtcaacaaaagacatgaatagatatttcctagaaaaggaaatatgaagagatgctcatcaccaccaaggagcagagaattacaaatcaagaatacagtgagatccatttgaaccacagcgacgtctccccgcgaagaaaagtcgacaacaacttcagcgagaaaaagcccttgtagagcaaagccaaaaacttgggcttcaagatggatcaacctcattacttccagagcagctgctttcagcaccaaaacagagagttaacgttcaaaaaccacctttttcttcccctactcttccgagtcatttcactctcacctcccccgttggtgatggacaaccacagggcattgaaagtcagccaaaggaactgggacttgagaattcccatgatggtcacaacaatgttgagattctacctccaaagccagattgcaaattggagaaaaagaaagtggaattgttagcaagaaaaatctcgttgggaagtcctccaacaagaacaacggctaatggaagagaaaaataaacgtaaaaaagctcttttggctaaagctattgcagaaagatccaaaagaactcaggcagagaccatgaaactaaagcggatccagaaggagttgcaggctttagatgacatggtgtcagctgacattggaattctcaggaaccggattgatcaggccagcttagactattcatacgctcggaagcggtttgacagggctgaagcagagtacattgcagcaaagctagatatacagcgcaagactgagataaaagagcaactcactgaacacctttgtacgatcatacagcaaaatgagctccgaaaggccaagaagttggaggagttgatgcaacaactagatgtagaagccgatgaagagactttggagcttgaggtggaggtcgagagattgctacacgaacaagaagtagaatcaaggagaccagtggttcgtttagagaggccatttcagcctgcggaggagagtgtgacattagaatttgctaaagagaacagaaagtgtcaagaacaagctgtttccccaaaggtagatgaccagtgtggaaattccagtagcatcccctttcttagtccaaactgcccaaatcaagaaggtaatgacatttcagctgctttggccacatgaagttctggtattcttttgagctaatatggtattgagtaaagtatactttttgcagtagatcatgccctgacctccaataaaaacctctttaaaacaatgctgatttttgaattcatgattagttttagtaaattaataggtttggccattctaaaatccaaaattatgataactgtatttctaggggtatgtttcaccttgattttggcccggttctttcagtgttccgtttaccctttttactgaaagtaagtgacttaaaaggatggaagaaaaactacatggttggagtgtttttagatcagataaatatagaaaagtaaaatggaaaatgatactcaatacctagttaaactcatttcacttctcctgggagacgtattaagactggaagtcctattttatttaatcagtatcagtaaaaagaccaaaaattaccagtgtgaacaagagaaaaacaggaatagaagaaaaaagttgcaggttgaattatctatctggatattactagagttgtaaaacacaacttggaaactggaatttatgtgaagaaccaaacaacttaaaccagcatcacttttgtcttcaatttgccttccagtgattttagtttacaacctgcgttttgttatttgaaacacacacacttatatataaacacatgtaattttactattttattgtctttcctttaatcgatgaattgattaaatttagacaattaaaacatttctaaagtgagactgaaaataatatagaaaatctcattgctacttgtgattatcaaaaaaagtatgtattttctttctaaagttatctataaatatgtttttgatatgttggacatgaattaccctgtcatgaagcgtttaaattgttaaaatgctgattttcttattagtttgttaattgcctgttactagtacttgaccaatacattgtgctatatgtaaatgtgtaaataaatattgtaattttctcacaaagtctgtgaatatcacattatgatttatttatcagaaattccaaaaagtaaaaatattacctttgaggactttttttttttaaaaaaagaattattatcagagaacataagcacaagtataagattgtatccataaaagtttctgaaaaacttagggacatcctgtttttaaatgggtttgtttgagggtattatcttctggtaatatagatgagctttatatttttatattatgtaatttgagttgaaagtataacattttactactgacttctctaaacagaagcatttctatagatagttgtgcttttatatatgaaatacataaaagccaacagtttcattgtctaacacacttctttttctaaggaataaacaagtctgatgt

SEQ ID NO: 16865 - DNA, 2575 bp, Homo sapiens
tgtttttcccctagactttcaagatagagaatggggtaggagaaccactagaattatcaacgtttaatgttaattttttattttcttagaggaattataattatttgctgcccacacaaaggaattttcctctattttcttttacatagatccatttgaaccacagcgacgtctccccgcgaagaaaagtcgacaacaacttcagcgagaaaaagcccttgtagagcaaagccaaaaacttgggcttcaagatggatcaacctcattacttccagagcagctgctttcagcaccaaaacagagagttaacgttcaaaaaccacctttttcttcccctactcttccgagtcatttcactctcacctcccccgttggtgatggacaaccacagggcattgaaagtcagccaaaggaactgggacttgagaattcccatgatggtcacaacaatgttgagattctacctccaaagccagattgcaaattggagaaaaagaaagtggaattgttagcaagaaaaatctcgttgggaagtcctccaacaagaacaacggctaatggaagagaaaaataaacgtaaaaaagctcttttggctaaagctattgcagaaagatccaaaagaactcaggcagagaccatgaaactaaagcggatccagaaggagttgcaggctttagatgacatggtgtcagctgacattggaattctcaggaaccggattgatcaggccagcttagactattcatacgctcggaagcggtttgacagggctgaagcagagtacattgcagcaaagctagatatacagcgcaagactgagataaaagagcaactcactgaacacctttgtacgatcatacagcaaaatgagctccgaaaggccaagaagttggaggagttgatgcaacaactagatgtagaagccgatgaagagactttggagcttgaggtggaggtcgagagattgctacacgaacaagaagtagaatcaaggagaccagtggttcgtttagagaggccatttcagcctgcggaggagagtgtgacattagaatttgctaaagagaacagaaagtgtcaagaacaagctgtttccccaaaggtagatgaccagtgtggaaattccagtagcatcccctttcttagtccaaactgcccaaatcaagaaggtaatgacatttcagctgctttggccacatgaagttctggtattcttttgagctaatatggtattgagtaaagtatactttttgcagtagatcatgccctgacctccaataaaaacctctttaaaacaatgctgatttttgaattcatgattagttttagtaaattaataggtttggccattctaaaatccaaaattatgataactgtatttctaggggtatgtttcaccttgattttggcccggttctttcagtgttccgtttaccctttttactgaaagtaagtgacttaaaaggatggaagaaaaactacatggttggagtgtttttagatcagataaatatagaaaagtaaaatggaaaatgatactcaatacctagttaaactcatttcacttctcctgggagacgtattaagactggaagtcctattttatttaatcagtatcagtaaaaagaccaaaaattaccagtgtgaacaagagaaaaacaggaatagaagaaaaaagttgcaggttgaattatctatctggatattactagagttgtaaaacacaacttggaaactggaatttatgtgaagaaccaaacaacttaaaccagcatcacttttgtcttcaatttgccttccagtgattttagtttacaacctgcgttttgttatttgaaacacacacacttatatataaacacatgtaattttactattttattgtctttcctttaatcgatgaattgattaaatttagacaattaaaacatttctaaagtgagactgaaaataatatagaaaatctcattgctacttgtgattatcaaaaaaagtatgtattttctttctaaagttatctataaatatgtttttgatatgttggacatgaattaccctgtcatgaagcgtttaaattgttaaaatgctgattttcttattagtttgttaattgcctgttactagtacttgaccaatacattgtgctatatgtaaatgtgtaaataaatattgtaattttctcacaaagtctgtgaatatcacattatgatttatttatcagaaattccaaaaagtaaaaatattacctttgaggactttttttttttaaaaaaagaattattatcagagaacataagcacaagtataagattgtatccataaaagtttctgaaaaacttagggacatcctgtttttaaatgggtttgtttgagggtattatcttctggtaatatagatgagctttatatttttatattatgtaatttgagttgaaagtataacattttactactgacttctctaaacagaagcatttctatagatagttgtgcttttatatatgaaatacataaaagccaacagtttcattgtctaacacacttctttttctaaggaataaacaagtctgatgt

SEQ ID NO: 16866 - DNA, 2449 bp, Homo sapiens
gacgtggtgtagcggaaggcgctatccatttgaaccacagcgacgtctccccgcgaagaaaagtcgacaacaacttcagcgagaaaaagcccttgtagagcaaagccaaaaacttgggcttcaagatggatcaacctcattacttccagagcagctgctttcagcaccaaaacagagagttaacgttcaaaaaccacctttttcttcccctactcttccgagtcatttcactctcacctcccccgttggtgatggacaaccacagggcattgaaagtcagccaaaggaactgggacttgagaattcccatgatggtcacaacaatgttgagattctacctccaaagccagattgcaaattggagaaaaagaaagtggaattgttagcaagaaaaatctcgttgggaagtcctccaacaagaacaacggctaatggaagagaaaaataaacgtaaaaaagctcttttggctaaagctattgcagaaagatccaaaagaactcaggcagagaccatgaaactaaagcggatccagaaggagttgcaggctttagatgacatggtgtcagctgacattggaattctcaggaaccggattgatcaggccagcttagactattcatacgctcggaagcggtttgacagggctgaagcagagtacattgcagcaaagctagatatacagcgcaagactgagataaaagagcaactcactgaacacctttgtacgatcatacagcaaaatgagctccgaaaggccaagaagttggaggagttgatgcaacaactagatgtagaagccgatgaagagactttggagcttgaggtggaggtcgagagattgctacacgaacaagaagtagaatcaaggagaccagtggttcgtttagagaggccatttcagcctgcggaggagagtgtgacattagaatttgctaaagagaacagaaagtgtcaagaacaagctgtttccccaaaggtagatgaccagtgtggaaattccagtagcatcccctttcttagtccaaactgcccaaatcaagaaggtaatgacatttcagctgctttggccacatgaagttctggtattcttttgagctaatatggtattgagtaaagtatactttttgcagtagatcatgccctgacctccaataaaaacctctttaaaacaatgctgatttttgaattcatgattagttttagtaaattaataggtttggccattctaaaatccaaaattatgataactgtatttctaggggtatgtttcaccttgattttggcccggttctttcagtgttccgtttaccctttttactgaaagtaagtgacttaaaaggatggaagaaaaactacatggttggagtgtttttagatcagataaatatagaaaagtaaaatggaaaatgatactcaatacctagttaaactcatttcacttctcctgggagacgtattaagactggaagtcctattttatttaatcagtatcagtaaaaagaccaaaaattaccagtgtgaacaagagaaaaacaggaatagaagaaaaaagttgcaggttgaattatctatctggatattactagagttgtaaaacacaacttggaaactggaatttatgtgaagaaccaaacaacttaaaccagcatcacttttgtcttcaatttgccttccagtgattttagtttacaacctgcgttttgttatttgaaacacacacacttatatataaacacatgtaattttactattttattgtctttcctttaatcgatgaattgattaaatttagacaattaaaacatttctaaagtgagactgaaaataatatagaaaatctcattgctacttgtgattatcaaaaaaagtatgtattttctttctaaagttatctataaatatgtttttgatatgttggacatgaattaccctgtcatgaagcgtttaaattgttaaaatgctgattttcttattagtttgttaattgcctgttactagtacttgaccaatacattgtgctatatgtaaatgtgtaaataaatattgtaattttctcacaaagtctgtgaatatcacattatgatttatttatcagaaattccaaaaagtaaaaatattacctttgaggactttttttttttaaaaaaagaattattatcagagaacataagcacaagtataagattgtatccataaaagtttctgaaaaacttagggacatcctgtttttaaatgggtttgtttgagggtattatcttctggtaatatagatgagctttatatttttatattatgtaatttgagttgaaagtataacattttactactgacttctctaaacagaagcatttctatagatagttgtgcttttatatatgaaatacataaaagccaacagtttcattgtctaacacacttctttttctaaggaataaacaagtctgatgt

SEQ ID NO: 16867 - DNA, 2529 bp, Homo sapiens
gcggccggggaaaaacccggatgagctgggcagcagtgttggcagtcgcggctgcgagatttgggcacttttgggggtgccggtggcccgggccgatggcgcaaggttgggcaggcttctctgaggaggaactgaggagactaaagcagactaaagatccatttgaaccacagcgacgtctccccgcgaagaaaagtcgacaacaacttcagcgagaaaaagcccttgtagagcaaagccaaaaacttgggcttcaagatggatcaacctcattacttccagagcagctgctttcagcaccaaaacagagagttaacgttcaaaaaccacctttttcttcccctactcttccgagtcatttcactctcacctcccccgttggtgatggacaaccacagggcattgaaagtcagccaaaggaactgggacttgagaattcccatgatggtcacaacaatgttgagattctacctccaaagccagattgcaaattggagaaaaagaaagtggaattgttagcaagaaaaatctcgttgggaagtcctccaacaagaacaacggctaatggaagagaaaaataaacgtaaaaaagctcttttggctaaagctattgcagaaagatccaaaagaactcaggcagagaccatgaaactaaagcggatccagaaggagttgcaggctttagatgacatggtgtcagctgacattggaattctcaggaaccggattgatcaggccagcttagactattcatacgctcggaagcggtttgacagggctgaagcagagtacattgcagcaaagctagatatacagcgcaagactgagataaaagagcaactcactgaacacctttgtacgatcatacagcaaaatgagctccgaaaggccaagaagttggaggagttgatgcaacaactagatgtagaagccgatgaagagactttggagcttgaggtggaggtcgagagattgctacacgaacaagaagtagaatcaaggagaccagtggttcgtttagagaggccatttcagcctgcggaggagagtgtgacattagaatttgctaaagagaacagaaagtgtcaagaacaagctgtttccccaaaggtagatgaccagtgtggaaattccagtagcatcccctttcttagtccaaactgcccaaatcaagaaggtaatgacatttcagctgctttggccacatgaagttctggtattcttttgagctaatatggtattgagtaaagtatactttttgcagtagatcatgccctgacctccaataaaaacctctttaaaacaatgctgatttttgaattcatgattagttttagtaaattaataggtttggccattctaaaatccaaaattatgataactgtatttctaggggtatgtttcaccttgattttggcccggttctttcagtgttccgtttaccctttttactgaaagtaagtgacttaaaaggatggaagaaaaactacatggttggagtgtttttagatcagataaatatagaaaagtaaaatggaaaatgatactcaatacctagttaaactcatttcacttctcctgggagacgtattaagactggaagtcctattttatttaatcagtatcagtaaaaagaccaaaaattaccagtgtgaacaagagaaaaacaggaatagaagaaaaaagttgcaggttgaattatctatctggatattactagagttcagcatcacttttgtcttcaatttgccttccagtgattttagtttacaacctgcgttttgttatttgaaacacacacacttatatataaacacatgtaattttactattttattgtctttcctttaatcgatgaattgattaaatttagacaattaaaacatttctaaagtgagactgaaaataatatagaaaatctcattgctacttgtgattatcaaaaaaagtatgtattttctttctaaagttatctataaatatgtttttgatatgttggacatgaattaccctgtcatgaagcgtttaaattgttaaaatgctgattttcttattagtttgttaattgcctgttactagtacttgaccaatacattgtgctatatgtaaatgtgtaaataaatattgtaattttctcacaaagtctgtgaatatcacattatgatttatttatcagaaattccaaaaagtaaaaatattacctttgaggactttttttttttaaaaaaagaattattatcagagaacataagcacaagtataagattgtatccataaaagtttctgaaaaacttagggacatcctgtttttaaatgggtttgtttgagggtattatcttctggtaatatagatgagctttatatttttatattatgtaatttgagttgaaagtataacattttactactgacttctctaaacagaagcatttctatagatagttgtgcttttatatatgaaatacataaaagccaacagtttcattgtctaacacacttctttttctaaggaataaacaagtctgatgt

SEQ ID NO: 16868 - DNA, 1299 bp, Homo sapiens
gcggccggggaaaaacccggatgagctgggcagcagtgttggcagtcgcggctgcgagatttgggcacttttgggggtgccggtggcccgggccgatggcgcaaggttgggcaggcttctctgaggaggaactgaggagactaaagcagactaaagatccatttgaaccacagcgacgtctccccgcgaagaaaagtcgacaacaacttcagcgagaaaaagcccttgtagagcaaagccaaaaacttgggcttcaagatggatcaacctcattacttccagagcagctgctttcagcaccaaaacagagagttaacgttcaaaaaccacctttttcttcccctactcttccgagtcatttcactctcacctcccccgttggtgatggacaaccacagggcattgaaagtcagccaaaggaactgggacttgagaattcccatgatggtcacaacaatgttgagattctacctccaaagccagattgcaaattggagaaaaagaaagtggaattgttagcaagaaaaatctcgttgggaagtcctccaacaagaacaacggctaatggaagagaaaaataaacgtaaaaaagctcttttggctaaagctattgcagaaagatccaaaagaactcaggcagagaccatgaaactaaagcggatccagaaggagttgcaggctttagatgacatggtgtcagctgacattggaattctcaggaaccggattgatcaggccagcttagactattcatacgctcggaagcggtttgacagggctgaagcagagtacattgcagcaaagctagatatacagcgcaagactgagataaaagagcaactcactgaacacctttgtacgatcatacagcaaaatgagctccgaaaggccaagaagttggaggagttgatgcaacaactagatgtagaagccgatgaagagactttggagcttgaggtggaggtcgagagattgctacacgaacaagaagtagaatcaaggagaccagtggttcgtttagagaggccatttcagcctgcggaggagagtgtgacattagaatttgctaaagagaacagaaagtgtcaagaacaagctgtttccccaaaggtagatgaccagtgtggaaattccagtagcatcccctttcttagtccaaactgcccaaatcaagaaggtaatgacatttcagctgctttggccacatgaagttctggtattcttttgagctaatatggtattgagtaaagtatactttttgcagtagatcatgccctgacctccaataaaaacctcttt

SEQ ID NO: 16869 - DNA, 471 bp, Homo sapiens
tcctctattttcttttacatagatccatttgaaccacagcgacgtctccccgcgaagaaaagtcgacaacaacttcagcgagaaaaagcccttgtagagcaaagccaaaaacttgggcttcaagatggatcaacctcattacttccagagcagctgctttcagcaccaaaacagagagttaacgttcaaaaaccacctttttcttcccctactcttccgagtcatttcactctcacctcccccgttggtgatggacaaccacagggcattgaaagtcagccaaaggaactgggacttgagaattcccatgatggtcacaacaatgttgagattctacctccaaagccagattgcaaattggagaaaaagaaagtggaattgttagtaagtctatgtgaaaagtccatgagacttttcatttaacccgttttttcccaatgggctttaaggaaatataatttgtttatttta

SEQ ID NO: 16870 - DNA, 213 bp, Homo sapiens
aaacagataatgagtctccattttggtctcatttgcatattcagctcttacacacaaaacaatagactacaatgacactgattttcttttctacttgagaatcagcactaaccagctgtcaacgaatatttcgattaaacacttttctttgttggggaactttggggcacattctttgtataaacatattgttttctttgatttcaagggact

SEQ ID NO: 16871 - DNA, 425 bp, Homo sapiens
gtatttttaaaaatgctgaaattttggtttcctagattattttcctatagtgtgtgaaattatagatgacatacacatacacatagtatgtataattatagattatatatccaagctgaaaaataaatacagagtaggtactttcttctcaaaaagtaatcaaattatgactgggcgcagtggctcatgcctgtaataccagcactttgggaggccgaggtgggcagatcacctgaggtcgggagttcaagaccagcctagccaacatggtgaaaccccatgtctactaaaaatacaaaaaaattagccaggcatggtggcacgcacttatagtcctggctactcaggaggctgaatcacttgaactcaggaggcagagatcacaccactgtactccagcctgggcaacagaaagactctgtctc

SEQ ID NO: 16872 - DNA, 465 bp, Homo sapiens
tatattactgcttctgttgttttctcttgtcatatctatatgattatagataatatacttacatctctactgctgcttttggtaacaggatttagtatcttgactcctttccatgaaaggacaaaagactgaggaaattaccccataaattaaacttaaatgaaaggagccaattccttaagagacacaaaccgccaaaactcacttaaaaattgataagctgaatagtgctgtatctattaaagaaatatcattcctacttataaaaaaaaacttccaacaaaaaaaaaactcccaactctgtctctacaaaaaaattagccagcttggtggcacttacctgtagtcccagctattcaggaggctgagatgggaggatcacctaaacccagaaggtcaagactagtgagccatgattacactactgcattccagcccaggcaagggagcaagaccctgtctcaa

SEQ ID NO: 16873 - DNA, 543 bp, Homo sapiens
ctccgtctcaaaacaaaaaaaaaaaaaagaaagaaagaaagaaagaaaaacaaacaaaaaaaagaattatcaggtacaaaatgtcaatagtgccaagagtgagaaacccttctctaagcctgtgctattcaatacagtagctgctagctacatatggctaatgagcacaggaattgtggataggctgaattaagatgtgttgtaagtgtaaaatacatattacattttagtgattgagtaaaaaaagaatatgaaacattatgaactttgttttgttttcttttttagaccgagtttcacttttgtcatccaggctcgagtgcaatggtatgaccttggctcattgcaacctctaagcctgtgctattcaatacggtagctactagccacatatggctaatgagcacaggaattgtggctaggctgaattaagatgtgttgcacgtgtaaaatacatattacattttaatgactgagtaaaaaaaagaatatgaaatacatgaacttttttcttttcttttcttttttgagacgaagttttgc

SEQ ID NO: 16874 - DNA, 287 bp, Homo sapiens
atgtgcccccaaacctaaaatcaaaaaaaatatgtgtagaaaacaaagagcaaaatgaaggacctaaaacctaaaaaccatttatagtcaatatataaaaaggcttaataccccagttaaaatcagatatggataaattttataaaaacaaagtaaacaaagagggtactgactcttgtgatagttggataccaagaaccatccctcactggggcatgctgtggctcacacctgttataccaacactttgggaacccaaggcaggagaggattgcttgagcccagga

SEQ ID NO: 16875 - DNA, 163 bp, Homo sapiens
aaatcatccccatccccccagtccatgggaaaattgtcttccacaaaatcagtctctggtgccaaaaaaattggggactgctgattagatatatagcttatagtggtaacaggagccatttagattagaaccatttcattttaatgtgaagaaacaaagactt

SEQ ID NO: 16876 - DNA, 781 bp, Homo sapiens
tgcaccacatagctctcggtgtcaacctctgaagcacaccttttcaggcaaccgtaacagttggcactgtcagcaggatgtctagatgttggtcaccatgcaatgggtcagctttccctttctctcaggtgctaacctgctctgctacctggtggccagcatgctctttgagctgctgctgcttgctgctctgtgttccattgctgaggccgaacaaacttgtgttccagatttagccaaccgaagatggcagtttctataagtctttggcatttaggagcaggagtatcggatttgggccctccttaaaatggtctgggctaggagttttcactttgcctttctatgtagaatgaagctgggactgatgctaggtgttggccttgtcctgtaggtctggtggtgggggctggtggtgagattttatcttgtgcatgttggggccccattagtggtcattcctgaaagagcagtcatttgaaaatgagaaagagcctggcgcagtggtggtggctcacgcttgtaatcccaccactttgggaggccaaggcagacagatcacctgaggtcagaagtttgagaccagcctggccattatggtgaaaccccatctctactaaaaatacaaaaattagctgggcatagtggtggacgcctgtaatgccagctactcgggaggctgaggcagtagaatctcttgaacctgggaggcagaggttgcagtgagccgagatcgcaccactgcactccagcctgggcgacagagtaagactccgtctca

SEQ ID NO: 16877 - DNA, 458 bp, Homo sapiens
atgctggttattagtacaatcacaggtgtcttaaatattcttgaggatattttaggaagtaggaagaataatgatgatgatgaagatgataatgatgatggtagtggtggtggtggcagctaatttaacagtgtactggctgcattctaagactttgcatggattaactcatttaaccttctcaacagcttctaaggtgggtgttattatcaccgccatatttcagatgatgaaactaaggtgcagagtgtttaagttactagcaggtggcagaactggactacaactcaggcagtctctaagtttctaccacagcctctcaataaagttctttactcttggatgggtatagtggcccatgcctgtaatcccagcactttgggaggccaaggcaggagaacagcttgaggccaggaggttgagaacagcctgggtaacatagcaagatctctatctac

SEQ ID NO: 16878 - DNA, 447 bp, Homo sapiens
ccccaagaggtcaataaaaagtaaagagtgtactccagtttgacttattctttttaaaattaactgtaaaactgcctcaggcaggtccttcaggaggtattccacatcaaggcattatcatcataggagatgacagctccatgtctgcactacccctcagaccttccagggggacaagatgtggaagtggaagacagtgatactgatgatcctgaccctgtgtaggcctaggctaacataacaaacacgtttaaaaagcaaaaaataaaaacttttttttctttttctttaaaaaaaaaagtttggtcttgaactcctgcctcaagcaatcctcccatctcaagcctcccgaagtgttgggattacaggtgtgacccactacgcccagccaaaaacttttaaaaatagaaaaaagcttacagaataaggatataaagaaaatgtttt

SEQ ID NO: 16879 - DNA, 416 bp, Homo sapiens
attaggcactgatcattgagccatcctggagtttaacaccatgttagagtcacagtcacccttgcagcttctcctgaaagacacccggctgtcacatctgcattgcatttccttgtttattggtgcttcgttagtgcacagattggatgcatgtttcccacacccatcctcaactgtgaactgccagctgaagtattaggtttctatgattcagtccattcaccactcttgcctcttccagcgctgatgcactaaagcaaaatataacccagtgtatgcctttcgacatttctgtcctgtattggtgctcttgtgggaatggagaggttatttttgaagatgatagtatttttaggtgaacatctcagctaatagaaacatgaactgtgtctttaatattcaatcacagaagcaac

SEQ ID NO: 16880 - DNA, 1398 bp, Homo sapiens
gtgagaatgaaagtggatgcccgcgaatcccggaagtcagactgtttttttcagttccctggaggctttttgatactgattcgcgtacacccgttgtttggaagctctcagcgggacaatgctgacccagctgaaagcaaaatcagaggggaagcttgcaaaacagatttgcaaagttgtgttggatcattttgaaaaacagtattccaaagaactcggagatgcctggaatacagtaagggagatactaacatctccatcatgctggcaatatgctgtcctgcttaaccgattcaattatccttttgaactggaaaaggatttacatttgaagggctatcacacactctctcagggatctttacccaactatcctaaatcagtgaagtgttaccttagcagaactccgggccgaatcccttcagaaagacaccaaattggaaacctgaaaaaatattatctcctaaatgctgcttctcttctcccagtgttggctctggaattaagggatggggagaaggttctggatctctgtgctgctcctggagggaaatcaatagctctgctgcagtgtgcttgtccaggttatcttcattgtaatgaatatgatagtctgagattgaggtggctaaggcagacgttggaatctttcatcccacagcctttgataaatgtaattaaagtgtctgaattggatggcagaaaaatgggagatgcccagcctgaaatgtttgacaaggtgttagtggatgctccgtgttcaaatgatcgaagctggttgttttcttctgactctcagaaggcatcctgtaggataagtcaaaggaggaatttgcctcttctacagatagagctgttaaggtctgcaattaaggccttacgtcctggagggatacttgtatactctacatgcacgctttccaaggcagaaaatcaagatgtgatcagtgaaattttaaactcccacggtaacatcatgcctatggacattaaaggaatagcaaggacttgctcccacgacttcacatttgctcccactggccaggaatgtgggctcttagtgattccagataagggcaaagcctggggcccaatgtatgtagccaaattgaagaaatcatggagcacaggaaaatggtgacatgaatttgtaaactgtgtttatgtgttattatatttatatttctgaactcagtacatgttaatatttaaataattatgcagtaactttctctgggtctgtttggaatcctatttagttaatactttagcatcttagaatctaggcttgagaattgttcaggtgtatttttttcctagaaatatatctgtaacaatgatttaaggtggtgcagatggtgtttgttctatattataaatctgctgtctttgcttggc

SEQ ID NO: 16881 - DNA, 2424 bp, Homo sapiens
  misc_feature (5)..(5): n is a, c, g, or t
  misc_feature (18)..(18): n is a, c, g, or t
  misc_feature (26)..(26): n is a, c, g, or t
  misc_feature (935)..(935): n is a, c, g, or t
tattncggaacgaggccncgtgcgtnggactctcagaaggcatcctgtaggataagtcaaaggaggaatttgcctcttctacagatagagctgttaaggtctgcaattaaggccttacgtcctggagggatacttgtatactctacatgcacgctttccaaggcagaaaatcaagatgtgatcagtgaaattttaaactcccacggtaacatcatgcctatggacattaaaggaatagcaaggacttgctcccacgacttcacatttgctcccactggccaggaatgtgggctcttagtgattccagataagggcaaagcctggggcccaatgtatgtagccaaattgaagaaatcatggagcacaggaaaatggtgacatgaatttgtaaactgtgtttatgtgttattatatttatatttctgaactcagtacatgttaatatttaaataattatgcagtaactttctctgggtctgtttggaatcctatttagttaatactttagcatcttagaatctaggcttgagaattgttcaggtgtatttttttcctagaaatatatctgtaacaatgatttaaggtggtgcagatggtgtttgttctatattataaatctgctgtctttgcttggcattttatagttaaattaattagaatatgtggttttatgcataacgtgtttagttctgtattctttctatgatagtgctttgaaccttcaaaaattcacattttccagcgctccgaccattttcccgcttatcaaatgtacaaatttgttcaaggtttttttttccccccaacttttgtaactgattgtctcagaactgattggtattctgagactaactttttaagcagcactatttctagttctggcaaaatagtttttttatttgcaatgttgttttctgttaaagactatattatgnttactgcaaaggtcagtgactctactgacaccagctttatttcccccactttttttgcattcacaaatacaaattgaaagggtaaattatattgaaaggcctttagaacagcagattcacatgcacatgtttgactttcgacattcagcttatagaattatggagtctatccagcaggctataaagcaagtacttgagacaaaaccggaatgattaataactgcaatcactgaactatatttggagagttttgttacataattgcagtcataatgagcactacagaatctgattatcttacattcacaatctggaggggctttttatttcactttgttataaaatgttctctgagaatatgatgccacatattaatgcacaagagggagatgcctaatgagagtggactgtgtgattaccagaacccagtgccatttactaagtggctctccatgtttacataaatcctgggaatactgtatacatttcttcttatgtacttagggttttagcttcagtcagcatcacactttttctccagaaattacttcacttagagtacaaacatatttttccaactattaagaaaaattatgcagcacatctcaaaaaatagcatctctttggaaaatagcctttaaaaaaaaacaactttatctgattatagaaatacaaaattctgctaaagctgaatacttttgaattgttcattatgttctgtgcctttaaactagagactatttgcttattaatattttttgttttgcaagcatatgtaacccggtttatatcatcaggaagtcttaggaagaatttttttttctgtaccttcagtctgttaatcatttgttttcctttatgtccaattgatatgtttaaagtaaagctaaagtccaggcacggtggcttatgcctgtaatcccagcactttgtcaggccgaggcagggggcatctcctgaggtcagaagttcgagactagcctgcccaacatggtaaaaccccgactctactaaaaatgcaaaaaaattagacaggcatggtggctggcaccagcaatcccagctacttaggaggctgaggcaggagaatcacttgaacccaggaggcagaggttgcagttagccaagatctcgccattgcactccagcctgggcgacaagagtgaaaccccgtagcaaaaaaataataataatagtaattaaataaaaataaagtaacgctagaactgttggaccaaatcaagtatatgggtaaatacagaagaataatgatggtggaaaagatgttttcttttttaagttatcattattagtttgttttttttatcttcagacactataggttttaaaaataggtttcttttatgtaggttaatcacagagtaaatctgcacactgtactttgttaaatgtcggtattttcccagtataatgcgatgaagcttaatctgaatacttggtatgctattgaatttactttcctatgatt

SEQ ID NO: 16882 - DNA, 3187 bp, Homo sapiens
  misc_feature (1698)..(1698): n is a, c, g, or t
gtgagaatgaaagtggatgcccgcgaatcccggaagtcagactgtttttttcagttccctggaggctttttgatactgattcgcgtacacccgttgtttggaagctctcagcgggacaatgctgacccagctgaaagcaaaatcagaggggaagcttgcaaaacagatttgcaaagttgtgttggatcattttgaaaaacagtattccaaagaactcggagatgcctggaatacagtaagggagatactaacatctccatcatgctggcaatatgctgtcctgcttaaccgattcaattatccttttgaactggaaaaggatttacatttgaagggctatcacacactctctcagggatctttacccaactatcctaaatcagtgaagtgttaccttagcagaactccgggccgaatcccttcagaaagacaccaaattggaaacctgaaaaaatattatctcctaaatgctgcttctcttctcccagtgttggctctggaattaagggatggggagaaggttctggatctctgtgctgctcctggagggaaatcaatagctctgctgcagtgtgcttgtccaggttatcttcattgtaatgaatatgatagtctgagattgaggtggctaaggcagacgttggaatctttcatcccacagcctttgataaatgtaattaaagtgtctgaattggatggcagaaaaatgggagatgcccagcctgaaatgtttgacaaggtgttagtggatgctccgtgttcaaatgatcgaagctggttgttttcttctgactctcagaaggcatcctgtaggataagtcaaaggaggaatttgcctcttctacagatagagctgttaaggtctgcaattaaggccttacgtcctggagggatacttgtatactctacatgcacgctttccaaggcagaaaatcaagatgtgatcagtgaaattttaaactcccacggtaacatcatgcctatggacattaaaggaatagcaaggacttgctcccacgacttcacatttgctcccactggccaggaatgtgggctcttagtgattccagataagggcaaagcctggggcccaatgtatgtagccaaattgaagaaatcatggagcacaggaaaatggtgacatgaatttgtaaactgtgtttatgtgttattatatttatatttctgaactcagtacatgttaatatttaaataattatgcagtaactttctctgggtctgtttggaatcctatttagttaatactttagcatcttagaatctaggcttgagaattgttcaggtgtatttttttcctagaaatatatctgtaacaatgatttaaggtggtgcagatggtgtttgttctatattataaatctgctgtctttgcttggcattttatagttaaattaattagaatatgtggttttatgcataacgtgtttagttctgtattctttctatgatagtgctttgaaccttcaaaaattcacattttccagcgctccgaccattttcccgcttatcaaatgtacaaatttgttcaaggtttttttttccccccaacttttgtaactgattgtctcagaactgattggtattctgagactaactttttaagcagcactatttctagttctggcaaaatagtttttttatttgcaatgttgttttctgttaaagactatattatgnttactgcaaaggtcagtgactctactgacaccagctttatttcccccactttttttgcattcacaaatacaaattgaaagggtaaattatattgaaaggcctttagaacagcagattcacatgcacatgtttgactttcgacattcagcttatagaattatggagtctatccagcaggctataaagcaagtacttgagacaaaaccggaatgattaataactgcaatcactgaactatatttggagagttttgttacataattgcagtcataatgagcactacagaatctgattatcttacattcacaatctggaggggctttttatttcactttgttataaaatgttctctgagaatatgatgccacatattaatgcacaagagggagatgcctaatgagagtggactgtgtgattaccagaacccagtgccatttactaagtggctctccatgtttacataaatcctgggaatactgtatacatttcttcttatgtacttagggttttagcttcagtcagcatcacactttttctccagaaattacttcacttagagtacaaacatatttttccaactattaagaaaaattatgcagcacatctcaaaaaatagcatctctttggaaaatagcctttaaaaaaaaacaactttatctgattatagaaatacaaaattctgctaaagctgaatacttttgaattgttcattatgttctgtgcctttaaactagagactatttgcttattaatattttttgttttgcaagcatatgtaacccggtttatatcatcaggaagtcttaggaagaatttttttttctgtaccttcagtctgttaatcatttgttttcctttatgtccaattgatatgtttaaagtaaagctaaagtccaggcacggtggcttatgcctgtaatcccagcactttgtcaggccgaggcagggggcatctcctgaggtcagaagttcgagactagcctgcccaacatggtaaaaccccgactctactaaaaatgcaaaaaaattagacaggcatggtggctggcaccagcaatcccagctacttaggaggctgaggcaggagaatcacttgaacccaggaggcagaggttgcagttagccaagatctcgccattgcactccagcctgggcgacaagagtgaaaccccgtagcaaaaaaataataataatagtaattaaataaaaataaagtaacgctagaactgttggaccaaatcaagtatatgggtaaatacagaagaataatgatggtggaaaagatgttttcttttttaagttatcattattagtttgttttttttatcttcagacactataggttttaaaaataggtttcttttatgtaggttaatcacagagtaaatctgcacactgtactttgttaaatgtcggtattttcccagtataatgcgatgaagcttaatctgaatacttggtatgctattgaatttactttcctatgatt

SEQ ID NO: 16883 - DNA, 3133 bp, Homo sapiens
  misc_feature (1644)..(1644): n is a, c, g, or t
gtgagaatgaaagtggatgcccgcgaatcccggaagtcagactgtttttttcagttccctggaggctttttgatactgattcgcgtacacccgttgtttggaagctctcagcgggacaatgctgacccagctgaaagcaaaatcagaggggaagcttgcaaaacagatttgcaaagttgtgttggatcattttgaaaaacagtattccaaagaactcggagatgcctggaatacagtaagggagatactaacatctccatcatgctggcaatatgctgtcctgcttaaccgattcaattatccttttgaactggaaaaggatttacatttgaagggctatcacacactctctcagggatctttacccaactatcctaaatcagtgaagtgttaccttagcagaactccgggccgaatcccttcagaaagacaccaaattggaaacctgaaaaaatattatctcctaaatgctgcttctcttctcccagtgttggctctggaattaagggatggggagaaggttctggatctctgtgctgctcctggagggaaatcaatagctctgctgcagtgtgcttgtccaggttatcttcattgtaatgaatatgatagtctgagattgaggtggctaaggcagacgttggaatctttcatcccacagcctttgataaatgtaattaaagtgtctgaattggatggcagaaaaatgggagatgcccagcctgaaatgtttgacaaggtgttagtggatgctccgtgttcaaatgatcgaagctggttgttttcttctgactctcagaaggcatcctgtaggataagtcaaaggaggaatttgcctcttctacagatagagctgttaaggtctgcaattaaggccttacgtcctggagggatacttgtatactctacatgcacgctttccaaggcagtggacattaaaggaatagcaaggacttgctcccacgacttcacatttgctcccactggccaggaatgtgggctcttagtgattccagataagggcaaagcctggggcccaatgtatgtagccaaattgaagaaatcatggagcacaggaaaatggtgacatgaatttgtaaactgtgtttatgtgttattatatttatatttctgaactcagtacatgttaatatttaaataattatgcagtaactttctctgggtctgtttggaatcctatttagttaatactttagcatcttagaatctaggcttgagaattgttcaggtgtatttttttcctagaaatatatctgtaacaatgatttaaggtggtgcagatggtgtttgttctatattataaatctgctgtctttgcttggcattttatagttaaattaattagaatatgtggttttatgcataacgtgtttagttctgtattctttctatgatagtgctttgaaccttcaaaaattcacattttccagcgctccgaccattttcccgcttatcaaatgtacaaatttgttcaaggtttttttttccccccaacttttgtaactgattgtctcagaactgattggtattctgagactaactttttaagcagcactatttctagttctggcaaaatagtttttttatttgcaatgttgttttctgttaaagactatattatgnttactgcaaaggtcagtgactctactgacaccagctttatttcccccactttttttgcattcacaaatacaaattgaaagggtaaattatattgaaaggcctttagaacagcagattcacatgcacatgtttgactttcgacattcagcttatagaattatggagtctatccagcaggctataaagcaagtacttgagacaaaaccggaatgattaataactgcaatcactgaactatatttggagagttttgttacataattgcagtcataatgagcactacagaatctgattatcttacattcacaatctggaggggctttttatttcactttgttataaaatgttctctgagaatatgatgccacatattaatgcacaagagggagatgcctaatgagagtggactgtgtgattaccagaacccagtgccatttactaagtggctctccatgtttacataaatcctgggaatactgtatacatttcttcttatgtacttagggttttagcttcagtcagcatcacactttttctccagaaattacttcacttagagtacaaacatatttttccaactattaagaaaaattatgcagcacatctcaaaaaatagcatctctttggaaaatagcctttaaaaaaaaacaactttatctgattatagaaatacaaaattctgctaaagctgaatacttttgaattgttcattatgttctgtgcctttaaactagagactatttgcttattaatattttttgttttgcaagcatatgtaacccggtttatatcatcaggaagtcttaggaagaatttttttttctgtaccttcagtctgttaatcatttgttttcctttatgtccaattgatatgtttaaagtaaagctaaagtccaggcacggtggcttatgcctgtaatcccagcactttgtcaggccgaggcagggggcatctcctgaggtcagaagttcgagactagcctgcccaacatggtaaaaccccgactctactaaaaatgcaaaaaaattagacaggcatggtggctggcaccagcaatcccagctacttaggaggctgaggcaggagaatcacttgaacccaggaggcagaggttgcagttagccaagatctcgccattgcactccagcctgggcgacaagagtgaaaccccgtagcaaaaaaataataataatagtaattaaataaaaataaagtaacgctagaactgttggaccaaatcaagtatatgggtaaatacagaagaataatgatggtggaaaagatgttttcttttttaagttatcattattagtttgttttttttatcttcagacactataggttttaaaaataggtttcttttatgtaggttaatcacagagtaaatctgcacactgtactttgttaaatgtcggtattttcccagtataatgcgatgaagcttaatctgaatacttggtatgctattgaatttactttcctatgatt

SEQ ID NO: 16884 - DNA, 415 bp, Homo sapiens
caatgtcaactctgaatgcaaagagaaataacagagacatagtccctgtcctaaatagattttaatctactgtgaccattctgaaaatgtggtccaagattaatagcaacaccatctgcctgttagaaatgtacattttccttctccacccagaaacctggagttgaagcccaataatctgtgtttgaacaagttctctggatgactctgatgcacaataatgttttaaaaaacactggggtagttgtttccccagaagaatgaagatctctgttatacttccttattccttatttgttgttgttcttgttttgagacagtttcactctgtcacgcagagcttgcagtgagctgagatcgcaccactgcactctggtctgggcgacagagtgagactccgtctcaaaaaaaaaaa

SEQ ID NO: 16885 - DNA, 371 bp, Homo sapiens
caatgtcaactctgaatgcaaagagaaataacagagacatagtccctgtcctaaatagattttaatctactgtgaccattctgaaaatgtggtccaagattaatagcaacaccatctgcctcagcctcccaaagtgctgggattacaggcatgagccaccacactcggccattattttgtgtttgaataaaagtctcagtgctttttaaatgtgtacataagcctgaatttcggtttaggggacagaagtaaccagactgtttggggcacagtcagagttgttatttgcatttttcgcccttttgaaatagcttcaccactttcattagatctgtagttcctgaatcacagaaaggtttgtaatctttttt

SEQ ID NO: 16886 - DNA, 5923 bp, Homo sapiens
ccctttcttctcttccagggctccgctttatttgctctcagaagtcggtttcctttccttttcttcagtgaatcggagctcagagcgttgcttcggtttccctccagacagttaggaatctgaaataaacaggaaagcactatgtcttcaatgtggtctgaatatacaattggtggggtgaagatttactttccttataaagcttacccgtcacagcttgctatgatgaattctattctcagaggattaaacagcaagcaacattgtttgttggagagtcccacaggaagtggaaaaagcttagccttactttgttctgctttagcatggcaacaatctcttagtgggaaaccagcagatgagggcgtaagtgaaaaagctgaagtacaattgtcatgttgttgtgcatgccattcaaaggattttacaaacaatgacatgaaccaaggaacttcacgtcatttcaactatccaagcacaccaccttctgaaagaaatggcacttcatcaacttgtcaagactcccctgaaaaaaccactctggctgcaaagttatctgctaagaaacaggcatccatatacagagatgaaaatgatgattttcaagtagagaagaaaagaattcgacccttagaaactacacagcagattagaaaacgtcattgctttggaacagaagtacacaatttggatgcaaaagttgattcaggaaagactgtaaaactcaactctccactggaaaagataaactccttttcgccacagaaaccccctggccactgttctaggtgctgttgttctactaaacaaggaaacagtcaagagtcatcgaataccattaagaaggatcatacagggaaatccaagatacccaaaatatattttgggacacgcacacacaagcagattgctcagattactagagagctccggaggacggcatattcaggggttccaatgactattctttccagcagggatcatacttgtgtccatcctgaggtagtcggtaacttcaacagaaatgagaagtgcatggaattgctagatgggaaaaacggaaaatcctgctatttttatcatggagttcataaaattagtgatcagcacacattacagactttccaagggatgtgcaaagcctgggatatagaagaacttgtcagcctggggaagaaactaaaggcctgtccatattacacagcccgagaactaatacaagatgctgacatcatattttgtccctacaactatcttctagatgcacaaataagggaaagtatggatttaaatctgaaagaacaggttgtcattttagatgaagctcataacatcgaggactgtgctcgggaatcagcaagttacagtgtaacagaagttcagcttcggtttgctcgggatgaactagatagtatggtcaacaataatataaggaagaaagatcatgaacccctacgagctgtgtgctgtagcctcattaattggttagaagcaaacgctgaatatcttgtagaaagagattatgaatcagcttgtaaaatatggagtggaaatgaaatgctcttaactttacacaaaatgggtatcaccactgctacttttcccattttgcagggacatttttctgctgttcttcaaaaagaggaaaaaatctcaccaatttatggtaaagaggaggcaagagaagtacctgttattagtgcatcaactcaaataatgcttaaaggactttttatggtacttgactatctttttaggcaaaatagcagatttgcagatgattataaaattgcgattcaacagacttactcctggacaaatcagattgatatttcagacaaaaatgggttgttggttctaccaaaaaataagaaacgttcacgacagaaaactgcagttcatgtgctaaacttttggtgcttaaatccagctgtggccttttcagatattaatggcaaagttcagaccattgttttgacatctggtacattatcaccaatgaaatccttttcgtcagaacttggtgttacatttactatccagctggaggctaatcatatcattaaaaattcacaggtttgggttggtaccattgggtcaggccccaagggtcggaatctctgtgctaccttccagaatactgaaacatttgagttccaagatgaagtgggagcacttttgttatctgtgtgccagactgtgagccaaggaattttgtgtttcttgccatcttacaagttattagaaaaattaaaagaacgttggctctctactggtttatggcataatctggagttggtgaagacagtcattgtagaaccacagggaggagaaaaaacaaattttgatgaattactgcaggtgtactatgacgcaatcaaatacaaaggagagaaagatggagctctcctggtagcagtttgtcgtggtaaagtgagtgagggtctggatttctcagatgacaatgcccgtgctgtcataacaataggaattccttttccaaatgtgaaagatctacaggttgaactaaaacgacaatacaatgaccaccattcaaaattgagaggtcttctacctggccgtcagtggtatgaaattcaagcatacagggccttaaaccaggcccttggtagatgtattagacacagaaatgattggggagctcttattctagtggatgatcgctttaggaataacccaagtcgctatatatctggactttctaaatgggtacggcagcagattcagcaccattcaacctttgaaagtgcactggagtccttggctgaattttccaaaaagcatcaaaaagttcttaatgtatccataaaggacagaaccaatatacaggacaatgagtctacacttgaagtgacctctttaaagtacagtaccccaccttatttactggaagcagcaagtcatctatcaccagaaaattttgtggaagatgaagcaaagatatgtgtccaggaactacagtgtcctaaaattattaccaaaaattcacctctaccaagtagcattatctccagaaaggagaaaaatgatccagtattcctggaagaagcagggaaagcagaaaaaattgtgatttccagatccacaagcccaactttcaacaaacaaacaaagagagttagctggtcaagctttaattctttgggacagtattttactggtaaaataccgaaggcaacacctgagctcgggtcatcagagaatagtgcctctagtcctccccgtttcaaaacagagaagatggaaagtaaaactgttttgcccttcactgataaatgtgaatcctcaaatctgacagtaaacacatcgtttggatcatgccctcaatcagaaaccattatttcatcattaaagattgatgccacccttactagaaaaaatcattctgaacatccgctctgttctgaagaagccctggatccagacattgaattgtctctagtaagtgaagaagataaacagtccacttcaaatagagattttgaaacagaagcagaagatgaatctatctattttacacctgaactttacgatcctgaagatacagatgaagaaaaaaatgacctagctgaaactgatagaggaaatagattggctaacaattcagattgcattttagctaaagacctttttgaaattagaactataaaagaagtagattcagccagagaagtgaaagctgaggattgcatagatacaaagttgaatggaattctgcatattgaagaaagtaaaattgatgacattgatggtaatgtaaaaacaacttggataaatgaactggaactgggaaaaactcatgaaatagaaataaagaactttaaaccatctccttccaaaaataaaggcatgtttcctggttttaagtaataatacttaactctcaagctaagtaaaaatatgtcatcatgcttatgttaaactctgttgtaagtaataatttgtaaattgaataagtggcatactttttaaaaaactattttatgttcagaaatgtaaatgttattattcttgagtttttgggtttctttttttgagacagagtcttggtctgttgcccaggctggaatgcagtggtgtgctctgggctcactgcaaccttcacctccaggttcaagtgattctcctgcctcagccttctgagtagctgggactacaggtgtgcaccaccatgcccagctagtttttgtatttttagtagagatggggtttcaccatgttggccaggctggtctcgaactcctggcctcgtgatctgcccttctctgcctccctaagttgctgggattacaggtgtgagccacagtgcctggcccattcttgagttttgataaagtaattcatacaaagtattgtcctcaaataagtcttccttagctaaatgcaatttaaaattattcaaagatcctagggcacttctagtttcacgtaaatattcatattaggtggttctcttcatccatttgttttcacactgatacataaaaattaacagcagtctaatctagtgacacctcagtcatatttcgctatagattttacctcaaatcagtccaagactttttcagagatcaccatttgtcttgaaaggtttatttcgttattaaactgcctacttataagtaattaagagaaattaagaaagtagtatgcatttttaattgaaattgttttacattctttgtataataaacctaaaaccaaacatgtcataaacaaattgacgtaaagatataaaatgccaaatgaagtattccaaattttctattctaattatttagcttcaccatcattgtggaaaaaaatactagatcctgcttagtattatatatttttcctagtggatcagtgagtaataagtaccaaacactagactagaaggtaatttctacattgtttagaaagggtgaaacaatttatcccctctggtattgttctagcataagctttagttatacaatgattaagatagaaaacttcatatataaatttgataagcaaacccacatttatagctgcagctaaaatatgtttccttagggcacagtaatcctttctgtgaattttgaccttgtttgtgtttttgtgaatgaagctatatgtctaatcaaaaatgattataaaagaggctcatctctgacatcattccaaaaatacattcattgatctctttttaagaaaacatctgttattcactgggcattgggactttttgtgagtaatttgaattgaaattttatgagctatccaagaattctgtatggtctattattttcaagtcaaaatttccagtaaggatttactttacatttcatttggataaatgaatcattatataggtatgtctttgcttccattttgagacatttagatttttacagcctgtttctatagcatttgatgttacaactctaagcgtagttcaaagacatttaaattgacaagttaccagttaaagaatttagaatatattagatcccatctagtattatatattttttctagttgatcattgagcagtaaataccaaatactcgattagaaggtaatttttacattgttttgaaagggtgaaacaatttatctcctctggtattattcttaaaccacagatagggatagtagggtagtgaaacgaataaatacctggtagaagacaagagacttgggctctacacctggctctgccactgatttgctaagtcatattggcaatcaccacacccttcagggaattagtttcatctgtaaaatgcagcggttagtactataaaatcatacaaatttctttgtgctttgagaatctataaaggaatgtctgttgatattctgagtcgattttcatttgcttttgttccagaacggttaaaataaagcatattatttcatttaaaaagtaaag

SEQ ID NO: 16887 - DNA, 5675 bp, Homo sapiens
ccctttcttctcttccagggctccgctttatttgctctcagaagtcggtttcctttccttttcttcagtgaatcggagctcagagcgttgcttcggtttccctccagacagttaggaatctgaaataaacaggaaagcactatgtcttcaatgtggtctgaatatacaattggtggggtgaagatttactttccttataaagcttacccgtcacagcttgctatgatgaattctattctcagaggattaaacagcaagcaacattgtttgttggagagtcccacaggaagtggaaaaagcttagccttactttgttctgctttagcatggcaacaatctcttagtgggaaaccagcagatgagggcgtaagtgaaaaagctgaagtacaattgtcatgttgttgtgcatgccattcaaaggattttacaaacaatgacatgaaccaaggaacttcacgtcatttcaactatccaagcacaccaccttctgaaagaaatggcacttcatcaacttgtcaagccccctggccactgttctaggtgctgttgttctactaaacaaggaaacagtcaagagtcatcgaataccattaagaaggatcatacagggaaatccaagatacccaaaatatattttgggacacgcacacacaagcagattgctcagattactagagagctccggaggacggcatattcaggggttccaatgactattctttccagcagggatcatacttgtgtccatcctgaggtagtcggtaacttcaacagaaatgagaagtgcatggaattgctagatgggaaaaacggaaaatcctgctatttttatcatggagttcataaaattagtgatcagcacacattacagactttccaagggatgtgcaaagcctgggatatagaagaacttgtcagcctggggaagaaactaaaggcctgtccatattacacagcccgagaactaatacaagatgctgacatcatattttgtccctacaactatcttctagatgcacaaataagggaaagtatggatttaaatctgaaagaacaggttgtcattttagatgaagctcataacatcgaggactgtgctcgggaatcagcaagttacagtgtaacagaagttcagcttcggtttgctcgggatgaactagatagtatggtcaacaataatataaggaagaaagatcatgaacccctacgagctgtgtgctgtagcctcattaattggttagaagcaaacgctgaatatcttgtagaaagagattatgaatcagcttgtaaaatatggagtggaaatgaaatgctcttaactttacacaaaatgggtatcaccactgctacttttcccattttgcagggacatttttctgctgttcttcaaaaagaggaaaaaatctcaccaatttatggtaaagaggaggcaagagaagtacctgttattagtgcatcaactcaaataatgcttaaaggactttttatggtacttgactatctttttaggcaaaatagcagatttgcagatgattataaaattgcgattcaacagacttactcctggacaaatcagattgatatttcagacaaaaatgggttgttggttctaccaaaaaataagaaacgttcacgacagaaaactgcagttcatgtgctaaacttttggtgcttaaatccagctgtggccttttcagatattaatggcaaagttcagaccattgttttgacatctggtacattatcaccaatgaaatccttttcgtcagaacttggtgttacatttactatccagctggaggctaatcatatcattaaaaattcacaggtttgggttggtaccattgggtcaggccccaagggtcggaatctctgtgctaccttccagaatactgaaacatttgagttccaagatgaagtgggagcacttttgttatctgtgtgccagactgtgagccaaggaattttgtgtttcttgccatcttacaagttattagaaaaattaaaagaacgttggctctctactggtttatggcataatctggagttggtgaagacagtcattgtagaaccacagggaggagaaaaaacaaattttgatgaattactgcaggtgtactatgacgcaatcaaatacaaaggagagaaagatggagctctcctggtagcagtttgtcgtggtaaagtgagtgagggtctggatttctcagatgacaatgcccgtgctgtcataacaataggaattccttttccaaatgtgaaagatctacaggttgaactaaaacgacaatacaatgaccaccattcaaaattgagaggtcttctacctggccgtcagtggtatgaaattcaagcatacagggccttaaaccaggcccttggtagatgtattagacacagaaatgattggggagctcttattctagtggatgatcgctttaggaataacccaagtcgctatatatctggactttctaaatgggtacggcagcagattcagcaccattcaacctttgaaagtgcactggagtccttggctgaattttccaaaaagcatcaaaaagttcttaatgtatccataaaggacagaaccaatatacaggacaatgagtctacacttgaagtgacctctttaaagtacagtaccccaccttatttactggaagcagcaagtcatctatcaccagaaaattttgtggaagatgaagcaaagatatgtgtccaggaactacagtgtcctaaaattattaccaaaaattcacctctaccaagtagcattatctccagaaaggagaaaaatgatccagtattcctggaagaagcagggaaagcagaaaaaattgtgatttccagatccacaagcccaactttcaacaaacaaacaaagagagttagctggtcaagctttaattctttgggacagtattttactggtaaaataccgaaggcaacacctgagctcgggtcatcagagaatagtgcctctagtcctccccgtttcaaaacagagaagatggaaagtaaaactgttttgcccttcactgataaatgtgaatcctcaaatctgacagtaaacacatcgtttggatcatgccctcaatcagaaaccattatttcatcattaaagattgatgccacccttactagaaaaaatcattctgaacatccgctctgttctgaagaagccctggatccagacattgaattgtctctagtaagtgaagaagataaacagtccacttcaaatagagattttgaaacagaagcagaagatgaatctatctattttacacctgaactttacgatcctgaagatacagatgaagaaaaaaatgacctagctgaaactgatagaggaaatagattggctaacaattcagattgcattttagctaaagacctttttgaaattagaactataaaagaagtagattcagccagagaagtgaaagctgaggattgcatagatacaaagttgaatggaattctgcatattgaagaaagtaaaattgatgacattgatggtaatgtaaaaacaacttggataaatgaactggaactgggaaaaactcatgaaatagaaataaagaactttaaaccatctccttccaaaaataaaggcatgtttcctggttttaagtaataatacttaactctcaagctaagtaaaaatatgtcatcatgcttatgttaaactctgttgtaagtaataatttgtaaattgaataagtggcatactttttaaaaaactattttatgttcagaaatgtaaatgttattattcttgagtttttgggtttctttttttgagacagagtcttggtctgttgcccaggctggaatgcagtggtgtgctctgggctcactgcaaccttcacctccaggttcaagtgattctcctgcctcagccttctgagtagctgggactacaggtgtgcaccaccatgcccagctagtttttgtatttttagtagagatggggtttcaccatgttggccaggctggtctcgaactcctggcctcgtgatctgcccttctctgcctccctaagttgctgggattacaggtgtgagccacagtgcctggcccattcttgagttttgataaagtaattcatacaaagtattgtcctcaaataagtcttccttagctaaatgcaatttaaaattattcaaagatcctagggcacttctagtttcacgtaaatattcatattaggtggttctcttcatccatttgttttcacactgatacataaaaattaacagcagtctaatctagtgacacctcagtcatatttcgctatagattttacctcaaatcagtccaagactttttcagagatcaccatttgtcttgaaaggtttatttcgttattaaactgcctacttataagtaattaagagaaattaagaaagtagtatgcatttttaattgaaattgttttacattctttgtataataaacctaaaaccaaacatgtcataaacaaattgacgtaaagatataaaatgccaaatgaagtattccaaattttctattctaattatttagcttcaccatcattgtggaaaaaaatactagatcctgcttagtattatatatttttcctagtggatcagtgagtaataagtaccaaacactagactagaaggtaatttctacattgtttagaaagggtgaaacaatttatcccctctggtattgttctagcataagctttagttatacaatgattaagatagaaaacttcatatataaatttgataagcaaacccacatttatagctgcagctaaaatatgtttccttagggcacagtaatcctttctgtgaattttgaccttgtttgtgtttttgtgaatgaagctatatgtctaatcaaaaatgattataaaagaggctcatctctgacatcattccaaaaatacattcattgatctctttttaagaaaacatctgttattcactgggcattgggactttttgtgagtaatttgaattgaaattttatgagctatccaagaattctgtatggtctattattttcaagtcaaaatttccagtaaggatttactttacatttcatttggataaatgaatcattatataggtatgtctttgcttccattttgagacatttagatttttacagcctgtttctatagcatttgatgttacaactctaagcgtagttcaaagacatttaaattgacaagttaccagttaaagaatttagaatatattagatcccatctagtattatatattttttctagttgatcattgagcagtaaataccaaatactcgattagaaggtaatttttacattgttttgaaagggtgaaacaatttatctcctctggtattattcttaaaccacagatagggatagtagggtagtgaaacgaataaatacctggtagaagacaagagacttgggctctacacctggctctgccactgatttgctaagtcatattggcaatcaccacacccttcagggaattagtttcatctgtaaaatgcagcggttagtactataaaatcatacaaatttctttgtgctttgagaatctataaaggaatgtctgttgatattctgagtcgattttcatttgcttttgttccagaacggttaaaataaagcatattatttcatttaaaaagtaaag

SEQ ID NO: 16888 - DNA, 3231 bp, Homo sapiens
ccctttcttctcttccagggctccgctttatttgctctcagaagtcggtttcctttccttttcttcagtgaatcggagctcagagcgttgcttcggtttccctccagacagttaggaatctgaaataaacaggaaagcactatgtcttcaatgtggtctgaatatacaattggtggggtgaagatttactttccttataaagcttacccgtcacagcttgctatgatgaattctattctcagaggattaaacagcaagcaacattgtttgttggagagtcccacaggaagtggaaaaagcttagccttactttgttctgctttagcatggcaacaatctcttagtgggaaaccagcagatgagggcgtaagtgaaaaagctgaagtacaattgtcatgttgttgtgcatgccattcaaaggattttacaaacaatgacatgaaccaaggaacttcacgtcatttcaactatccaagcacaccaccttctgaaagaaatggcacttcatcaacttgtcaagccccctggccactgttctaggtgctgttgttctactaaacaaggaaacagtcaagagtcatcgaataccattaagaaggatcatacagggaaatccaagatacccaaaatatattttgggacacgcacacacaagcagattgctcagattactagagagctccggaggacggcatattcaggggttccaatgactattctttccagcagggatcatacttgtgtccatcctgaggtagtcggtaacttcaacagaaatgagaagtgcatggaattgctagatgggaaaaacggaaaatcctgctatttttatcatggagttcataaaattagtgatcagcacacattacagactttccaagggatgtgcaaagcctgggatatagaagaacttgtcagcctggggaagaaactaaaggcctgtccatattacacagcccgagaactaatacaagatgctgacatcatattttgtccctacaactatcttctagatgcacaaataagggaaagtatggatttaaatctgaaagaacaggttgtcattttagatgaagctcataacatcgaggactgtgctcgggaatcagcaagttacagtgtaacagaagttcagcttcggtttgctcgggatgaactagatagtatggtcaacaataatataaggaagaaagatcatgaacccctacgagctgtgtgctgtagcctcattaattggttagaagcaaacgctgaatatcttgtagaaagagattatgaatcagcttgtaaaatatggagtggaaatgaaatgctcttaactttacacaaaatgggtatcaccactgctacttttcccattttgcagggacatttttctgctgttcttcaaaaagaggaaaaaatctcaccaatttatggtaaagaggaggcaagagaagtacctgttattagtgcatcaactcaaataatgcttaaaggactttttatggtacttgactatctttttaggcaaaatagcagatttgcagatgattataaaattgcgattcaacagacttactcctggacaaatcagattgatatttcagacaaaaatgggttgttggttctaccaaaaaataagaaacgttcacgacagaaaactgcagttcatgtgctaaacttttggtgcttaaatccagctgtggccttttcagatattaatggcaaagttcagaccattgttttgacatctggtacattatcaccaatgaaatccttttcgtcagaacttggtgttacatttactatccagctggaggctaatcatatcattaaaaattcacaggtttgggttggtaccattgggtcaggccccaagggtcggaatctctgtgctaccttccagaatactgaaacatttgagttccaagatgaagtgggagcacttttgttatctgtgtgccagactgtgagccaaggaattttgtgtttcttgccatcttacaagttattagaaaaattaaaagaacgttggctctctactggtttatggcataatctggagttggtgaagacagtcattgtagaaccacagggaggagaaaaaacaaattttgatgaattactgcaggtgtactatgacgcaatcaaatacaaaggagagaaagatggagctctcctggtagcagtttgtcgtggtaaagtgagtgagggtctggatttctcagatgacaatgcccgtgctgtcataacaataggaattccttttccaaatgtgaaagatctacaggttgaactaaaacgacaatacaatgaccaccattcaaaattgagaggtcttctacctggccgtcagtggtatgaaattcaagcatacagggccttaaaccaggcccttggtaggtaagtggagtgaaatttaatataatattatctgtgacagggctatatatataaatctagtcttgctactttactctttataataaacttggtaaaattttatttaactggaaccataggaactggtatgtattcaatgatagctgtcacaagtagaatttgaaaagagtaagaagaataagttattcccaaaacaaaactcacaatttgctaaagtttaaagaaattttgtgattgatctaacaatgaatagcacacaaagatgctcagtaaatattaaagaaagcttatcaaatcaaaaaagttttgtcttgtgaacatcaaagctcagataacaattttatagataaacagacctctctcctcacctcccccaaaatgtcagggaagaaaattgatataccagccagtgtgaggagatattctatttgaaagtgtactttcagtacggaatctgtgtatctgttaaaatatcatcaaatagaaacaaaatctattttactgcccagtgagcttctgtagttgcacaatttttcattctgcttctatgtaaagaagacatctgacagaaaaaaaaatcattttcattttaatgttatttgtaagctttagataacaatgtgattacaatctatattttcttgtgccttttatgtatagtgataatgttgaaggataacattgaaactgaaggatatttaataattaaagaaaaaataaaataattaattattattattattattattgttttagacagcctcactgtgttgcccaggctggagtgcatgagccaaaatcatgccactgcattccagcctgggcaacagagccagaccatgtctc

SEQ ID NO: 16889 - DNA, 2630 bp, Homo sapiens
ccctttcttctcttccagggctccgctttatttgctctcagaagtcggtttcctttccttttcttcagtgaatcggagctcagagcgttgcttcggtttccctccagacagttaggaatctgaaataaacaggaaagcactatgtcttcaatgtggtctgaatatacaattggtggggtgaagatttactttccttataaagcttacccgtcacagcttgctatgatgaattctattctcagaggattaaacagcaagcaacattgtttgttggagagtcccacaggaagtggaaaaagcttagccttactttgttctgctttagcatggcaacaatctcttagtgggaaaccagcagatgagggcgtaagtgaaaaagctgaagtacaattgtcatgttgttgtgcatgccattcaaaggattttacaaacaatgacatgaaccaaggaacttcacgtcatttcaactatccaagcacaccaccttctgaaagaaatggcacttcatcaacttgtcaagccccctggccactgttctaggtgctgttgttctactaaacaaggaaacagtcaagagtcatcgaataccattaagaaggatcatacagggaaatccaagatacccaaaatatattttgggacacgcacacacaagcagattgctcagattactagagagctccggaggacggcatattcaggggttccaatgactattctttccagcagggatcatacttgtgtccatcctgaggtagtcggtaacttcaacagaaatgagaagtgcatggaattgctagatgggaaaaacggaaaatcctgctatttttatcatggagttcataaaattagtgatcagcacacattacagactttccaagggatgtgcaaagcctgggatatagaagaacttgtcagcctggggaagaaactaaaggcctgtccatattacacagcccgagaactaatacaagatgctgacatcatattttgtccctacaactatcttctagatgcacaaataagggaaagtatggatttaaatctgaaagaacaggttgtcattttagatgaagctcataacatcgaggactgtgctcgggaatcagcaagttacagtgtaacagaagttcagcttcggtttgctcgggatgaactagatagtatggtcaacaataatataaggaagaaagatcatgaacccctacgagctgtgtgctgtagcctcattaattggttagaagcaaacgctgaatatcttgtagaaagagattatgaatcagcttgtaaaatatggagtggaaatgaaatgctcttaactttacacaaaatgggtatcaccactgctacttttcccattttgcagggacatttttctgctgttcttcaaaaagaggaaaaaatctcaccaatttatggtaaagaggaggcaagagaagtacctgttattagtgcatcaactcaaataatgcttaaaggactttttatggtacttgactatctttttaggcaaaatagcagatttgcagatgattataaaattgcgattcaacagacttactcctggacaaatcagattgatatttcagacaaaaatgggttgttggttctaccaaaaaataagaaacgttcacgacagaaaactgcagttcatgtgctaaacttttggtgcttaaatccagctgtggccttttcagatattaatggcaaagttcagaccattgttttgacatctggtacattatcaccaatgaaatccttttcgtcagaacttggtgttacatttactatccagctggaggctaatcatatcattaaaaattcacaggtttgggttggtaccattgggtcaggccccaagggtcggaatctctgtgctaccttccagaatactgaaacatttgagttccaagatgaagtgggagcacttttgttatctgtgtgccagactgtgagccaaggaattttgtgtttcttgccatcttacaagttattagaaaaattaaaagaacgttggctctctactggtttatggcataatctggagttggtgaagacagtcattgtagaaccacagggaggagaaaaaacaaattttgatgaattactgcaggtgtactatgacgcaatcaaatacaaaggagagaaagatggagctctcctggtagcagtttgtcgtggtaaagtgagtgagggtctggatttctcagatgacaatgcccgtgctgtcataacaataggaattccttttccaaatgtgaaagatctacagttaaccagtgctactgctgagggcactaatggctatgcccaaagctgggtctcctattctaaaatggctgatgctgccttgactacagctactgatgaaacagttgacatctacccaagaaatctactgtcaccatcaacagcattggtgctgcattccactgaagtagagtgctactgatggcactgctgttggtactggtattgtctccttttaatgtcttatcattttactctagctctacattattgcactaaggctgctttgttaaagtggaaagaatccttttcccttctttagaccacatcttcttccaatatcttaataaaatacaattttgttccctaaaactaattat

SEQ ID NO: 16890 - DNA, 3183 bp, Homo sapiens
ccctttcttctcttccagggctccgctttatttgctctcagaagtcggtttcctttccttttcttcagtgaatcggagctcagagcgttgcttcggtttccctccagacagttaggaatctgaaataaacaggaaagcactatgtcttcaatgtggtctgaatatacaattggtggggtgaagatttactttccttataaagcttacccgtcacagcttgctatgatgaattctattctcagaggattaaacagcaagcaacattgtttgttggagagtcccacaggaagtggaaaaagcttagccttactttgttctgctttagcatggcaacaatctcttagtgggaaaccagcagatgagggcgtaagtgaaaaagctgaagtacaattgtcatgttgttgtgcatgccattcaaaggattttacaaacaatgacatgaaccaaggaacttcacgtcatttcaactatccaagcacaccaccttctgaaagaaatggcacttcatcaacttgtcaagccccctggccactgttctaggtgctgttgttctactaaacaaggaaacagtcaagagtcatcgaataccattaagaaggatcatacagggaaatccaagatacccaaaatatattttgggacacgcacacacaagcagattgctcagattactagagagctccggaggacggcatattcaggggttccaatgactattctttccagcagggatcatacttgtgtccatcctgaggtagtcggtaacttcaacagaaatgagaagtgcatggaattgctagatgggaaaaacggaaaatcctgctatttttatcatggagttcataaaattagtgatcagcacacattacagactttccaagggatgtgcaaagcctgggatatagaagaacttgtcagcctggggaagaaactaaaggcctgtccatattacacagcccgagaactaatacaagatgctgacatcatattttgtccctacaactatcttctagatgcacaaataagggaaagtatggatttaaatctgaaagaacaggttgtcattttagatgaagctcataacatcgaggactgtgctcgggaatcagcaagttacagtgtaacagaagttcagcttcggtttgctcgggatgaactagatagtatggtcaacaataatataaggaagaaagatcatgaacccctacgagctgtgtgctgtagcctcattaattggttagaagcaaacgctgaatatcttgtagaaagagattatgaatcagcttgtaaaatatggagtggaaatgaaatgctcttaactttacacaaaatgggtatcaccactgctacttttcccattttgcagggacatttttctgctgttcttcaaaaagaggaaaaaatctcaccaatttatggtaaagaggaggcaagagaagtacctgttattagtgcatcaactcaaataatgcttaaaggactttttatggtacttgactatctttttaggcaaaatagcagatttgcagatgattataaaattgcgattcaacagacttactcctggacaaatcagattgatatttcagacaaaaatgggttgttggttctaccaaaaaataagaaacgttcacgacagaaaactgcagttcatgtgctaaacttttggtgcttaaatccagctgtggccttttcagatattaatggcaaagttcagaccattgttttgacatctggtacattatcaccaatgaaatccttttcgtcagaacttggtgttacatttactatccagctggaggctaatcatatcattaaaaattcacaggtttgggttggtaccattgggtcaggccccaagggtcggaatctctgtgctaccttccagaatactgaaacatttgagttccaagatgaagtgggagcacttttgttatctgtgtgccagactgtgagccaaggaattttgtgtttcttgccatcttacaagttattagaaaaattaaaagaacgttggctctctactggtttatggcataatctggagttggtgaagacagtcattgtagaaccacagggaggagaaaaaacaaattttgatgaattactgcaggtgtactatgacgcaatcaaatacaaaggagagaaagatggagctctcctggtagcagtttgtcgtggtaaagtgagtgagggtctggatttctcagatgacaatgcccgtgctgtcataacaataggaattccttttccaaatgtgaaagatctacaggttgaactaaaacgacaatacaatgaccaccattcaaaattgagaggtcttctacctggccgtcagtggtatgaaattcaagcatacagggccttaaaccaggcccttggtaggtaagtggagtgaaatttaatataatattatctgtgacagggctatatatataaatctagtcttgctactttactctttataataaacttggtaaaattttatttaactggaaccataggaactggtatgtattcaatgatagctgtcacaagtagaatttgaaaagagtaagaagaataagttattcccaaaacaaaactcacaatttgctaaagtttaaagaaattttgtgattgatctaacaatgaatagcacacaaagatgctcagtaaatattaaagaaagcttatcaaatcaaaaaagttttgtcttgtgaacatcaaagctcagataacaattttatagataaacagacctctctcctcacctcccccaaaatgtcagggaagaaaattgatataccagccagtgtgaggagatattctatttgaaagtgtactttcagtacggaatctgtgtatctgttaaaatatcatcaaatagaaacaaaatctattttactgcccagtgagcttctgtagttgcacaatttttcattctgcttctatgtaaagaagacatctgacagaaaaaaaaatcattttcattttaatgttatttgtaagctttagataacaatgtgattacaatctatattttcttgtgccttttatgtatagtgataatgttgaatctaggccaggcacggtggctcacgtgtgtaatcctagcactttgggaggccaacacgggcagattacctgaggtcaggagttcgagaccagcctggccaacatggtgaaaccccgtctctacta

SEQ ID NO: 16891 - DNA, 989 bp, Homo sapiens
aattttttaaatatattttaaaattattaggttgaactaaaacgacaatacaatgaccaccattcaaaattgagaggtcttctacctggccgtcagtggtatgaaattcaagcatacagggccttaaaccaggcccttggtaggtaagtggagtgaaatttaatataatattatctgtgacagggctatatatataaatctagtcttgctactttactctttataataaacttggtaaaattttatttaactggaaccataggaactggtatgtattcaatgatagctgtcacaagtagaatttgaaaagagtaagaagaataagttattcccaaaacaaaactcacaatttgctaaagtttaaagaaattttgtgattgatctaacaatgaatagcacacaaagatgctcagtaaatattaaagaaagcttatcaaatcaaaaaagttttgtcttgtgaacatcaaagctcagataacaattttatagataaacagacctctctcctcacctcccccaaaatgtcagggaagaaaattgatataccagccagtgtgaggagatattctatttgaaagtgtactttcagtacggaatctgtgtatctgttaaaatatcatcaaatagaaacaaaatctattttactgcccagtgagcttctgtagttgcacaatttttcattctgcttctatgtaaagaagacatctgacagaaaaaaaaatcattttcattttaatgttatttgtaagctttagataacaatgtgattacaatctatattttcttgtgccttttatgtatagtgataatgttgaaggataacattgaaactgaaggatatttaataattaaagaaaaaataaaataattaattattattattattattattgttttagacagcctcactgtgttgcccaggctggagtgcatgagccaaaatcatgccactgcattccagcctgggcaacagagccagaccatgtctc

SEQ ID NO: 16892 - DNA, 360 bp, Homo sapiens
ccaccttagcttcccgagtagctgggactataggcatgtgtcaccatgcccggctaatttttgtattttttgtagagacggggtttcaccatattgcccaggctggtctcagactcctagactcaagcgatcttcctgcttcagcctcccaaagtgctgggattacaggtgtgagccactttgcccagcctcttctaaagataattttatttatctaatgttgttttcttttaggccttttcagatattaatggcaaagttcagaccattgttttgacatctggtacattatcaccaatgaaatccttttcgtcagaacttggtgttacatttactatccagctggaggctaatcatatc

SEQ ID NO: 16893 - DNA, 422 bp, Homo sapiens
tctgaccagctcatcctatagtctctgaagccacaggattgttgtctgtgccttcctgtgattcatagcacggagcaaaggatcaaaacagcttgagctggaaataacttcatttacttttttaaaaaagtaataagcgggccgggtgcggtggctcacgcctgtaatcccagcacttcaggaggccgaggtgggcagatcacgatgtcaggagatcaagaccatcctagcgaacacggtgaaaccccgtctctactaaaaacacaaaaaaattagctgggcgtggtggcaggcgcctgtagttccagctactcgggaggctgaggcaggagaatggcacgaaccccggggggcggagcttgcggtgagcggacgtcacaccactgcactccagcctaggcaacagagcgatactccatctc

SEQ ID NO: 16894 - DNA, 392 bp, Homo sapiens
cttaaaattcagttaaactgacgcctccagcaggcacggtctcgctctgttgccatgctggagtgcagtggtgcactcatggctgactgtagccttggattcctgggctcaagtgatcttcctgcctcagcctgccaaacagctgggactacagattgcaatgagaaattagagttcaactatttgggtttttattgcctgctctgctagtgaaagcacatacaaccccaggcaagttaataccctgttttcaccaaatgaaaaaggaactatgtatggctcaacatgttccagaaaaaatgattttgtactcacagagtgtgtaatgtgtatacatagacccatatggaagctaccacactgtattaaagacaaagtataaaaacattacc

SEQ ID NO: 16895 - DNA, 356 bp, Homo sapiens
ttgattgtccttgttttatttctctggtgccctgccatgcgctccattccccactccctactctcttatgctgaaaccacatccctcccgctccacactctgaggtccaaaagcagtatcaaccagagaaccatattcattaaatcccagtcctgtgagatgccttgtacaggcctctcattttatgggtgtggagaggaatggccaagaggaccagagactctttaactcctattggcaacagactcaaaacaaagaccagtcttctaagctcctcatacagagtctgtttctgctacagtgattctgtgctattaagagagatcacaaattacctatggtccccccccaaaaaa

SEQ ID NO: 16896 - DNA, 439 bp, Homo sapiens
cattcaaacaaaagatgctcccttcactcaggaacccccaagggatttaggagctccgtgtcaggaactggggggcagagaccaaatatacgtttcttattctaccacagtgtcatatgaaggggaggacaacactgcctttctgtgtcttgccccatagagggcgcacaatgcatggaaataaatgtttctgaatcaacagcaaacaggcttcatcgggtaggagagcgctgagccctccagggacaatgcacatcaatgatgtcccactgtcctttggtgctggggctctaaggcctccactgggtcaggctcctgaagggagacccattctccaaagacccccgagggtcaccactccctgtccaggggtgtggcctcatagctccttttgaacaggggcacaggaaggacggctttagagcattcaaaaaataac

SEQ ID NO: 16897 - DNA, 449 bp, Homo sapiens
tatcaccacaatttaattttggccatttctattatccaagtgcccaagttcttcctgcttattcacagttaatccccattctaatctcctttcctaccctagccccaggtaactactaaactgctttctgtctttatacattgtccttttctgaacatttcatataagtagaattattcatgtagacatcttttatgtctggttcctttcacttagcataacacttagcataacccataataatctggcataacctgtagtgaggtttctgccagattattattagacaaacagaatagacatattttactcctaaagagactatggaacactgggaaaacaacacgtgtgataaggatgtggtgtgaggactatccaaaggtgtagagggagacaaggaaattgagggggacccaaggatagggacagggttggcagggaaaaagagt

SEQ ID NO: 16898 - DNA, 779 bp, Homo sapiens
ctgcgcatgctcgccggcccccgccccgcgcacggcgtcagcgtctagacgcaggccctcctggtgagatcccatcacgtcccctggcctccagtgtcatctgctctgcatgatatctccagggggacctctctgctgggctccaggccgcatggctgtgggtgaccagcatcatgtcccaccgggtcccctgcagtcccagtgcacctgcctgctcatccagggacctgtcctcactgcctgctgcctgcactgtgtggaaggacagaggctaaacgacgaagcctcgagctctggtctcatggaaatggcagcctgcccaccacccacgcttgcccagcctttcttcacgcattaaaacgtggagagtggaatcttctgggcccaggtaatgcgcctttgctccgacattcccttcactactcactggcgagctcagttggaaattcactcccaataggagttccacggcagacacatcgtgagtcatggcagaactttgtcttttaattgcagaatgttaaagaaagagtcactcaggtagcaaagattggcttttcaggggcgattttatggagctattaactcagagacaccattacttaaatgtaatttttattattacaattaaagactgatttgattttaaaaaaaaaaaaaaactgcccgcgtttacacgtcttacttggaaaccctgcgtacccaactaatgcttgagacatcccctttgcagctgcgtataccaaaggccgaacgacgcctccaacatgtcactgaag

SEQ ID NO: 16899 - DNA, 402 bp, Homo sapiens
ctgcgcatgctcgccggcccccgccccgcgcacggcgtcagcgtctagacgcaggccctcctggtgagatcccatcacgtcccctggcctccagtgtcatctgctctgcatgatatctccagggggacctctctgctgggctccaggccgcatggctgtgggtgaccagcatcatgtcccaccgggtcccctgcagtcccagtgcacctgcctgctcatccagggacctgtcctcactgcctgctgcctgcactgtgtggaaggacagaggctaaacgacgaagcctcgagctctggtctcatggaaatggcagcctgcccaccacccacgcttgcccagcctttcttcacgcagtgcgtaaaacacttttgaaaatacaagtattatcctgtcctgttaaa

SEQ ID NO: 16900 - DNA, 487 bp, Homo sapiens
ccgggaacgcacggacacgggccagggggcggggcgattggggaggaatgaatggcggggggtcttcctgagctccgcggctcaccctccccaacacacaacacacacacacacacagagcaataagtttctctcactcaaatgtgggcggggcgggcctagcctgtcgctggtggggggagtggtgagggggcgctctcagggatgggggcggggttcggagacagtgtggggaggggaggtctgcaaatcgtccaactctggtgctaatggcgggtcttctcagcccacccgcagggcagggagggaggggtcggcgtggccccttccccaagcctcccccacgcccaccctgggtgcatgaaccgcccaatgcagaagctgccgcatgtcacccccctctccccaaagaaaaagtgtcatgcccccttcccacccaccctcactccccaccaaaataaacgtttccttttcatttaaaaaaaac

SEQ ID NO: 16901 - DNA, 440 bp, Homo sapiens
tctgactgggactattgactaatgcctatacatagctccattggcctgggcttcctcaaagcatgtctgcttcagcatagtcacacttcgcatatgatgcaccatggttctacagctcattccagtggacgagaacattggtcaagaagctgcattgcctttcatcacatagccttagaaatcaccgtgtcacttccactgttttctattggttgaagctatcctagtcccacccagattcatagaaagcaatcatagagtccgcgtcttgataagaagagtgtcagagaatttgcagctgttttaaaatcactgcaggaccccattctccatgatgtgattattacacattgcatgcctgtatcaaaacatctcatgtgccccctcaatatatatacctaaatatacctgttatgtacccagaaaaattaaaaaataaa

SEQ ID NO: 16902 - DNA, 465 bp, Homo sapiens
gccttgggcagcatctctggcagtggcccctctacagctatcccacctgcaggttgggtcctccatggctctgtcatcggctggttggtcctgggtctcgagctttagccctgccttcttcctttgtccttttagctgatgggtggaagaagcttcctgctgatgctgatctctgagtttcttccctgtcccctgggtagagcatcagatttaaaagccaaggcaagacaaaaaatgagagaatggtagcaaagatccaacactttacaagaccgcctgagaaaagggaggagggggtggttcgacaccagggcctgcacactgagtgtgtgatgttgcagctctgcaggcacagattaagcagctaagatgccatcaatgcttggaaagcagccggtgcctcttgtcctgagcttatttgtctggaatatgattcccttgaacctgactagctcatccacgggg

SEQ ID NO: 16903 - DNA, 419 bp, Homo sapiens
agcgttaacgctgttatatacgttgcccctaaaattaaaagatctgcagagtgttgtgcctcttttttggttataggtgtcatgaggtgcagtaacttggaggtgcatatcggaggggatgtctttatgtaatccagactgctgaactcgtagaaactatggcccctgaatgacaagctctctgttgtgtatatttcatatgaagttatctaaaatgtgttcattttctgttcactgtatccaaccagcctcatgtcaacatagtgtatgagtgcagtctgagggtcaggtcctctggggatgatgttaaggtggagaactgaatattacatccctttttgaaggagggaaaagagcctgtgcaggtgacaacaaagtcaacacatttgtgggtcttttagcccaaagacctcgccccc

SEQ ID NO: 16904 - DNA, 747 bp, Homo sapiens
ctccttgtcccttgtctagatcctagtcattctctacaacacagttcaaacatcgctgcctcaaggaaaccctgcctcaccacatcatcagccctcagcttccgtcccagccccggccaagtgatcttcctctctgttcccatgactctgggaaatcaggtccagactacataaaggattatttacccaaaattcatcagcacacctcctatgtaggagaacagcatctggcgttagaaaaaactggagatctcagatatttatggaggcctgcctcaaatagaagcttgccagcaaaatataaacatgagtacgtcggtgaaattggttggagaataccacagtataattttatcaacaaatcaagactggagagtggctttcatatcaaggcaaccaaaacctcatgtcctggatatgcaaggaaaacagagtcgcgcttcttttgcctggcatatgagtgctttcgaggacactgatcagagaaattccaaatgggctattcttgttaggcagtgtaagtcatcattgccaagagcttccaaaccacctaagctgccgaagctaccaaaaaaggaaaagaaaaggaaacattaacctctaaatcagcataactcaacctgcttttagaaggagaaactgcctactactgtataacaaaaaataagatcataataatccacaagtgcttctcatattgccccaggacagatgtcttgcaagagtacgcttcagcttaaagcccaa

SEQ ID NO: 16905 - DNA, 795 bp, Homo sapiens
  misc_feature (264)..(264): n is a, c, g, or t
  misc_feature (272)..(272): n is a, c, g, or t
  misc_feature (300)..(300): n is a, c, g, or t
ctccttgtcccttgtctagatcctagtcattctctacaacacagttcaaacatcgctgcctcaaggaaaccctgcctcaccacatcatcagccctcagcttccgtcccagccccggccaagtgatcttcctctctgttcccatgactctgggaaatcaggtccagactacataaaggattatttacccaaaattcatcagcacacctcctatgtaggagaacagcatctggcgttttatttaaaagggaaaaaaacaacacaanacccttgngcaaggaatttctcctttcccccaaaanggaaatatttatggaggcctgcctcaaatagaagcttgccagcaaaatataaacatgagtacgtcggtgaaattggttggagaataccacagtataattttatcaacaaatcaagactggagagtggctttcatatcaaggcaaccaaaacctcatgtcctggatatgcaaggaaaacagagtcgcgcttcttttgcctggcatatgagtgctttcgaggacactgatcagagaaattccaaatgggctattcttgttaggcagtgtaagtcatcattgccaagagcttccaaaccacctaagctgccgaagctaccaaaaaaggaaaagaaaaggaaacattaacctctaaatcagcataactcaacctgcttttagaaggagaaactgcctactactgtataacaaaaaataagatcataataatccacaagtgcttctcatattgccccaggacagatgtcttgcaagagtacgcttcagcttaaagcccaa

SEQ ID NO: 16906 - DNA, 803 bp, Homo sapiens
  misc_feature (396)..(396): n is a, c, g, or t
  misc_feature (398)..(399): n is a, c, g, or t
  misc_feature (409)..(409): n is a, c, g, or t
  misc_feature (411)..(411): n is a, c, g, or t
  misc_feature (414)..(415): n is a, c, g, or t
  misc_feature (418)..(421): n is a, c, g, or t
  misc_feature (424)..(425): n is a, c, g, or t
  misc_feature (427)..(427): n is a, c, g, or t
  misc_feature (430)..(432): n is a, c, g, or t
  misc_feature (437)..(438): n is a, c, g, or t
  misc_feature (441)..(441): n is a, c, g, or t
  misc_feature (445)..(445): n is a, c, g, or t
  misc_feature (448)..(448): n is a, c, g, or t
ctccttgtcccttgtctagatcctagtcattctctacaacacagttcaaacatcgctgcctcaaggaaaccctgcctcaccacatcatcagccctcagcttccgtcccagccccggccaagtgatcttcctctctgttcccatgactctgggaaatcaggtccagactacataaaggattatttacccaaaattcatcagcacacctcctatgtaggagaacagcatctggcgttagaaaaaactggagatctcagatatttatggaggcctgcctcaaatagaagcttgccagcaaaatataaacatgagtacgtcggtgaaattggttggagaataccacagtataattttatcaacaaatcaagactggagagtggctttcatatcaagatgnannactaagtagncntcnnttnnnncannanccnnnagatnncanaacncangcaaccaaaacctcatgtcctggatatgcaaggaaaacagagtcgcgcttcttttgcctggcatatgagtgctttcgaggacactgatcagagaaattccaaatgggctattcttgttaggcagtgtaagtcatcattgccaagagcttccaaaccacctaagctgccgaagctaccaaaaaaggaaaagaaaaggaaacattaacctctaaatcagcataactcaacctgcttttagaaggagaaactgcctactactgtataacaaaaaataagatcataataatccacaagtgcttctcatattgccccaggacagatgtcttgcaagagtacgcttcagcttaaagcccaa

SEQ ID NO: 16907 - DNA, 836 bp, Homo sapiens
ccaagtgattgttttatgtttattctgttttgggttgaactatagtttgcttggagaaaataatgtctgttaaatttgcgttagaggataattgtttactgagccaaataatctttcttgtgagaacctattctgggtttcccctgggccctctgctgtggtttcggcgggagttggtttgtgtggattttcaggactgctgacttgatcagacaggcacaacacagtcccggccctcaggcaggccttctccctggtctgatgctgaactgcatggcgtctgttcagatgaagattcttttgccacctccttaaatgaaagaacgatactgaatgtggcttagaaacagctttgccagccgtgcagaatgattgtaagtagtggttgcccgaaaagtatttgcttggaataccactcactgataacactggtgaacctggaaggaattatacggagtgaaaaaaggcaccactcactgataacacgaatgaacctggaaggaattatacggagtgaaaaaaggctccgctcactgataacgcgggtgaacctggaaggaattacacggagtgaaaaaagaccctgctcactggtaaggcgggtgaacccagaaggaattacacagagtggaaaaaagactccgctcactgataacgcgggtgaacccagaaggaattacacggagtggaaaaaaggccccgctcactgataacgcgggtgaacccagaaggaattatacggagtgaaaaaaggccgagctgaaagatcacatgccgtatgattttttttttatacagcattctctaaagacaaaaattaaagagatggaacacag

SEQ ID NO: 16908 - DNA, 497 bp, Homo sapiens
gccacactcgtgttggttgttggttgtttaatcctcctgacaacctattaacacggcttctcttcactatcagcaaccccattctgcagccgggaaaactaaggccacacggatcacaaaatgcaagagctgagatacaaacccagagctagctgaccgtagagtgcaggttctcccaacggctgtgtgtgcctactcaccctgcccgacccctgctcccatgcacacacacacacttcctccatgctccaggctgtggctgcaatgaattcttcttaacctatccatcttttgtgccagatacatgcagtacctacaccccaccccccgcctttttttttttttgacacagagtctcactctgtcgcccaggctggagtacagtggtgtgatctcgactcaatgcaacctccacctcccaggctgaggaaggagaatcgcttgaacccaggaggcgagattgcagtgggtggagattgcgccattgcactacagcc

SEQ ID NO: 16909 - DNA, 419 bp, Homo sapiens
ttcacataaccatatctaaagaaatctatagattcccaacatatgtaattaaaaaataatgtgtaagatagtataagcatcaacagatcagatttttaatcttggaacttcgtaaagtctacaaattgtcattcagcaaatttctcagttctttggctttaaattatttcttttaataaaaaaaattgtttaagagacgctgggtgccaggtatggggatggcactgtaatttaaaaagggtgatcaggaagacctcgttgaaaagtgtcacttcttttttttttttaatgtataattatcattttatttgtaattgttaattacaagtaaaaatgaaattataaataagtaaatcatactccttaatggcataaataaaaagtgcctcgcttaaattaataaaattttcctgaccata

SEQ ID NO: 16910 - DNA, 522 bp, Homo sapiens
gaaattgtttcttaaattgcaataggacaccaagatttttctcaaggttcaagagaaaacttttctgttttgagaagtttgaaaactaaaacaaagaaagcattcatatgataagagaagaaagtgagaagacacgagtcctctgtcctcttagccaggctctaatgggttcagcccatggaggtaggaattagaaaacatcatagaccatatcgacttgaactgcttagaaattcagccacagattttctgaagcgtgagaacggactaatacaaaaaatcacttttgttatgcattagcaaagaacttggaggcattttgcccatgccttatggatctttggaactttgaacttaagagtgatggattagggtatctggtagaagaaatttctaaggagcaactgattcaagatgtggccaggctgcttctaaaagcctatattcgtatgtgcgagcaaaaaatgacctgaaactggaacttatatttaaaagaaaaacagagtgtaaaagattggacaa

SEQ ID NO: 16911 - DNA, 378 bp, Homo sapiens
actaacaaaaggagatgaagcctccaaataaatacttttttaaggacttggaatttatatcagtcggacataggttcttgtttttttaaccctaagcttatgtattcccttagttttgaggaatttcccctcactgtgagttttgggggatgatgaaataggaaaaaagttgtattgtatttctacttaaagaggaaagaaacaactagtgttagttaaataatggtaaatagatgcttttcaggtttctgttcctcactccaatctcctgattctagaatgcccgtaaaaattttataatcttactctcaagatacattctaccagggtgggcaattgttaaagtgttttatttactttttaacctttgggcccttt

SEQ ID NO: 16912 - DNA, 377 bp, Homo sapiens
caggaaggaatgttgggtcctaacgcatgcttaaaatgtctatttctcatctttaacagttcagtatcaggcgcactgggcacaatagcccaccacaggtactgttaacccatggcctgatctggctcaggtcagaagaacaggacatgtttccccctcctactctactctcaatgataattagctcggtccggctctaagttccttccagatcctcgccggcgccttccctgcccacacgcgccttcctctgcgagcggcaggacccaggagctggagcccgcgtgccagggacagacgcccgagatgattaggttgggggcgcggcagcccagcgccctggagtgcaccaagacccccgactcctcacccccgag

SEQ ID NO: 16913 - DNA, 591 bp, Homo sapiens
gttagagcaggaagaagttctcaccccgtagtagggaagcatcaacacgagactaaatacagttcaggtcccaccaaacaccactgaataacaagacccagagccagatgtgggggctcacacctgtaatcccagaactttgggaagccaaggcaggcagaccagttgagcccaggaggtcgagactagcctgagcaacacggtgaaaccccatctctacaaaaatccaaaaagtcgccaatgtggtgatgcgtgcctgtggccccagctattggggaggctgaggtgggagaatcacttgagcccagggggccgagactgcagagagccaagatcacaccactacactccagcccgtgcgacacagtgagaccctgcctgaaaaaaaaggaccacacagtttccaagtaacttaatcacattcgagaaacaaatgcaaagatatgtataggtttacaaaaatatccagcaccaaacaaggtagaatacaaaatattgaatatccgggaaaaacaaaaaacaaaaaaacaggcatgtccccgtacatcgttagaagcttgaattcgagcagtagtagtagtaggcggccgc

SEQ ID NO: 16914 - DNA, 399 bp, Homo sapiens
agtttccaagtaacttaatcacattcgagaaacaaatgcaaagatatgtataggtttacaaaaatatccagcaccaaacaaggtagaatacaaaatattgaatatccgggaaaaacaaaaaacaaaaaaacaggcatgaaaagaggcaggacattatgacccatatggagagatgggaaaaatcaatcaaaattgacctggggccgggcacagtggctcacgcctgtaatcccagcactctgggaggccgaggagggcgaatcacttcagaccagaagttcacaaccagcctggacaacatggtgaaaccccatctctactaaaaataaaaaaactagccaggcgtggtggcaggcaacctgtagccccagttactcagaaggctgaggcaggagaatc

SEQ ID NO: 16915 - DNA, 775 bp, Homo sapiens
aatatgaaatggtacagccattatggaaaagtgtggtgattcctcataaaattaaaatggaaataccatgatccagcaatcccagtcgacatatatactcaaaaaaattaaaagcagggtcttgaagagatacttgtgttccatggtgatagcagccattgttcacaatagctaaaacatagaagcagcccaatcggccatcagtagatgaatggataagcaaaatgtagtatatccatgcaatggaatattattccacttcaaggaagaaaattctgacactggctacagcatgaatgaaccttgaggacgttatgcagttttacaggatgagttatggagctggatagtggtgatggtggcacattaaggatgtatttaatactgttcttaaatggtacacttaaaaatggtaaattttatgtgtattttacaatctttttttaaattgaagaaaaatcctgtagataaattagaaaattcttcccttcataggtttatctgcatttgattctcccatacttgtacaaggatttatttgtattcaaatggacaaattacgcaataggaaatatttgaaaatatttatcatgggtaattgctattttcattgacttcctaagattttatgtaataatcatttgagtcaatattggtagctaatgtactaatctaatattgaaatcagattgatatctttgttacttaaagataatttgattggatcagcagttatttcaaattgattaaacaaaaaattataaaacacctagtt

SEQ ID NO: 16916 - DNA, 423 bp, Homo sapiens
gaaaaaaccccacacatttggtcacagaagtcttctgtgttgattactgtggtgttagagtaaaggaaaaacacagtttgagagtttttctgtaacagtagttatagaaatgggatacaagtcctggacttctgactctaacacctaaatattacagggaagcaatataatacttcaaagcacaagcttattagtcagaaatacttgacaggtttgactctcaggtcctccatttcctacctatataatcttttttcttggattgtttcttaaactttcttttgttactataaaattccccaaacaaaaagaaatgctaatcattccattatcaaccacaacggttctcaacacggaatatcaaaatcacctataaagccttcccaaataaacatataccagaggtagggtatacaaacagtg

SEQ ID NO: 16917 - DNA, 472 bp, Homo sapiens
gtcatgtattctactgtgtttaatttgaccaaatattgatagattgctccaaaatatggtagttttactgaggggtgtgtgccttgtgctgaagatggatacagggatgaggtggaccgtggaggccctggcagcagatgagagagagtcagggacatctcaacagatgaggccaaactgcataaggaagaggctgggtgtggtggcttaggcctatacaaccagcactttgggaggctgaggcgggtggatcacttgaggtcagagttcgagaccagcctgaccaacatggcgaaaccctgtctctactaaaaagacaaaaattagctgggcgttatggcaccggcctgtagtcccagctacttgggaggttgaggcaggagaatcgctggaaccccggaggcagaggttgcagtgagccgagatggccccactgcactccagcctgggcgacagagtgagactctgtctc

SEQ ID NO: 16918 - DNA, 570 bp, Homo sapiens
aataatattgagtaatttctagttagacgctgtaaacctgtgctattacggatttctcttcttcccatttttacagggctgctcgctccactgtctgtgaccttttgcagggattttgttcctctaaatcttaaatgttgcagttggcttaggtcggagagcaatcagggaatcaggaagccttctaaacctattattacaaattgcatctataaagaaagattaagaaagattgttgtctctggctcacactatcgattaaacacacatatacgctctgtccagtagcagatactgtgctcccaaggtcggcattgcctgggtgggaaatggctcaaacacaatccagggaagctctctatgatatgtgtttgacatccccctctagtttctttgtgtgtgtgtgttttatacatatcacaagcttactggtaatggtaacatttgccttgcccagcgagcaagacccactggtttttgagaaagtgggtccaaagatttctgtaggccttgtaggcctgattaaggttcatttttcatctattaattctcattatttggaaaaaaaaa

SEQ ID NO: 16919 - DNA, 211 bp, Homo sapiens
aggtgacacatgaaagcacagagtgggtggcagttcaagcctgcgagggccgagcctttccactgctgcagctgttagtggctggcacagggcaggatggcagacctagtgcagcacaaacaaaccacgcagtcagccagctctccagccaactgtgtctacttctaaagtagaagttagacaaaacatggggttcacttagactggggtc

SEQ ID NO: 16920 - DNA, 202 bp, Homo sapiens
ccctttagatggctttaggttggcattctctttcatgagaatcacattaaaagtacaggaaatacttgtgcattctttcttttcataaactgtgaatgtgggccatttgtaatgtagctacctcttcttgaggactcatctcagtggccaatggacaacagccttatacctttaggctctaactgttctaggcatgaatcca

SEQ ID NO: 16921 - DNA, 2920 bp, Homo sapiens
  misc_feature (1433)..(1433): n is a, c, g, or t
  misc_feature (1532)..(1532): n is a, c, g, or t
  misc_feature (1611)..(1611): n is a, c, g, or t
aataacataatcaaagaggaaaaaccagcattggtgaattcatcccttcctttcaacttggcctctctcacccactttacttttagtgcagagttcagtgatggctagcagctgtcccctgatatttgttattccaagtatccattcataggtctggggagaggttgtggcaagctttccctaaataaatcacacccttatcttctaagcttgagcagtggagggagacttttcattcgaggtgggtggctgaacatcatcattcctgttctggacttcttgtaatcatgttggattcagagggcaccactctctcttgtacagatctgacctaacatagacatagactatagcagagatgaatccaggctataacatttaacaagaccttattaaaagcttcaagatgttagcctttatctgttccatatctagcttacttggttgtttttgggggatcacatgtctgtcctccaaactggaaacgtctaactctccaggagatgcagtagcattatttgttggacagtggcacctactggtagtttgtaatgtttatagcctagtgtgaaaggcattgtaaatgtatacctagcaaaaaggggagtagagcaaaatttccagagttttacaaatgaaatgaaggatgatatgggggagagtcctttggggccaaggagagagagcacagactagaaagtaatacaagcagaaagaaggatgtcagcccatgtctgtgtggtagaggtcatctttccatctcactgggattgtccctgaaagtgtctcactgcttaggtctccttgcctgtctaaggcttggagaccttccagtatctcatgccttattctagatctgcttttttccccgaggtgaaaaaacctgttcaaatggtcactcacaacttttgtggccttactttttgtctccgaaaggacaaacatatcagaactaacatccacccagaagaagggctgatcagttcctttcaacacagcatggatgaaaacccaggttagcgttagtgcttcttgaattggaagtattctaacctctatgtacctaccaatgtaagaactgagggcccttttaagggaacttacattcctaaagttcaagtcaagttgtcatgaagagtacttaatgaggcatacttttaatctttgaatcgtagtgttgtagggctaaaagaaacctcaggccaggctgcatggtggctcacgcctgtaatcccagtactttgggagaccaaggcaggctgatcacctaaggccagtaatttgagaccagcccaaccaacctggtgaaaccctgtctccactaaaaatacaaaattagcctggtgtggtgatgcatgcgtgtaatcctaactactcgggaggctaaggcagaagaattgtttgaacccgggaggcggaggtttcagtgagcngagatcatgccattgcactccagcctgggtgacaggagccaaactccgtctcaaaaaaaaaaaaaaaaaaaaaaaaaattagccaggcgtggtggtagncgcctgttgtcccagctgctggggaggctgaggcaggataattgcttgaacctgggaggcagaggttgcagtgagccgngattgtgccactgcactccagcttgggtgacagagccagactgtctcaaaagaaaaaaagcaaaaaagaaaaaacagaaaagaaacctcagagatctgtcattttccacctattacattcattttatgatacagaaatggtcattcagttgcagatagtacatgactgttgggatcaggcccccaaatctggccataaactggcccccaaactggccataaacaaaatccctgcagcaccgtgacctgtttgtgatggccatgacacccatgctgaagattgtgggtttaccggaatgagggcaaggaacacctggcccacccagggtggaaaaccgcttaaaggcgttcctgaaccacagacaatagcatgagcgatctgtgccttaagggcttgctcctgctgctgataactagccagacccatccctttatttcggcccatccctttgtttcccgtaaggaatacttttagttaatctatcatctatagaaagaatgcttatcactggcttgctgtcagtaaatatgtgggtgaatgtctgtttgaggctctcagctctgaaggccgtgagacccctgatttcccactccacactatatttctgtgtgtgtctttaattcctctagtgctgctgtgttaaggtctccgtgaccgagctggtcttagcacgtgacttttctcgggtgatagctttaatagtatcagcagagcagggaacagaatctagtttaatgtgtcctaatccagtggttttttttaaccacaaaatactgcctttgagaaaaggccaggccagcagagtcagaagttgagcctgggatttgcatagtcacaaggtctttcttgcaaaccatttctactgtagtttattgtgtttttctgtttttgttttttgggttaaaatgcatcgatttttatgctgacagtttgtgagagttactgggaagtattctatgctaattttgctagagtttgaaaagaacttaaaggataattgtgtctatctttgagaagataacatgaacttttacatgtttttgacaatttttattcattctgcttttattacaagtgtgagatgaggttttcttcctaggatactctctgaggcacttttgaaaatacttttgttggctgggcacagtggctcacgcctgtaatcctagcactttgggaggctgaggtgggtggatcacctgaggtcaggagttcaggaccatcctggccaacctggtgaaaccctgcctcaggctccccagtagctgagactacaggcacacgccaccatgcccagctaatttttgta

SEQ ID NO: 16922 - DNA, 336 bp, Homo sapiens
tgtccacagagcatctagaggtgacctcttcatgtgactggggcttatcacaatatgacatcagtatctgaatggatatactatgagaggtattatccttagagctaggtgaaagctggatgccttattctcacctaacttccaaaataatgcattatcatttgatcatattctattgattacaagaagttataagccctgctcagattcaacaagaaaggattttgatgaagggaacagagtggaagagtgtattagttgggagatactgtgatggtggctaaattttgaaaatataatctgtcacacacatggtatatgcagaggaatataaat

SEQ ID NO: 16923 - DNA, 2464 bp, Homo sapiens
  misc_feature (105)..(105): n is a, c, g, or t
ttagaaatgtttttcttttcccagaattgtgtgagtttgttttgaagccttgaataccggtacatggttaacaggcagcttgtgcccaatcccaaagcgggaagnaaggcctggctttggctcactgatgataaagtctcctcccactgcctttcagcagctctgccgaagagctgatcaagatgctgcaaacccagcttccccagaccggccaagagggaagaatgatgagcgtgttttaaattacaaagagagagcagcgcaggcagtttctggtctgggtgataaattgaaatccataaatatagcagtgctaatttgaagttccgtaattgtttgtgccatgagaatgtgtacatttgaaaggattttataaagcaattactagaaatgcctcccttgagagctgtatgactggaggtgttttcagtctgaggggggcagcataaacccaaacctcttctagatgaatggcagggtggcgggaggggtcatgaaatcatggggaagaggtgaaggatttgagagctactaacctgacatctaactgaatgcctaagaaattgcagggcaatttcaggaaataggaaaaataattttgaaaacattcaaagcctccagactttcggtgtgtgactgatcttttttctaatctctttaaacttctttccacctattgccttaatagcaggtgcttcctcttagggtccccccaaattatttacctcgagttccctaatgaaattactttgcattaatttgtcataaagggagaagtgctagaaataccgaggcattgataatttcatggagtagcaatgaatgtcagtcacagtttcctctccccgttgcccggggctgtgccttcaaagcaggtgacagactgcaaggtgtaaacaagctttataatgccatataaatcaaaccgggctcattttacctaacaacagaaccatgtttgtttgcttttttgtaaaatggactacttcagtgaaaaattgattccacgtagttctaataactctgtgaccttggacattggctttttatagacacagctcttcccacctgctggtatggacaccagtttgtacagactgttgtcacacaccctggctcaaagtcaaaagagaattttaattactcatcaagctgccaaattctactaattgcccccttgtcagcatatttcattaattgctgaaaggtaaatgagttacatattttgtttggaccacgtcacctgtacattttcaaagcctcggattgtttatcttgcaaggagagaaggggcctcttctccacagatgcagctcaaattagcaaaactgaactgtagagtttcaggcctttcccttccttaaaatgctgatagatttctagaccagactttgatatttattggcttcttggtcttgctgtttaaacacacccattgccctttctttcttaggccctgtaagcaaagctggagtagcgtcttgggaaaaggccaactgaccaccctaattttgtcgttccaagtctgcagagcgcacatattaagtagttgttaactgacatctttaggctccgtgagtgaaatgcagcaagcctgcccccagcagcctgtgggctaatcctgagctgttccttcgtttaggtacacaggtgaccctgaagttcccactcggccctctgttttctgagtcctgtctcctctgtagcacagtggggattgttctgaaccgtggcacgccttcttggcgaggcaggctctcttatggaaccatagtctgttacctcatttcttccaactgctctgtcccctaaatgtgtgttcccaggtgcagtgcagcaagggtgctcgctgttggcctttgagagtggaggtggctgtatcggagtgtgctccccctactttttcccttgccccgagtggcagttcttttcctctctgttgccggatgctgtctagggcctgttagttgctatttccttgcctccgctccccttcccactagccttctaactaccttttattctcggctccaactctttcaatgatgaggtgaatgctttttctgttccacgtcactgcaaagtcaaggtgtccagcatgctctcacttataactgcctcacccgatctcacgcacagtgcgagagctgaaggtaagccccggatgttgccagattacggtggacaaataaaaaacaactctccaacagcaactcacaaatgcatgaaatgttttaacctctagacagactgccagaatttctctcttctaattcctacttgtagtgataacatttttctttttgtgatttttttttttaaataatagtgtagtaccttgaaacaactgcagttctaactcattgtcaccatttctgtttgacacgttccacttcctttgcaattattgtatttagttgtgcactagtgtcaataaaattgacatttgtgaagcaaaaaaaag

SEQ ID NO: 16924 - DNA, 2408 bp, Homo sapiens
  misc_feature (5)..(5): n is a, c, g, or t
  misc_feature (16)..(16): n is a, c, g, or t
  misc_feature (45)..(45): n is a, c, g, or t
  misc_feature (61)..(61): n is a, c, g, or t
  misc_feature (113)..(113): n is a, c, g, or t
  misc_feature (120)..(120): n is a, c, g, or t
  misc_feature (235)..(235): n is a, c, g, or t
taaancccaaaattancccttcaagagtggcccaacataaccccnaagagccctctgggangttaagaattacggcccctaaaagtcggcaccacaagttgcaaacctgctgnccccagncctctgtttgtccacctaaatacctaaattccaacccttatctccctatttgaaggagaaagtaagatccttcccacatccttggcttgaaaagcaaatagtcaagttttccaancccgccaagcttggcacgagtgctaatttgaagttccgtaattgtttgtgccatgagaatgtgtacatttgaaaggattttataaagcaattactagaaatgcctcccttgagagctgtatgactggaggtgttttcagtctgaggggggcagcataaacccaaacctcttctagatgaatggcagggtggcgggaggggtcatgaaatcatggggaagaggtgaaggatttgagagctactaacctgacatctaactgaatgcctaagaaattgcagggcaatttcaggaaataggaaaaataattttgaaaacattcaaagcctccagactttcggtgtgtgactgatcttttttctaatctctttaaacttctttccacctattgccttaatagcaggtgcttcctcttagggtccccccaaattatttacctcgagttccctaatgaaattactttgcattaatttgtcataaagggagaagtgctagaaataccgaggcattgataatttcatggagtagcaatgaatgtcagtcacagtttcctctccccgttgcccggggctgtgccttcaaagcaggtgacagactgcaaggtgtaaacaagctttataatgccatataaatcaaaccgggctcattttacctaacaacagaaccatgtttgtttgcttttttgtaaaatggactacttcagtgaaaaattgattccacgtagttctaataactctgtgaccttggacattggctttttatagacacagctcttcccacctgctggtatggacaccagtttgtacagactgttgtcacacaccctggctcaaagtcaaaagagaattttaattactcatcaagctgccaaattctactaattgcccccttgtcagcatatttcattaattgctgaaaggtaaatgagttacatattttgtttggaccacgtcacctgtacattttcaaagcctcggattgtttatcttgcaaggagagaaggggcctcttctccacagatgcagctcaaattagcaaaactgaactgtagagtttcaggcctttcccttccttaaaatgctgatagatttctagaccagactttgatatttattggcttcttggtcttgctgtttaaacacacccattgccctttctttcttaggccctgtaagcaaagctggagtagcgtcttgggaaaaggccaactgaccaccctaattttgtcgttccaagtctgcagagcgcacatattaagtagttgttaactgacatctttaggctccgtgagtgaaatgcagcaagcctgcccccagcagcctgtgggctaatcctgagctgttccttcgtttaggtacacaggtgaccctgaagttcccactcggccctctgttttctgagtcctgtctcctctgtagcacagtggggattgttctgaaccgtggcacgccttcttggcgaggcaggctctcttatggaaccatagtctgttacctcatttcttccaactgctctgtcccctaaatgtgtgttcccaggtgcagtgcagcaagggtgctcgctgttggcctttgagagtggaggtggctgtatcggagtgtgctccccctactttttcccttgccccgagtggcagttcttttcctctctgttgccggatgctgtctagggcctgttagttgctatttccttgcctccgctccccttcccactagccttctaactaccttttattctcggctccaactctttcaatgatgaggtgaatgctttttctgttccacgtcactgcaaagtcaaggtgtccagcatgctctcacttataactgcctcacccgatctcacgcacagtgcgagagctgaaggtaagccccggatgttgccagattacggtggacaaataaaaaacaactctccaacagcaactcacaaatgcatgaaatgttttaacctctagacagactgccagaatttctctcttctaattcctacttgtagtgataacatttttctttttgtgatttttttttttaaataatagtgtagtaccttgaaacaactgcagttctaactcattgtcaccatttctgtttgacacgttccacttcctttgcaattattgtatttagttgtgcactagtgtcaataaaattgacatttgtgaagcaaaaaaaag

SEQ ID NO: 16925 - DNA, 691 bp, Homo sapiens
atatctatatatagatattcacaccaaaacattcgtaacaaaacaagaaatacaacaattacagtcctcgtttctgtagctggtcacatggtggttgctggtattcatggttgcctctttccactacccattctgtattccctttgcactcatctcgcaagctgatcgtggtttacctggtggggtgacccaaaccttcattcttcaggggtgtgggccattcatagtcctgtatggattgttgtcatttttatcgactgtaatcacagggcagggtacagagatgtcctaagggatctccttaagccagacatactcctccttacctccattgtgtagcagttccagttcctcttgggcaggatcaattaccccagccaacactgtaactcccttccttgcctattgattcagaggtgtgaggagcccaaagtggctgggtggctgtcttaacttccagttcagtggaatgattgtaatttttcatcctctaaataatgagtagggatacatttattctaaaatgcatattatgaatattatgcagcagattcattcaccttgtgataaagtgaaatagggtgttaagcagaaataacatgcagatatcttttatcatcaaattagggagcaagattctctgatgcagtattcctcagtcttaaaccctgtattgatgccttttcatgaa

SEQ ID NO: 16926 - DNA, 905 bp, Homo sapiens
atcagggcacagggcagggcaggagcaagagcctcaggcctctccagaagaaatcagcctgtctgggtgctgttctcagctggggttgctgggaaagagtgagggatgtctgctgtacagaaaacatcagcctggaagactgcttatgaatccacctgctgccacttgctgccacggttcctattctcacctggcctgcgtcaattcagttaaaccaagtccatccttcatgcagttttcctgcacaaagtgacttccgtgggtacccccagctccttgcacatcttctgtgatggacttgaaattccagggcagctttttcttctaccagtatacccgtgactttccccctactgcccacctggtagggactcaaggaaagagaagtaacttaaatattagctcaggaaaacaagcagaaatataaatcctcccaccttcaagttaaattcaacacaggtgtcttttaggttatcctctatagcatatatgcctgggctactttccattgttggtaattgataacttggtacaatgtatatttactaagcctaaaaagaaaagaaaaactcaaaaaagggggcaaagtataaaatgtttccagagattccattcccttttgctgctggtgcttgggattggggatggaggagttctaaccaagagcaaacggcttcgctttggaaactgttgggtggccctaaattttagagtccaaaacagtgggtcttaaactgtaggttgcattagaatgacctggaagactcgttaaaatacagattcctgggccccactctcaaagtttctgactcattaggtctgggggagaacccaataattcacatttcttacacgttcccacatgacgttgaggctgcttgctctgagactacacactttaagaa

SEQ ID NO: 16927 - DNA, 286 bp, Homo sapiens
ccttgaagacattatggtaagtggaaaaagtcactcacaaaagtacaaatattgtatgattccatatctgtggagtacctagagtaatccaactcatagagaacagtggttgccagggactgggagagggagtaacagggagttagtgtttaatgggattggaatttcagtttaggaagatgaaacagttctagagatggacgatggtgatggttgtacaacaatgtgattatacttaatgcaacagaactttacacttaaaatgataaaaatgctaaatcttgtg

SEQ ID NO: 16928 - DNA, 511 bp, Homo sapiens
ccaccatcatgtatgtggtctgtcattgatcaaaacatcattatgtggcacatgactgtagtttaacacctaatatcttaataagatctcatctgcccagtggaagaggatgccaaggtaatacagaaaaggatctagctatagctgaaattatcctaaattagaaaaacaaacaaactattaacctttgagagataattatttaaggtacatagaatatcatgttctctatctgtgtgactttgtatgtcttggggcaagacactcagcttctggcgttttaaccaccttatctgcaaattaaacatttttgctctctgaagagtttactacctgccctcttagggatcccttcaacatgtaggaactgtgattctgtagtatataaaagagcagagaggaactttagtttaaacctggcacctttagtgcaagcatttagctctgttccctcctaaaattccactgcaaggacaacaagggcagttagataaaccctcaaagaataaga

SEQ ID NO: 16929 - DNA, 246 bp, Homo sapiens
  misc_feature (196)..(196): n is a, c, g, or t
aacttagccaggtgtggtggctcacacctgtagtctcagctacttgggaggatgaggtggggggattacttgagcctgggaggttgaggctgcagtcagctgtgatggcaccactgacctccagcctggggacacagcaagtgtccgctattccccactgcaaaaaattaaaagtgtgtaaactaggataaaatantttgcaactcataggattgacaaagggttactatctttactatttattga

SEQ ID NO: 16930 - DNA, 417 bp, Homo sapiens
ccagcctgggtgacagtgagactgtctcaaaaaaaagaaaagaaaacccacaaaacccacaaaatatcccccacaaccaaatatataactagaacctcctcatatatttggaaattaagaaatacgctgctaggcgggcatggtggctcatgcctgtaatcccagcacttcaggaggccaagtcgggaggatcttgagttcaggagcttgagaccagcctgagcaacatagcaagaccctctcaacaaaacatgtaacacaatttagccaggtgtggtggcatgttcctctagttccagctacttcggaggctgaagtgggaagatcgcttgagcctaagagttggaggctgcagtcagccctgattgcaccactgcactccagcttggctgacacagcaagaccctgtctctaaaa

SEQ ID NO: 16931 - DNA, 457 bp, Homo sapiens
ccgccacctcctggcacaccccatttggtctctgtccactcctgtcacctgctgtttttgaagcaaattttggaattgtgtcattttatttgtcagtatttcagtatgtaaagtccatagagatacggagttcgaaaaagttttaaatgttattatgaaaattttaggctgggcacggtgtctcacgtctgtaatcccagcactttgggagccaaggcgggtggatcgcatgagcccaggagttcgagaccagcctgagcagtgtggtgaaaccccatctctacaaaaaagtgcaaaaattagctgggcgtggtggttcatgtctgtagtcccagttacttgggaggctgagtaggaggatcgattgtcctgggtgattgaggctatagtgagctgtgattgcactactgcactccagtgtgggcagcagagccagaccctgtctcagcaaaaaaaa

SEQ ID NO: 16932 - DNA, 405 bp, Homo sapiens
tgcatgaccgcgctgtggggcccaaggcttgcccttgcccgccagctgtgcacagaccctgggcctctgtcatggtgggggctgtgtgtgtataggcgtgtgcatgtgtgatgtggcacgtttattttaagcaaaagccatgtttttctgtgtgccccatgccaggcctcacgtgagcaggtgaacagttagacacccgaaaggcccaggctggagtgcagtggtgccatcacggctcactgcagtcttgacctccaagggcccaggaaatcctcccacctcattacttgggaggctgagtaggaggatcgattgtcctgggtgattgaggctatagtgagctgtgattgcactactgcactccagtgtgggcagcagagccagaccctgtctcagcaaaaaaaa

SEQ ID NO: 16933 - DNA, 375 bp, Homo sapiens
tgcatgaccgcgctgtggggcccaaggcttgcccttgcccgccagctgtgcacagaccctgggcctctgtcatggtgggggctgtgtgtgtataggcgtgtgcatgtgtgatgtggcacgtttattttaagcaaaagccatgtttttctgtgtgccccatgccaggcctcacgtgagcaggtgaacagttagacacccgaaaggcccaggctggagtgcagtggtgccatcacggctcactgcagtcttgacctccaagggcccaggaaatcctcccacctcagtcccccaagtagctgggactacaggcgcacgccactatgcccttgtattttttgtagagacagggtttcactatgttgccaaggctggtct

SEQ ID NO: 16934 - DNA, 415 bp, Homo sapiens
gggggatctgccaccattctgtttggctcttttggtttgtatgttcctttcagacttgatgagctttcacatttgtttcaactcagattaaacagctcacactgtttcatcattttaaatgctgtaaaacaaggccaggtgcggtggctcacacctgtaaccctaacactttgggaggccaaggtggacggatcacctgaggtcaggaattctagaccagcctggccaacatggtgaaaccccatctctactaaaaatacaaaaattagtggggtgtggtggcacacgcctgtaatcccagctacccaggaggctgaggcaggagagtctctggtaccaggaagcagaggctgcagtgagccaaaatcgcgcctctgcactacaacctggggacagagggagactctgtcacaca

SEQ ID NO: 16935 - DNA, 346 bp, Homo sapiens
tgttcaatctcattagggattgggaaaatctaagttgaaataaaaatgagataacaattccagctgggtgcagtggcccacacctgtaatcccagcactttgggaggctgaggtgggtggatcacctgaggtcaggagtttgagaccagcctggccaacattgtgaaagcccgtacctactaaagatacacaaaattggccaggtgtggtggcgggcacctgtaatcccagctactcgggaggctgaggcaggagaattgcttgaacccaggaggcagaggttgcagtgagccaagattgcaccattgcactccagcctgggtgacaagagcgaaactccatctca

SEQ ID NO: 16936 - DNA, 489 bp, Homo sapiens
cttataacctcttcatctcttaatgaagagtaaagaccctggtctaggacacctctgcatggtgccagagcccctttaacctttcactccaaacatatcctgagcataagcccatggagaaaaggatagacagtgaacactaaagaggcagagaagccaaaaatcactgcagacttagtttttccatttcctttgctctcactggatgtgtccccacccaacattcccaggtttctgcctttactcagatgcgacccctctgctgcagtgccaaagagctgagagcccctgttccaacccgggagatcctgttcccctcgtaccactgttcactctggcctgggctggggtctctgggtttatgcctcctcttaccctggttttggagacccttgcactgggtttcagaccctgttatctaaggacacattaggtacctcctttccagctgtcctccgccccagctcttcctttccagctgtcctctgc

SEQ ID NO: 16937 - DNA, 421 bp, Homo sapiens
aaatgatctgtttgctcagcactgatttctgagaaactgtggtctgagtgaatgagatattggcccaaaaatatactgtattaaatcagtttctattttctattattgacttgttggattttcctgggaatttgtatttctggggattctctagggatatttagctctaagtagatccttatgggcttttaaccaagtgactcagagtgaatgtttcagcaagaatagtgtctgagataagcaggagttggaaatgccctggattaagctatctatttaatcttgtggttaactttcaaaaagagggggagccatggctggatcacagaatcctttgagtatctgagaaagacagtaggttttctccctatatacagagagaaattagcttgtaacttcaagatattcagggaccctgcga

SEQ ID NO: 16938 - DNA, 499 bp, Homo sapiens
acaaaaaagtgggaaacttactgtaatagatgtcaagatatattgtgaaagcttcactaattacgacgttggtatagatgtgtacagatagaccaatagatcaatggaacagaatagagtccagaaacaaacctgtgtctatatagatacttgatttatgacaaaggtggcattggagggcagtttcaaaagaacagtcatttcaataaagagtactgagtcagctggacatctgaatataaaaaaagagaagcctgatccttatttaaccccatacacaaaaatccattccaggagaattacaaatctgtatgtgaaagacgaaacaataaaacttttagaagataatactatagaatatctttatgaccttggctttagacatagtattaattataactgaaaagcttaataattaaacaattaaaaggaagaactttatcataatatgcccttaagacagtgaaagggcagattacagtgtgggaagatatttgca

SEQ ID NO: 16939 - DNA, 352 bp, Homo sapiens
caaactggtatgaataacattttgttatgcaaatgggcttaagagagattagatgattggtcctaggctagataagtaataaatagtagagctaagattatagccatgatcggccgggcgctggtggctcacgcctgtaatcccagtgctttgggaggctgaggtgggtggatcatgaggtcgaaagatcgagaccatcctggccaacattgtgaaaccccatctctactaaaaatacaaacattagctgggcgtggtggcacgcacctgtggtcccagctacttgggaggctgaggcaggagaatcgcttgaacccgggaggcagaggttgcagtgagccgagatcgcacc

SEQ ID NO: 16940 - DNA, 306 bp, Homo sapiens
ggggttagttttaaaagaaaaggaaaatgtgctaagtagaatggctaaattataaatttaatcaaacctgcaatttaaataagcccccaataataataggctgaaagcttgtcaggctgtgttggctctggttcattttacatggattatgacaatggaaccactaagcgtggccctttaagtgcttttgcccattagcttcatcaagtaattgcaggcttggcggcatcaataacaacaaaagttgacactttgggaaagagaagtgaatctttccccttccagatctggcaggaaagaaaagtg

SEQ ID NO: 16941 - DNA, 1719 bp, Homo sapiens
  misc_feature (2)..(2): n is a, c, g, or t
  misc_feature (6)..(6): n is a, c, g, or t
  misc_feature (8)..(10): n is a, c, g, or t
cntcgngnnngtggaaagttgattattcaaagcatctctgatggctactgcttgaatgtccttactgcaggggctccagtcttttgggggctgcatctgcactgcagagggctggctcggacatctgtggatttcagtcaacagaggagagattggaagaagcatgtttctttcagagtagatagtggattcactgaatccccccgccactagtaaatctcttctagtaagccatttgcatccttttttgttggtttttaatccttgcggagttctcagcgatgctacgagcaatgtgcttgcacttaaggtgatggactgtaaatgcctgaaaaaggaagaagcagttgtcaaagcaaattaattattaatgtttatagttttcctgtcttaagggttttcagaatctcagttgttcagtgtttgaagctgtaatgtctccaactgtaattactcagtgaatgggaggcagtgtgattgtcacccacaagcatccccaccaggaatggatgagtcgtgaccctttggagaggcaagtggagcttttaccttgagagccattcgtcctgccagggtcaggcagtgggaggaggcaggaaaagggcttgttgctctgaaaataagaccatctcccaaaccaccctacaccctacttcttccaggtgggaaagacccacagggtttcaggagagtccactgggaatgacttccttgaaatggaggttcagtcctttcaagttctgagctgtgagtgggggtggctatgggaggaaatcactttgcacagggtttgatgcgacacttctgggaagcttatgaattccgtaggagtgggcatgaagttgtaagcacgaaggacctgtaatacttcagaggagatgaaggaaggagtctggccatgttggagccatagagggaatctggggtttatataatgaatatttctgggtttttgtttttatctgcttttgtttgattttgcttttactttgggagctaagtattttttttatcttgacagatatgttttttcccccttagagtaatatatattcatggattaaaactaaagacaaaaaaaatctctgcagataaacagaaatgcccaccatggctttgaccccagtacctggagataaacatggctgccccatttcctctctctattcatatagctgaagatattaacatacattgcaatcaacattactgtttgctttttgcgttgaacaatataaactcagaattcgttcagagacttcatgtgctccagcatgtaattttcaggggctctagagtagtctacagtgcaaatatcaataatgtgcttaattaggccaccactgctggactttcaggcttactccaacttttctctattataaacagcatgtaaatggacatatttaaagccttgtgaacattaatctccattcacatctttcagtaaaattctgtgataaagaagaactactgagtttttaatatggctacttttattgttttcctgtgtgttgccaaatcactctcctgaatgttagaaaatcaggtttcattccttgtttacataacgtgttctttctaaataaacatttgcagttgattttcagtcaacaaattgcttttattactttaatgtctatgaaataagaccattccagtatccttaccttacagaaatgacagcaacaacagcaaatatgagtaaagaaaaaaaat

SEQ ID NO: 16942 - DNA, 488 bp, Homo sapiens
gaagccctatttaaagctgggaatataggccaaataatccatggtggcagctaacaaggagttaagagctgccagttttaaggtaggcatggtgttggtcttttgtgccatgaaaagaggttggtactctcttagaaaccctaagcaaaaatataggtggacctggagtatccttttctagccaaggcggcccaggatatgtgaaaattacctatttctttgattcttaagtctactcctaacccactagttaactgattttcagttgtaaggaactaagatgtaaggaatgaagttggacaccatttctctctgcacttaagggtatggaattgattttattcgagaatgaactgttgctgggtgtggtggcttatgcctgtaatcccaatactttgggaggctgaggtgggaggactgcttgaggccagcagttaaagaccagcctgggcaatacagcaagaccccatctgtggaaaacaaacaaa

SEQ ID NO: 16943 - DNA, 306 bp, Homo sapiens
ataaatctcaccagactgatggttttataaaaaggcagttccctcgcacatgctctcttgcctgccaccatgtaagatgcacctttgatcctcctttgtctttggccatgattgtgaggcctccccagccatgtggaactgagtcccctaaacctctttttctttataaattacccagtctcgggtatctcttcataacagtatgaaaatggactgacacagcgatgctgacaacaccgtgtgcgctacgtcaatggactgacacagcgatgctgacaacaccgtgtgcgctacgtcaatggactg

SEQ ID NO: 16944 - DNA, 136 bp, Homo sapiens
tgctttttcttttccgtcgaggaagagagaaagaaataaacatccatttgagagaagtcactggctttggtctaggtttgcccatgaatggccctcaataaaactatgtctgctttaggagaaacgactaaggaac

SEQ ID NO: 16945 - DNA, 990 bp, Homo sapiens
  misc_feature (957)..(957): n is a, c, g, or t
tgtctggtgaaaagaatcatcaaccaagtaaacacaactgatattttttttgggaaaaagtgcaatacttctggcagaaaatgtcctgattcataaaaaggtcaaacaatatcatggcagtcaaaatcagatcatttaaatgaggaaaaaattagggatatacattcaacaaaacagtcatagaccatggaaacagaaagtccctaaaaatgttaataatgttgatttttattgttttaccctttgttttccattttatgcaaccaagattttcccttgcaccttagaatgctttctttaaaatgtccttgctctcttaattttctgagttgctactttctcattttccttgctgattataaaacaactgaaggataagaaacacatgtttttctataactgtttttaattaaatgtttggtaaactgaaatgattgtaattactcttttgttatcttcaagaatctactcaagcttcctcagtttctcaaatcattcttgggcaacaaatgaacaagaaagaggacgtcttattatctggtgtctggcttgctgatttaataacctagaagacagtgtttgaagaacacaaactctaaagtccttcacttaaaaaaaaaaaactttcccaaattgcttaccatttggaaaaattgccttaccttcttcagtcatctctgatgttgtcatcctcagagtaagaagtacgcattcataaggaaccataacgtccttcaggaaatccagtacaccctacaattttacctaaaactttgatgttgttttttctgagcattttaccttctagggaaatggatctcatgctgtttatcagtttctgaaagttgttattaatctcccctcatcccaaaattgaagaactttgcttaaatcttagaatcagaactttggctccagtaataaagacttttcaatatctttatctgccattgagtnttacctaacgaaataaagcctccaaagtgggaa

SEQ ID NO: 16946 - DNA, 1054 bp, Homo sapiens
  misc_feature (1021)..(1021): n is a, c, g, or t
aagcagtggttcaaacgcagagtggccattcccctgcctcagcctccggagtagctgggactacaggcgcctgccactgcgcccggctaatttgacattgctcttaaaagtatgttagaacacttccttattcttcatgcatccatagagaaaaggaaaagtcttcttaactctccggaagaattaatcagaggagcatttctaacttctttccacccactcactcactctccttccactgaccattgaaaatgggggaagaaaaaagaattattgatcaaatttggatctctgtgtgctgtcctccaatttaatactttctgtgttgctgttttattttctttcttctggaacctggcaaagtgcgtcaagcgatgaggcttcctctttgaagatcacaggtgagaagattaggtgctttctcagaagcccagcaacctgatgggagtgtggagtgagcaagacccaaatcggagcttcatccctgcatggttcattttgcttatttggcaaacttgccctgcagaatctactcaagcttcctcagtttctcaaatcattcttgggcaacaaatgaacaagaaagaggacgtcttattatctggtgtctggcttgctgatttaataacctagaagacagtgtttgaagaacacaaactctaaagtccttcacttaaaaaaaaaaaactttcccaaattgcttaccatttggaaaaattgccttaccttcttcagtcatctctgatgttgtcatcctcagagtaagaagtacgcattcataaggaaccataacgtccttcaggaaatccagtacaccctacaattttacctaaaactttgatgttgttttttctgagcattttaccttctagggaaatggatctcatgctgtttatcagtttctgaaagttgttattaatctcccctcatcccaaaattgaagaactttgcttaaatcttagaatcagaactttggctccagtaataaagacttttcaatatctttatctgccattgagtnttacctaacgaaataaagcctccaaagtgggaa

SEQ ID NO: 16947 - DNA, 815 bp, Homo sapiens
  misc_feature (782)..(782): n is a, c, g, or t
cagactactcctgcaggacctgcgagataccccgaatacttggttggactgagtcccatgaagccagatcacttctgactgcaaggagcttggaaaagcaagtatctggatcttttaccagctaaatttggagcgatgaggcttcctctttgaagatcacaggtgagaagattaggtgctttctcagaagcccagcaacctgatgggagtgtggagtgagcaagacccaaatcggagcttcatccctgcatggttcattttgcttatttggcaaacttgccctgcagaatctactcaagcttcctcagtttctcaaatcattcttgggcaacaaatgaacaagaaagaggacgtcttattatctggtgtctggcttgctgatttaataacctagaagacagtgtttgaagaacacaaactctaaagtccttcacttaaaaaaaaaaaactttcccaaattgcttaccatttggaaaaattgccttaccttcttcagtcatctctgatgttgtcatcctcagagtaagaagtacgcattcataaggaaccataacgtccttcaggaaatccagtacaccctacaattttacctaaaactttgatgttgttttttctgagcattttaccttctagggaaatggatctcatgctgtttatcagtttctgaaagttgttattaatctcccctcatcccaaaattgaagaactttgcttaaatcttagaatcagaactttggctccagtaataaagacttttcaatatctttatctgccattgagtnttacctaacgaaataaagcctccaaagtgggaa

SEQ ID NO: 16948 - DNA, 680 bp, Homo sapiens
agcggtggaaggatatggtggctgaaataaggcatgaggcacagatacagatttcctgactcaacttctggtgcagataacattgttatactacacatatttataatgcccttttggtggttggactgagtcccatgaagccagatcacttctgactgcaaggagcttggaaaagcaagtatctggatcttttaccagctaaatttggaggcttggccttgggacctgcttaaaccaagagatatgccacatctgagcagttcttttccttgtggcccctgccatgagagcagcgtgtacaaggtggatgctgctccattagcgtggatcctgggatgagaagactcagggagcaggctctgccaacccacagtctacagcagagccacagccagcagtagtcctcattcaacaggagggggaaaaaactgctcgtcatccttagctctgagatttgggggttgttatcacagaagatactgtctcatagaagtttttaatatgactgctactacaacaactattgctataatgtttacagcaatcattgctactttacgttccaacagtattattgcttgcaaggggctatcaaatagatgatcttgttggaaactcacagctacaagggcaggtgaggaagctgaagtaatgagtaggagaagttaatgaattatccc

SEQ ID NO: 16949 - DNA, 694 bp, Homo sapiens
cttgaagctctgtcacggcataatctcttataaataaatgtcagtgtagtcactgaatgcagactggatttttgcctgactacggtgctcagccttctagacaatagttatgctaagggattatcttttaacattgtgcagttatctcctttgtttgttttcttttttcattattcacataagccaagggaaatgaaaagcatcttatttcaggcaaaaaggcctgtgaatgattaactctggttccatgcgttgggactttgcatagcaaccccgtggcttgcaacgacaaaaaagctcaaggcaggaacagcagcccagggacctgagaccagcgttctcaaatgaaggccagatctgctgttagaggagaattcttctgtcctagctgtgtctctgtgatctgtggatgagggtgggaaagcaccactcagtcaattggggtgtacaaaatggagtttgagaaggtctcacatccaggttgttttgaagcaaagtccaagcattgtatcacttcatctgcaaatatttcaataagtacccaaaagtggttggactgagtcccatgaagccagatcacttctgactgcaaggagcttggaaaagcaagtatctggatcttttaccagctaaatttggaggaatgagaagaccatcctggataacacagagagaccctgtatctaccaaaaaa

SEQ ID NO: 16950 - DNA, 394 bp, Homo sapiens
cttaactcgttcagaaaaatgcagcttttgataaaattttgaacctaaaaattggagattgggctaccttcaattatttttcaaaaacacccactaatacatgattgggtggttggagatggtctgagagatggatttttcctgacatagaaaatcagctaatattctcttgaatcatacctatgtaggtgaagccagatttctcgtttaaataatctttggttagtgtgaggtgcagcccatttctgaaaggttaggagtcagcttttgttagctgagcttagttcattgattccatactttcatttagaagttccttttcttctcaatttgtattttaggaatgagaagaccatcctggataacacagagagaccctgtatctaccaaaaaa

SEQ ID NO: 16951 - DNA, 1419 bp, Homo sapiens
  misc_feature (1386)..(1386): n is a, c, g, or t
tcgtagagacggggtttcactgtgttagccaggatggtcttgatctcctgacctcgtgatccgcctgccttggcctcccaaagtgttgggattacaggtgtgagccaccgcgcccggtcgagttttcttctttaatctggtgttgatcctgagagtgctttgttaaaaaacattctccatgctgacctccgttttcgagtccgcttcctggggaaacctgaaacaggacttgatgctagcagctgcccagaagaaccagatgggccactgtccttgccagaagatctgatatcctgtgtatggccaccacctaacactgctcacttctacatgtaaacctcagccagatctgctgttagaggagaattcttctgtcctagctgtgtctctgtgatctgtggatgagggtgggaaagcaccactcagtcaattggggtgtacaaaatggagtttgagaaggtctcacatccaggttgttttgaagcaaagtccaagcattgtatcacttcatctgcaaatatttcaataagtacccaaaagtggttggactgagtcccatgaagccagatcacttctgactgcaaggagcttggaaaagcaagtatctggatcttttaccagctaaatttggagaattattgatcaaatttggatctctgtgtgctgtcctccaatttaatactttctgtgttgctgttttattttctttcttctggaacctggcaaagtgcgtcaagcgatgaggcttcctctttgaagatcacaggtgagaagattaggtgctttctcagaagcccagcaacctgatgggagtgtggagtgagcaagacccaaatcggagcttcatccctgcatggttcattttgcttatttggcaaacttgccctgcagaatctactcaagcttcctcagtttctcaaatcattcttgggcaacaaatgaacaagaaagaggacgtcttattatctggtgtctggcttgctgatttaataacctagaagacagtgtttgaagaacacaaactctaaagtccttcacttaaaaaaaaaaaactttcccaaattgcttaccatttggaaaaattgccttaccttcttcagtcatctctgatgttgtcatcctcagagtaagaagtacgcattcataaggaaccataacgtccttcaggaaatccagtacaccctacaattttacctaaaactttgatgttgttttttctgagcattttaccttctagggaaatggatctcatgctgtttatcagtttctgaaagttgttattaatctcccctcatcccaaaattgaagaactttgcttaaatcttagaatcagaactttggctccagtaataaagacttttcaatatctttatctgccattgagtnttacctaacgaaataaagcctccaaagtgggaa

SEQ ID NO: 16952 - DNA, 1427 bp, Homo sapiens
  misc_feature (1394)..(1394): n is a, c, g, or t
cttgaagctctgtcacggcataatctcttataaataaatgtcagtgtagtcactgaatgcagactggatttttgcctgactacggtgctcagccttctagacaatagttatgctaagggattatcttttaacattgtgcagttatctcctttgtttgttttcttttttcattattcacataagccaagggaaatgaaaagcatcttatttcaggcaaaaaggcctgtgaatgattaactctggttccatgcgttgggactttgcatagcaaccccgtggcttgcaacgacaaaaaagctcaaggcaggaacagcagcccagggacctgagaccagcgttctcaaatgaaggccagatctgctgttagaggagaattcttctgtcctagctgtgtctctgtgatctgtggatgagggtgggaaagcaccactcagtcaattggggtgtacaaaatggagtttgagaaggtctcacatccaggttgttttgaagcaaagtccaagcattgtatcacttcatctgcaaatatttcaataagtacccaaaagtggttggactgagtcccatgaagccagatcacttctgactgcaaggagcttggaaaagcaagtatctggatcttttaccagctaaatttggagaattattgatcaaatttggatctctgtgtgctgtcctccaatttaatactttctgtgttgctgttttattttctttcttctggaacctggcaaagtgcgtcaagcgatgaggcttcctctttgaagatcacaggtgagaagattaggtgctttctcagaagcccagcaacctgatgggagtgtggagtgagcaagacccaaatcggagcttcatccctgcatggttcattttgcttatttggcaaacttgccctgcagaatctactcaagcttcctcagtttctcaaatcattcttgggcaacaaatgaacaagaaagaggacgtcttattatctggtgtctggcttgctgatttaataacctagaagacagtgtttgaagaacacaaactctaaagtccttcacttaaaaaaaaaaaactttcccaaattgcttaccatttggaaaaattgccttaccttcttcagtcatctctgatgttgtcatcctcagagtaagaagtacgcattcataaggaaccataacgtccttcaggaaatccagtacaccctacaattttacctaaaactttgatgttgttttttctgagcattttaccttctagggaaatggatctcatgctgtttatcagtttctgaaagttgttattaatctcccctcatcccaaaattgaagaactttgcttaaatcttagaatcagaactttggctccagtaataaagacttttcaatatctttatctgccattgagtnttacctaacgaaataaagcctccaaagtgggaa

SEQ ID NO: 16953 - DNA, 737 bp, Homo sapiens
tcgtagagacggggtttcactgtgttagccaggatggtcttgatctcctgacctcgtgatccgcctgccttggcctcccaaagtgttgggattacaggtgtgagccaccgcgcccggtcgagttttcttctttaatctggtgttgatcctgagagtgctttgttaaaaaacattctccatgctgacctccgttttcgagtccgcttcctggggaaacctgaaacaggacttgatgctagcagctgcccagaagaaccagatgggccactgtccttgccagaagatctgatatcctgtgtatggccaccacctaacactgctcacttctacatgtaaacctcagccagatctgctgttagaggagaattcttctgtcctagctgtgtctctgtgatctgtggatgagggtgggaaagcaccactcagtcaattggggtgtacaaaatggagtttgagaaggtctcacatccaggttgttttgaagcaaagtccaagcattgtatcacttcatctgcaaatatttcaataagtacccaaaagacttcctaggatagagcttggaaaggttggaaaagtaaggatgattgaacttgaaaggtgtgaatgaaagaagaattatcttttgggatggagaatagtagctgttttcaaagaagattttattttatctttcatttttggcctataagttttgcagagaatctgtgattagagtatttagtaaagtactatgtaat

SEQ ID NO: 16954 - DNA, 274 bp, Homo sapiens
ctctgaggtgcaggcattcactaggacttcacccgtggtatgttactgaaactccggggagccaactgctggagcatttatgagacacactatgccaccatccggggcttcagcagcgtttggtgaaaacctgcctgtggggttgctgttgaatttgctggagagctgactgaggtgctagcagaactcctcaggaaatcaccaggaggagcatccctgggtgccccatgcaccagtcaagagcaggagcaagaggaaaggaaggtagcctctt

SEQ ID NO: 16955 - DNA, 757 bp, Homo sapiens
gaatctaatctaatcacctcattttatagttgaggaaaataccccaggtcacactgctaattaatgggtaatctcgggatcagaattcttgtttcctaacctcgaggcctgtgctttctctggttccactgatgtacaatcatctgtgtaccactgggtagcttaaagaatatttatacactatctcatttgattctcacaacagtcctggaaaatggatgttttaggtatttctacttccctctgttctccctatttctctctctacaccctcttttctttccccttccctttcttatttacctcaatataggacaaagtaggtgtaagcaaagtaggtttaacagcaagtcatctgagaactcacaggttgccagtggtggaagtggggccccacccttgtctgctgacttgccctcattctcttcctagctccccatactttcttactgtggctgctgggattgtcatgatttgttgagcgtaaccatttgacagggttttattctctctcttcagctgagagtgccacatattgtcttgtgaagaatgctgtgaaaatgtttaaggatattggggtaggtgtccaccatttatggtataaaagctatctcaacttctgttctctttagatctagtctgtttgagctacctttgtggtggggtggaccccgagagaagcagtttctgctggcttaatgataaaggcatttttgggaacggggcatgtaggatgggttgggctatgttgaaggtg

SEQ ID NO: 16956 - DNA, 6374 bp, Homo sapiens
cactgcagctggcattggccgggactggaagtgcgggcttctgcagcagccgaagctggagctgctagggcagcagcggctcccctgttgtatggacattctgcacccgaaactgatagctgagtcctgaagttttatgttatgaaacagaagaactttcatcccagcacatgatttgggaattacactttgtgacatggatgaatctgcactgacccttggtacaatagatgtttcttatctgccacattcatcagaatacagtgttggtcgatgtaagcacacaagtgaggaatggggtgagtgtggctttagacccaccatcttcagatctgcaactttaaaatggaaagaaagcctaatgagtcggaaaaggccatttgttggaagatgttgttactcctgcactccccagagctgggacaaatttttcaaccccagtatcccgtctttgggtttgcggaatgttatttatatcaatgaaactcacacaagacaccgcggatggcttgcaagacgcctttcttacgttctttttattcaagagcgagatgtgcataagggcatgtttgccaccaatgtgactgaaaatgtgctgaacagcagtagagtacaagaggcaattgcagaagtggctgctgaattaaaccctgatggttctgcccagcagcaatcaaaagccgttaacaaagtgaaaaagaaagctaaaaggattcttcaagaaatggttgccactgtctcaccggcaatgatcagactgactgggtgggtgctgctaaaactgttcaacagcttcttttggaacattcaaattcacaaaggtcaacttgagatggttaaagctgcaactgagacgaatttgccgcttctgtttctaccagttcatagatcccatattgactatctgctgctcactttcattctcttctgccataacatcaaagcaccatacattgcttcaggcaataatctcaacatcccaatcttcagtaccttgatccataagcttgggggcttcttcatacgacgaaggctcgatgaaacaccagatggacggaaagatgttctctatagagctttgctccatgggcatatagttgaattacttcgacagcagcaattcttggagatcttcctggaaggcacacgttctaggagtggaaaaacctcttgtgctcgggcaggacttttgtcagttgtggtagatactctgtctaccaatgtcatcccagacatcttgataatacctgttggaatctcctatgatcgcattatcgaaggtcactacaatggtgaacaactgggcaaacctaagaagaatgagagcctgtggagtgtagcaagaggtgttattagaatgttacgaaaaaactatggttgtgtccgagtggattttgcacagccattttccttaaaggaatatttagaaagccaaagtcagaaaccggtgtctgctctactttccctggagcaagcgttgttaccagctatacttccttcaagacccagtgatgctgctgatgaaggtagagacacgtccattaatgagtccagaaatgcaacagatgaatccctacgaaggaggttgattgcaaatctggctgagcatattctattcactgctagcaagtcctgtgccattatgtccacacacattgtggcttgcctgctcctctacagacacaggcagggaattgatctctccacattggtcgaagacttctttgtgatgaaagaggaagtcctggctcgtgattttgacctggggttctcaggaaattcagaagatgtagtaatgcatgccatacagctgctgggaaattgtgtcacaatcacccacactagcaggaacgatgagttttttatcacccccagcacaactgtcccatcagtcttcgaactcaacttctacagcaatggggtacttcatgtctttatcatggaggccatcatagcttgcagcctttatgcagttctgaacaagaggggactggggggtcccactagcaccccacctaacctgatcagccaggagcagctggtgcggaaggcggccagcctgtgctaccttctctccaatgaaggcaccatctcactgccttgccagacattttaccaagtctgccatgaaacagtaggaaagtttatccagtatggcattcttacagtggcagagcacgatgaccaggaagatatcagtcctagtcttgctgagcagcagtgggacaagaagcttcctgaacctttgtcttggagaagtgatgaagaagatgaagacagtgactttggggaggaacagcgagattgctacctgaaggtgagccaatccaaggagcaccagcagtttatcaccttcttacagagactccttgggcctttgctggaggcctacagctctgctgccatctttgttcacaacttcagtggtcctgttccagaacctgagtatctgcaaaagttgcacaaatacctaataaccagaacagaaagaaatgttgcagtatatgctgagagtgccacatattgtcttgtgaagaatgctgtgaaaatgtttaaggatattggggttttcaaggagaccaaacaaaagagagtgtctgttttagaactgagcagcacttttctacctcaatgcaaccgacaaaaacttctagaatatattctgagttttgtggtgctgtaggtaacgtgtggcactgctggcaaatgaaggtcatgagatgagttccttgtaggtaccagcttctggctcaagagttgaaggtgccgtcgcagggtcaggcctgccctgtcccgaagtgatctcctggaagacaagtgccttctccctccatggatctgtgatcttcccagctctgcatcaacacagcagcctgcagataacacttggggggacctcagcctctattcgcaactcataatccgtagactacaagatgaaatctcaataaattatttttgagtttattaaagattgacattttaagtacaacttttaaggactaattactgtgatggacacagaaatgtagctgtgttctggaactgaatcttacatggtatacttagtgctgctgggtaatttgttggtatattatctggttagtggttaatgcttcctttaaaaataattgagtcatccattcactctttttcagttttatctgtcaatagtagctacatttttaatgggagcaccttttatcccaaagtgctttataaattgagtggactgatatatatcacacccaggtatcactgtgctgtcctttgctgtcagatttagaaatgtttttaagagctatgtgaaaacagacaatattagtttaggtcgggaactgagatattgtaatcaaatagttaacatcaggaagttaatttggctggcaaaattctagggaaacttggccagaaaactggtgttgaaggcttttgctcatataaacaagtgccattgagtttcaaatgaccagcaaatatatttagaacccttcctgttttatgtctgtacctcgtccacccctcaggtaatacctgcctctcacaggtacagctgtttcttggaaatcctccaaccaaatagcagttttcctaacttgattagcttgagctgacagactgttagaatacagttctctggccacagctgatgagggctttctgtactgcacacagattgtgtactgcaccccagtccaggtgactggtacccactcgagttgtgccgtgcacaacctgtccagtatatgcatgtggtggccctactgactggtaatggttagaggcatttatggatttttagctttgaggaaaaaccatgacttttaacaaatttttatgggttatatgcctaaacccttatgccacatagtggtaaataattatgaaaaatggtctgttcataattggtaggtgccttttgtgagcagggagcataattattggtttattatggtaattatggtgattttttaaatatcatgtaatgttaaaacgttttctaacagtttactgttgcttatctccaagatattatggaattaagaatttttccagatgagtgttacatagattctttgaatttagtataaaagtactgagaattaagtttgtacttccataagcttggattttaaacactgatagtatctcatgagtaatgtgtgttttgggagagggagggatgctgattgatatttcacattgtatgaaataccatgtttgaaactcatagcaataatgctatgctgttgtgatccctctcaagttctgcatttaaaatatattttttctttataggaattgatgtataccatgaagtcattgtcagttgtagtagctctgatgttgaatgagatatcatgttttagcattccattttactgactagggtagaagaacacttttcttggctacatttggaggatacccagggagtcttgggtgttccttatctggggaagcaaacatttcactagtctctttttttcatcctttaaattgtaaattaaggattactcaagctcaccattattcaagattgggactcgcttcccagtcgacactctgccctgcctgtcattgctgcaaagagctgctgctttgccaacctaagcaaagaaaatacggcttctcttgcattattttcccttttggttggtttgttttctagaagtacgttcagatgctttggggaatgcaatgtatgatttgctagctctctcaccacttaactcactgtgaggataaatatgcatgctttttgtaattaactggtgctttgaaaatcttttttaagggagaaaaatctcaaccaaagttatgctcatccagacaagctgacctttgagttaatttcagcacaactcattcttcagtgcctcatgactgaaaacaaaaaacaaaaaaacgaaagcatcttcacaatgaagcttccagatagcaccgttttgctaaaagatacattctcattgttttccaacagtgatggcttccacataaggttaaacaaactaggtgcttgtaaataatttattacagtttactctatcgcatttctgtaacatgaaatgcatgcccttcttcaggggaagactgtggtcaagttaaaaaaaaaaaacaatattaaacaacatgaaactgcagtctgtttttgaaaatgagaatgtcctaagtgattcagaagagaggagggaagttgtgcactctgaaaatgcatgaaaaacaaaggcaaaaactagtgggaaatgtgtagaactgttaactgagatggcttcgagtcttccttctggaatctgttaaatttcacaaagtcatgagggtaaatggagaaaatatttctgggattacaatgaatgtaagcccaaattgtggaattgccagtaacctggatggggaaaagcatttcccatagcactccatgtaatatgagtgctctgtgagatgttcatcagtgttttatagaaatggtgttgctgggaaaccaagtttgcacctggaaacttacaatgcactttagcgcagtaagggcttggcatccggtagtgaaaaactgtctaacccagcattgcccaaactattttgacaccaggacctttttctcctttgggatacttatgaacctctcactaatgtcctgtggagaacattttgggaaacactatgttagatagttctttaaggagacaaaacggtaatgaacagatagcactggggcagaatatgcatgcattttgtaacgtccagtgtggcgttgaatagatgtgtatttcctcccctgcagaaaataagcacagaaaattataatgtaggtgatcggagctctttcctttgatagagagaacagccccaatgatcctggctttttcactgaacgtatcagaatacatggatgaattggggtaaataaggttttaattcagatctagaagaaagtattgtacgtttgaatgcagatttttatccacagatagttgtagtgtttagacatgacaggacctatcgttgaggtttctaagacttactatgggctgtaaacctgttttttaaaactattttagaaacctgagacttgccgtctggcattttagtttaatacaaactaatgattgcatttgaaagagattcttgaccttatttctaaacgtctagagctctgaaatgtcttgatggaaggtattaaactatttgcctgttgtacaaagaaatgttaagactcgtgaaaagaattactataaggtactgtgaaataactgcgattttgtgagcaaaacatacttggaaatgctgattgatttttatgcttgttagtgtattgcaagaaacacagaaaatgtagttttgttttaataaaccaaaaattgaacataaaaatg

SEQ ID NO: 16957 - DNA, 6383 bp, Homo sapiens
cagaggggaagatacgatgcaaaaccaaggaaatcaatacttttgttttagtattgagtggaaaagaatgtttttacggcagcagcggctcccctgttgtatggacattctgcacccgaaactgatagctgagtcctgaagttttatgttatgaaacagaagaactttcatcccagcacatgatttgggaattacactttgtgacatggatgaatctgcactgacccttggtacaatagatgtttcttatctgccacattcatcagaatacagtgttggtcgatgtaagcacacaagtgaggaatggggtgagtgtggctttagacccaccatcttcagatctgcaactttaaaatggaaagaaagcctaatgagtcggaaaaggccatttgttggaagatgttgttactcctgcactccccagagctgggacaaatttttcaaccccagtatcccgtctttgggtttgcggaatgttatttatatcaatgaaactcacacaagacaccgcggatggcttgcaagacgcctttcttacgttctttttattcaagagcgagatgtgcataagggcatgtttgccaccaatgtgactgaaaatgtgctgaacagcagtagagtacaagaggcaattgcagaagtggctgctgaattaaaccctgatggttctgcccagcagcaatcaaaagccgttaacaaagtgaaaaagaaagctaaaaggattcttcaagaaatggttgccactgtctcaccggcaatgatcagactgactgggtgggtgctgctaaaactgttcaacagcttcttttggaacattcaaattcacaaaggtcaacttgagatggttaaagctgcaactgagacgaatttgccgcttctgtttctaccagttcatagatcccatattgactatctgctgctcactttcattctcttctgccataacatcaaagcaccatacattgcttcaggcaataatctcaacatcccaatcttcagtaccttgatccataagcttgggggcttcttcatacgacgaaggctcgatgaaacaccagatggacggaaagatgttctctatagagctttgctccatgggcatatagttgaattacttcgacagcagcaattcttggagatcttcctggaaggcacacgttctaggagtggaaaaacctcttgtgctcgggcaggacttttgtcagttgtggtagatactctgtctaccaatgtcatcccagacatcttgataatacctgttggaatctcctatgatcgcattatcgaaggtcactacaatggtgaacaactgggcaaacctaagaagaatgagagcctgtggagtgtagcaagaggtgttattagaatgttacgaaaaaactatggttgtgtccgagtggattttgcacagccattttccttaaaggaatatttagaaagccaaagtcagaaaccggtgtctgctctactttccctggagcaagcgttgttaccagctatacttccttcaagacccagtgatgctgctgatgaaggtagagacacgtccattaatgagtccagaaatgcaacagatgaatccctacgaaggaggttgattgcaaatctggctgagcatattctattcactgctagcaagtcctgtgccattatgtccacacacattgtggcttgcctgctcctctacagacacaggcagggaattgatctctccacattggtcgaagacttctttgtgatgaaagaggaagtcctggctcgtgattttgacctggggttctcaggaaattcagaagatgtagtaatgcatgccatacagctgctgggaaattgtgtcacaatcacccacactagcaggaacgatgagttttttatcacccccagcacaactgtcccatcagtcttcgaactcaacttctacagcaatggggtacttcatgtctttatcatggaggccatcatagcttgcagcctttatgcagttctgaacaagaggggactggggggtcccactagcaccccacctaacctgatcagccaggagcagctggtgcggaaggcggccagcctgtgctaccttctctccaatgaaggcaccatctcactgccttgccagacattttaccaagtctgccatgaaacagtaggaaagtttatccagtatggcattcttacagtggcagagcacgatgaccaggaagatatcagtcctagtcttgctgagcagcagtgggacaagaagcttcctgaacctttgtcttggagaagtgatgaagaagatgaagacagtgactttggggaggaacagcgagattgctacctgaaggtgagccaatccaaggagcaccagcagtttatcaccttcttacagagactccttgggcctttgctggaggcctacagctctgctgccatctttgttcacaacttcagtggtcctgttccagaacctgagtatctgcaaaagttgcacaaatacctaataaccagaacagaaagaaatgttgcagtatatgctgagagtgccacatattgtcttgtgaagaatgctgtgaaaatgtttaaggatattggggttttcaaggagaccaaacaaaagagagtgtctgttttagaactgagcagcacttttctacctcaatgcaaccgacaaaaacttctagaatatattctgagttttgtggtgctgtaggtaacgtgtggcactgctggcaaatgaaggtcatgagatgagttccttgtaggtaccagcttctggctcaagagttgaaggtgccgtcgcagggtcaggcctgccctgtcccgaagtgatctcctggaagacaagtgccttctccctccatggatctgtgatcttcccagctctgcatcaacacagcagcctgcagataacacttggggggacctcagcctctattcgcaactcataatccgtagactacaagatgaaatctcaataaattatttttgagtttattaaagattgacattttaagtacaacttttaaggactaattactgtgatggacacagaaatgtagctgtgttctggaactgaatcttacatggtatacttagtgctgctgggtaatttgttggtatattatctggttagtggttaatgcttcctttaaaaataattgagtcatccattcactctttttcagttttatctgtcaatagtagctacatttttaatgggagcaccttttatcccaaagtgctttataaattgagtggactgatatatatcacacccaggtatcactgtgctgtcctttgctgtcagatttagaaatgtttttaagagctatgtgaaaacagacaatattagtttaggtcgggaactgagatattgtaatcaaatagttaacatcaggaagttaatttggctggcaaaattctagggaaacttggccagaaaactggtgttgaaggcttttgctcatataaacaagtgccattgagtttcaaatgaccagcaaatatatttagaacccttcctgttttatgtctgtacctcgtccacccctcaggtaatacctgcctctcacaggtacagctgtttcttggaaatcctccaaccaaatagcagttttcctaacttgattagcttgagctgacagactgttagaatacagttctctggccacagctgatgagggctttctgtactgcacacagattgtgtactgcaccccagtccaggtgactggtacccactcgagttgtgccgtgcacaacctgtccagtatatgcatgtggtggccctactgactggtaatggttagaggcatttatggatttttagctttgaggaaaaaccatgacttttaacaaatttttatgggttatatgcctaaacccttatgccacatagtggtaaataattatgaaaaatggtctgttcataattggtaggtgccttttgtgagcagggagcataattattggtttattatggtaattatggtgattttttaaatatcatgtaatgttaaaacgttttctaacagtttactgttgcttatctccaagatattatggaattaagaatttttccagatgagtgttacatagattctttgaatttagtataaaagtactgagaattaagtttgtacttccataagcttggattttaaacactgatagtatctcatgagtaatgtgtgttttgggagagggagggatgctgattgatatttcacattgtatgaaataccatgtttgaaactcatagcaataatgctatgctgttgtgatccctctcaagttctgcatttaaaatatattttttctttataggaattgatgtataccatgaagtcattgtcagttgtagtagctctgatgttgaatgagatatcatgttttagcattccattttactgactagggtagaagaacacttttcttggctacatttggaggatacccagggagtcttgggtgttccttatctggggaagcaaacatttcactagtctctttttttcatcctttaaattgtaaattaaggattactcaagctcaccattattcaagattgggactcgcttcccagtcgacactctgccctgcctgtcattgctgcaaagagctgctgctttgccaacctaagcaaagaaaatacggcttctcttgcattattttcccttttggttggtttgttttctagaagtacgttcagatgctttggggaatgcaatgtatgatttgctagctctctcaccacttaactcactgtgaggataaatatgcatgctttttgtaattaactggtgctttgaaaatcttttttaagggagaaaaatctcaaccaaagttatgctcatccagacaagctgacctttgagttaatttcagcacaactcattcttcagtgcctcatgactgaaaacaaaaaacaaaaaaacgaaagcatcttcacaatgaagcttccagatagcaccgttttgctaaaagatacattctcattgttttccaacagtgatggcttccacataaggttaaacaaactaggtgcttgtaaataatttattacagtttactctatcgcatttctgtaacatgaaatgcatgcccttcttcaggggaagactgtggtcaagttaaaaaaaaaaaacaatattaaacaacatgaaactgcagtctgtttttgaaaatgagaatgtcctaagtgattcagaagagaggagggaagttgtgcactctgaaaatgcatgaaaaacaaaggcaaaaactagtgggaaatgtgtagaactgttaactgagatggcttcgagtcttccttctggaatctgttaaatttcacaaagtcatgagggtaaatggagaaaatatttctgggattacaatgaatgtaagcccaaattgtggaattgccagtaacctggatggggaaaagcatttcccatagcactccatgtaatatgagtgctctgtgagatgttcatcagtgttttatagaaatggtgttgctgggaaaccaagtttgcacctggaaacttacaatgcactttagcgcagtaagggcttggcatccggtagtgaaaaactgtctaacccagcattgcccaaactattttgacaccaggacctttttctcctttgggatacttatgaacctctcactaatgtcctgtggagaacattttgggaaacactatgttagatagttctttaaggagacaaaacggtaatgaacagatagcactggggcagaatatgcatgcattttgtaacgtccagtgtggcgttgaatagatgtgtatttcctcccctgcagaaaataagcacagaaaattataatgtaggtgatcggagctctttcctttgatagagagaacagccccaatgatcctggctttttcactgaacgtatcagaatacatggatgaattggggtaaataaggttttaattcagatctagaagaaagtattgtacgtttgaatgcagatttttatccacagatagttgtagtgtttagacatgacaggacctatcgttgaggtttctaagacttactatgggctgtaaacctgttttttaaaactattttagaaacctgagacttgccgtctggcattttagtttaatacaaactaatgattgcatttgaaagagattcttgaccttatttctaaacgtctagagctctgaaatgtcttgatggaaggtattaaactatttgcctgttgtacaaagaaatgttaagactcgtgaaaagaattactataaggtactgtgaaataactgcgattttgtgagcaaaacatacttggaaatgctgattgatttttatgcttgttagtgtattgcaagaaacacagaaaatgtagttttgttttaataaaccaaaaattgaacataaaaatg

SEQ ID NO: 16958 - DNA, 6320 bp, Homo sapiens
cactgcagctggcattggccgggactggaagtgcgggcttctgcagcagccgaagctggagctgctagggcagcagcggctcccctgttgtatggacattctgcacccgaaactgatagctgagtcctgaagttttatgttatgaaacagaagaactttcatcccagcacatgatttgggaattacactttgtgacatggatgaatctgcactgacccttggtacaatagatgtttcttatctgccacattcatcagaatacagtgttggtcgatgtaagcacacaagtgaggaatggggtgagtgtggctttagacccaccatcttcagatctgcaactttaaaatggaaagaaagcctaatgagtcggaaaaggccatttgttggaagatgttgttactcctgcactccccagagctgggacaaatttttcaaccccagtatcccgtctttgggtttgcggaatgttatttatatcaatgaaactcacacaagacaccgcggatggcttgcaagacgcctttcttacgttctttttattcaagagcgagatgtgcataagggcatgtttgccaccaatgtgactgaaaatgtgctgaacagcagtagagtacaagaggcaattgcagaagtggctgctgaattaaaccctgatggttctgcccagcagcaatcaaaagccgttaacaaagtgaaaaagaaagctaaaaggattcttcaagaaatggttgccactgtctcaccggcaatgatcagactgactgggtgggtgctgctaaaactgttcaacagcttcttttggaacattcaaattcacaaaggtcaacttgagatggttaaagctgcaactgagacgaatttgccgcttctgtttctaccagttcatagatcccatattgactatctgctgctcactttcattctcttctgccataacatcaaagcaccatacattgcttcaggcaataatctcaacatcccaatcttcagtaccttgatccataagcttgggggcttcttcatacgacgaaggctcgatgaaacaccagatggacggaaagatgttctctatagagctttgctccatgggcatatagttgaattacttcgacagcagcaattcttggagatcttcctggaaggcacacgttctaggagtggaaaaacctcttgtgctcgggcaggacttttgtcagttgtggtagatactctgtctaccaatgtcatcccagacatcttgataatacctgttggaatctcctatgatcgcattatcgaaggtcactacaatggtgaacaactgggcaaacctaagaagaatgagagcctgtggagtgtagcaagaggtgttattagaatgttacgaaaaaactatggttgtgtccgagtggattttgcacagccattttccttaaaggaatatttagaaagccaaagtcagaaaccggtgtctgctctactttccctggagcaagcgttgttaccagctatacttccttcaagacccagtgatgctgctgatgaaggtagagacacgtccattaatgagtccagaaatgcaacagatgaatccctacgaaggaggttgattgcaaatctggctgagcatattctattcactgctagcaagtcctgtgccattatgtccacacacattgtggcttgcctgctcctctacagacacaggcagggaattgatctctccacattggtcgaagacttctttgtgatgaaagaggaagtcctggctcgtgattttgacctggggttctcaggaaattcagaagatgtagtaatgcatgccatacagctgctgggaaattgtgtcacaatcacccacactagcaggaacgatgagttttttatcacccccagcacaactgtcccatcagtcttcgaactcaacttctacagcaatggggtacttcatgtctttatcatggaggccatcatagcttgcagcctttatgcagttctgaacaagaggggactggggggtcccactagcaccccacctaacctgatcagccaggagcagctggtgcggaaggcggccagcctgtgctaccttctctccaatgaaggcaccatctcactgccttgccagacattttaccaagtctgccatgaaacagtaggaaagtttatccagtatggcattcttacagtggcagagcacgatgaccaggaagatatcagtcctagtcttgctgagcagcagtgggacaagaagcttcctgaacctttgtcttggagaagtgatgaagaagatgaagacagtgactttggggaggaacagcgagattgctacctgaaggtgagccaatccaaggagcaccagcagtttatcaccttcttacagagactccttgggcctttgctggaggcctacagctctgctgccatctttgttcacaacttcagtggtcctgttccagaacctgagtatctgcaaaagttgcacaaatacctaataaccagaacagaaagaaatgttgcagtatatgctgagagtgccacatattgtcttgtgaagaatgctgtgaaaatgtttaaggatattggggttttcaaggagaccaaacaaaagagagtgtctgttttagaactgagcagcacttttctacctcaatgcaaccgacaaaaacttctagaatatattctgagttttgtggtgctgtaggtaacgtgtggcactgctggcaaatgaaggtcatgagatgagttccttgtaggtaccagcttctggctcaagagttgaaggtgccgtcgcagggtcaggcctgccctgtcccgaagtgatctcctggaagacaagtgccttctccctccatggatctgtgatcttcccagctctgcatcaacacagcagcctgcagataacacttggggggacctcagcctctattcgcaactcataatccgtagactacaagatgaaatctcaataaattatttttgagtttattaaagattgacattttaagtacaacttttaaggactaattactgtgatggacacagaaatgtagctgtgttctggaactgaatcttacatggtatacttagtgctgctgggtaatttgttggtatattatctggttagtggttaatgcttcctttaaaaataattgagtcatccattcactctttttcagttttatctgtcaatagtagctacatttttaatgggagcaccttttatcccaaagtgctttataaattgagtggactgatatatatcacacccaggtatcactgtgctgtcctttgctgtcagatttagaaatgtttttaagagctatgtgaaaacagacaatattagtttaggtcgggaactgagatattgtaatcaaatagttaacatcaggaagttaatttggctggcaaaattctagggaaacttggccagaaaactggtgttgaaggcttttgctcatataaacaagtgccattgagtttcaaatgaccagcaaatatatttagaacccttcctgttttatgtctgtacctcgtccacccctcaggtaatacctgcctctcacaggtacagctgtttcttggaaatcctccaaccaaatagcagttttcctaacttgattagcttgagctgacagactgttagaatacagttctctggccacagctgatgagggctttctgtactgcacacagattgtgtactgcaccccagtccaggtgactggtacccactcgagttgtgccgtgcacaacctgtccagtatatgcatgtggtggccctactgactggtaatggttagaggcatttatggatttttagctttgaggaaaaaccatgacttttaacaaatttttatgggttatatgcctaaacccttatgccacatagtggtaaataattatgaaaaatggtctgttcataattggtaggtgccttttgtgagcagggagcataattattggtttattatggtaattatggtgattttttaaatatcatgtaatgttaaatttttccagatgagtgttacatagattctttgaatttagtataaaagtactgagaattaagtttgtacttccataagcttggattttaaacactgatagtatctcatgagtaatgtgtgttttgggagagggagggatgctgattgatatttcacattgtatgaaataccatgtttgaaactcatagcaataatgctatgctgttgtgatccctctcaagttctgcatttaaaatatattttttctttataggaattgatgtataccatgaagtcattgtcagttgtagtagctctgatgttgaatgagatatcatgttttagcattccattttactgactagggtagaagaacacttttcttggctacatttggaggatacccagggagtcttgggtgttccttatctggggaagcaaacatttcactagtctctttttttcatcctttaaattgtaaattaaggattactcaagctcaccattattcaagattgggactcgcttcccagtcgacactctgccctgcctgtcattgctgcaaagagctgctgctttgccaacctaagcaaagaaaatacggcttctcttgcattattttcccttttggttggtttgttttctagaagtacgttcagatgctttggggaatgcaatgtatgatttgctagctctctcaccacttaactcactgtgaggataaatatgcatgctttttgtaattaactggtgctttgaaaatcttttttaagggagaaaaatctcaaccaaagttatgctcatccagacaagctgacctttgagttaatttcagcacaactcattcttcagtgcctcatgactgaaaacaaaaaacaaaaaaacgaaagcatcttcacaatgaagcttccagatagcaccgttttgctaaaagatacattctcattgttttccaacagtgatggcttccacataaggttaaacaaactaggtgcttgtaaataatttattacagtttactctatcgcatttctgtaacatgaaatgcatgcccttcttcaggggaagactgtggtcaagttaaaaaaaaaaaacaatattaaacaacatgaaactgcagtctgtttttgaaaatgagaatgtcctaagtgattcagaagagaggagggaagttgtgcactctgaaaatgcatgaaaaacaaaggcaaaaactagtgggaaatgtgtagaactgttaactgagatggcttcgagtcttccttctggaatctgttaaatttcacaaagtcatgagggtaaatggagaaaatatttctgggattacaatgaatgtaagcccaaattgtggaattgccagtaacctggatggggaaaagcatttcccatagcactccatgtaatatgagtgctctgtgagatgttcatcagtgttttatagaaatggtgttgctgggaaaccaagtttgcacctggaaacttacaatgcactttagcgcagtaagggcttggcatccggtagtgaaaaactgtctaacccagcattgcccaaactattttgacaccaggacctttttctcctttgggatacttatgaacctctcactaatgtcctgtggagaacattttgggaaacactatgttagatagttctttaaggagacaaaacggtaatgaacagatagcactggggcagaatatgcatgcattttgtaacgtccagtgtggcgttgaatagatgtgtatttcctcccctgcagaaaataagcacagaaaattataatgtaggtgatcggagctctttcctttgatagagagaacagccccaatgatcctggctttttcactgaacgtatcagaatacatggatgaattggggtaaataaggttttaattcagatctagaagaaagtattgtacgtttgaatgcagatttttatccacagatagttgtagtgtttagacatgacaggacctatcgttgaggtttctaagacttactatgggctgtaaacctgttttttaaaactattttagaaacctgagacttgccgtctggcattttagtttaatacaaactaatgattgcatttgaaagagattcttgaccttatttctaaacgtctagagctctgaaatgtcttgatggaaggtattaaactatttgcctgttgtacaaagaaatgttaagactcgtgaaaagaattactataaggtactgtgaaataactgcgattttgtgagcaaaacatacttggaaatgctgattgatttttatgcttgttagtgtattgcaagaaacacagaaaatgtagttttgttttaataaaccaaaaattgaacataaaaatg

SEQ ID NO: 16959 - DNA, 6320 bp, Homo sapiens
cactgcagctggcattggccgggactggaagtgcgggcttctgcagcagccgaagctggagctgctagggcagcagcggctcccctgttgtatggacattctgcacccgaaactgatagctgagtcctgaagttttatgttatgaaacagaagaactttcatcccagcacatgatttgggaattacactttgtgacatggatgaatctgcactgacccttggtacaatagatgtttcttatctgccacattcatcagaatacagtgttggtcgatgtaagcacacaagtgaggaatggggtgagtgtggctttagacccaccatcttcagatctgcaactttaaaatggaaagaaagcctaatgagtcggaaaaggccatttgttggaagatgttgttactcctgcactccccagagctgggacaaatttttcaaccccagtatcccgtctttgggtttgcggaatgttatttatatcaatgaaactcacacaagacaccgcggatggcttgcaagacgcctttcttacgttctttttattcaagagcgagatgtgcataagggcatgtttgccaccaatgtgactgaaaatgtgctgaacagcagtagagtacaagaggcaattgcagaagtggctgctgaattaaaccctgatggttctgcccagcagcaatcaaaagccgttaacaaagtgaaaaagaaagctaaaaggattcttcaagaaatggttgccactgtctcaccggcaatgatcagactgactgggtgggtgctgctaaaactgttcaacagcttcttttggaacattcaaattcacaaaggtcaacttgagatggttaaagctgcaactgagacgaatttgccgcttctgtttctaccagttcatagatcccatattgactatctgctgctcactttcattctcttctgccataacatcaaagcaccatacattgcttcaggcaataatctcaacatcccaatcttcagtaccttgatccataagcttgggggcttcttcatacgacgaaggctcgatgaaacaccagatggacggaaagatgttctctatagagctttgctccatgggcatatagttgaattacttcgacagcagcaattcttggagatcttcctggaaggcacacgttctaggagtggaaaaacctcttgtgctcgggcaggacttttgtcagttgtggtagatactctgtctaccaatgtcatcccagacatcttgataatacctgttggaatctcctatgatcgcattatcgaaggtcactacaatggtgaacaactgggcaaacctaagaagaatgagagcctgtggagtgtagcaagaggtgttattagaatgttacgaaaaaactatggttgtgtccgagtggattttgcacagccattttccttaaaggaatatttagaaagccaaagtcagaaaccggtgtctgctctactttccctggagcaagcgttgttaccagctatacttccttcaagacccagtgatgctgctgatgaaggtagagacacgtccattaatgagtccagaaatgcaacagatgaatccctacgaaggaggttgattgcaaatctggctgagcatattctattcactgctagcaagtcctgtgccattatgtccacacacattgtggcttgcctgctcctctacagacacaggcagggaattgatctctccacattggtcgaagacttctttgtgatgaaagaggaagtcctggctcgtgattttgacctggggttctcaggaaattcagaagatgtagtaatgcatgccatacagctgctgggaaattgtgtcacaatcacccacactagcaggaacgatgagttttttatcacccccagcacaactgtcccatcagtcttcgaactcaacttctacagcaatggggtacttcatgtctttatcatggaggccatcatagcttgcagcctttatgcagttctgaacaagaggggactggggggtcccactagcaccccacctaacctgatcagccaggagcagctggtgcggaaggcggccagcctgtgctaccttctctccaatgaaggcaccatctcactgccttgccagacattttaccaagtctgccatgaaacagtaggaaagtttatccagtatggcattcttacagtggcagagcacgatgaccaggaagatatcagtcctagtcttgctgagcagcagtgggacaagaagcttcctgaacctttgtcttggagaagtgatgaagaagatgaagacagtgactttggggaggaacagcgagattgctacctgaaggtgagccaatccaaggagcaccagcagtttatcaccttcttacagagactccttgggcctttgctggaggcctacagctctgctgccatctttgttcacaacttcagtggtcctgttccagaacctgagtatctgcaaaagttgcacaaatacctaataaccagaacagaaagaaatgttgcagtatatgctgagagtgccacatattgtcttgtgaagaatgctgtgaaaatgtttaaggatattggggttttcaaggagaccaaacaaaagagagtgtctgttttagaactgagcagcacttttctacctcaatgcaaccgacaaaaacttctagaatatattctgagttttgtggtgctgtaggtaacgtgtggcactgctggcaaatgaaggtcatgagatgagttccttgtaggtaccagcttctggctcaagagttgaaggtgccgtcgcagggtcaggcctgccctgtcccgaagtgatctcctggaagacaagtgccttctccctccatggatctgtgatcttcccagctctgcatcaacacagcagcctgcagataacacttggggggacctcagcctctattcgcaactcataatccgtagactacaagatgaaatctcaataaattatttttgagtttattaaagattgacattttaagtacaacttttaaggactaattactgtgatggacacagaaatgtagctgtgttctggaactgaatcttacatggtatacttagtgctgctgggtaatttgttggtatattatctggttagtggttaatgcttcctttaaaaataattgagtcatccattcactctttttcagttttatctgtcaatagtagctacatttttaatgggagcaccttttatcccaaagtgctttataaattgagtggactgatatatatcacacccaggtatcactgtgctgtcctttgctgtcagatttagaaatgtttttaagagctatgtgaaaacagacaatattagtttaggtcgggaactgagatattgtaatcaaatagttaacatcaggaagttaatttggctggcaaaattctagggaaacttggccagtgaccagcaaatatatttagaacccttcctgttttatgtctgtacctcgtccacccctcaggtaatacctgcctctcacaggtacagctgtttcttggaaatcctccaaccaaatagcagttttcctaacttgattagcttgagctgacagactgttagaatacagttctctggccacagctgatgagggctttctgtactgcacacagattgtgtactgcaccccagtccaggtgactggtacccactcgagttgtgccgtgcacaacctgtccagtatatgcatgtggtggccctactgactggtaatggttagaggcatttatggatttttagctttgaggaaaaaccatgacttttaacaaatttttatgggttatatgcctaaacccttatgccacatagtggtaaataattatgaaaaatggtctgttcataattggtaggtgccttttgtgagcagggagcataattattggtttattatggtaattatggtgattttttaaatatcatgtaatgttaaaacgttttctaacagtttactgttgcttatctccaagatattatggaattaagaatttttccagatgagtgttacatagattctttgaatttagtataaaagtactgagaattaagtttgtacttccataagcttggattttaaacactgatagtatctcatgagtaatgtgtgttttgggagagggagggatgctgattgatatttcacattgtatgaaataccatgtttgaaactcatagcaataatgctatgctgttgtgatccctctcaagttctgcatttaaaatatattttttctttataggaattgatgtataccatgaagtcattgtcagttgtagtagctctgatgttgaatgagatatcatgttttagcattccattttactgactagggtagaagaacacttttcttggctacatttggaggatacccagggagtcttgggtgttccttatctggggaagcaaacatttcactagtctctttttttcatcctttaaattgtaaattaaggattactcaagctcaccattattcaagattgggactcgcttcccagtcgacactctgccctgcctgtcattgctgcaaagagctgctgctttgccaacctaagcaaagaaaatacggcttctcttgcattattttcccttttggttggtttgttttctagaagtacgttcagatgctttggggaatgcaatgtatgatttgctagctctctcaccacttaactcactgtgaggataaatatgcatgctttttgtaattaactggtgctttgaaaatcttttttaagggagaaaaatctcaaccaaagttatgctcatccagacaagctgacctttgagttaatttcagcacaactcattcttcagtgcctcatgactgaaaacaaaaaacaaaaaaacgaaagcatcttcacaatgaagcttccagatagcaccgttttgctaaaagatacattctcattgttttccaacagtgatggcttccacataaggttaaacaaactaggtgcttgtaaataatttattacagtttactctatcgcatttctgtaacatgaaatgcatgcccttcttcaggggaagactgtggtcaagttaaaaaaaaaaaacaatattaaacaacatgaaactgcagtctgtttttgaaaatgagaatgtcctaagtgattcagaagagaggagggaagttgtgcactctgaaaatgcatgaaaaacaaaggcaaaaactagtgggaaatgtgtagaactgttaactgagatggcttcgagtcttccttctggaatctgttaaatttcacaaagtcatgagggtaaatggagaaaatatttctgggattacaatgaatgtaagcccaaattgtggaattgccagtaacctggatggggaaaagcatttcccatagcactccatgtaatatgagtgctctgtgagatgttcatcagtgttttatagaaatggtgttgctgggaaaccaagtttgcacctggaaacttacaatgcactttagcgcagtaagggcttggcatccggtagtgaaaaactgtctaacccagcattgcccaaactattttgacaccaggacctttttctcctttgggatacttatgaacctctcactaatgtcctgtggagaacattttgggaaacactatgttagatagttctttaaggagacaaaacggtaatgaacagatagcactggggcagaatatgcatgcattttgtaacgtccagtgtggcgttgaatagatgtgtatttcctcccctgcagaaaataagcacagaaaattataatgtaggtgatcggagctctttcctttgatagagagaacagccccaatgatcctggctttttcactgaacgtatcagaatacatggatgaattggggtaaataaggttttaattcagatctagaagaaagtattgtacgtttgaatgcagatttttatccacagatagttgtagtgtttagacatgacaggacctatcgttgaggtttctaagacttactatgggctgtaaacctgttttttaaaactattttagaaacctgagacttgccgtctggcattttagtttaatacaaactaatgattgcatttgaaagagattcttgaccttatttctaaacgtctagagctctgaaatgtcttgatggaaggtattaaactatttgcctgttgtacaaagaaatgttaagactcgtgaaaagaattactataaggtactgtgaaataactgcgattttgtgagcaaaacatacttggaaatgctgattgatttttatgcttgttagtgtattgcaagaaacacagaaaatgtagttttgttttaataaaccaaaaattgaacataaaaatg

SEQ ID NO: 16960 - DNA, 6267 bp, Homo sapiens
cactgcagctggcattggccgggactggaagtgcgggcttctgcagcagccgaagctggagctgctagggcagcagcggctcccctgttgtatggacattctgcacccgaaactgatagctgagtcctgaagttttatgttatgaaacagaagaactttcatcccagcacatgatttgggaattacactttgtgacatggatgaatctgcactgacccttggtacaatagatgtttcttatctgccacattcatcagaatacagtgttggtcgatgtaagcacacaagtgaggaatggggtgagtgtggctttagacccaccatcttcagatctgcaactttaaaatggaaagaaagcctaatgagtcggaaaaggccatttgttggaagatgttgttactcctgcactccccagagctgggacaaatttttcaaccccagtatcccgtctttgggtttgcggaatgttatttatatcaatgaaactcacacaagacaccgcggatggcttgcaagacgcctttcttacgttctttttattcaagagcgagatgtgcataagggcatgtttgccaccaatgtgactgaaaatgtgctgaacagcagtagagtacaagaggcaattgcagaagtggctgctgaattaaaccctgatggttctgcccagcagcaatcaaaagccgttaacaaagtgaaaaagaaagctaaaaggattcttcaagaaatggttgccactgtctcaccggcaatgatcagactgactgggtgggtgctgctaaaactgttcaacagcttcttttggaacattcaaattcacaaaggtcaacttgagatggttaaagctgcaactgagacgaatttgccgcttctgtttctaccagttcatagatcccatattgactatctgctgctcactttcattctcttctgccataacatcaaagcaccatacattgcttcaggcaataatctcaacatcccaatcttcagtaccttgatccataagcttgggggcttcttcatacgacgaaggctcgatgaaacaccagatggacggaaagatgttctctatagagctttgctccatgggcatatagttgaattacttcgacagcagcaattcttggagatcttcctggaaggcacacgttctaggagtggaaaaacctcttgtgctcgggcaggacttttgtcagttgtggtagatactctgtctaccaatgtcatcccagacatcttgataatacctgttggaatctcctatgatcgcattatcgaaggtcactacaatggtgaacaactgggcaaacctaagaagaatgagagcctgtggagtgtagcaagaggtgttattagaatgttacgaaaaaactatggttgtgtccgagtggattttgcacagccattttccttaaaggaatatttagaaagccaaagtcagaaaccggtgtctgctctactttccctggagcaagcgttgttaccagctatacttccttcaagacccagtgatgctgctgatgaaggtagagacacgtccattaatgagtccagaaatgcaacagatgaatccctacgaaggaggttgattgcaaatctggctgagcatattctattcactgctagcaagtcctgtgccattatgtccacacacattgtggcttgcctgctcctctacagacacaggcagggaattgatctctccacattggtcgaagacttctttgtgatgaaagaggaagtcctggctcgtgattttgacctggggttctcaggaaattcagaagatgtagtaatgcatgccatacagctgctgggaaattgtgtcacaatcacccacactagcaggaacgatgagttttttatcacccccagcacaactgtcccatcagtcttcgaactcaacttctacagcaatggggtacttcatgtctttatcatggaggccatcatagcttgcagcctttatgcagttctgaacaagaggggactggggggtcccactagcaccccacctaacctgatcagccaggagcagctggtgcggaaggcggccagcctgtgctaccttctctccaatgaaggcaccatctcactgccttgccagacattttaccaagtctgccatgaaacagtaggaaagtttatccagtatggcattcttacagtggcagagcacgatgaccaggaagatatcagtcctagtcttgctgagcagcagtgggacaagaagcttcctgaacctttgtcttggagaagtgatgaagaagatgaagacagtgactttggggaggaacagcgagattgctacctgaaggtgagccaatccaaggagcaccagcagtttatcaccttcttacagagactccttgggcctttgctggaggcctacagctctgctgccatctttgttcacaacttcagtggtcctgttccagaacctgagtatctgcaaaagttgcacaaatacctaataaccagaacagaaagaaatgttgcagtatatgctgagagtgccacatattgtcttgtgaagaatgctgtgaaaatgtttaaggatattggggttttcaaggagaccaaacaaaagagagtgtctgttttagaactgagcagcacttttctacctcaatgcaaccgacaaaaacttctagaatatattctgagttttgtggtgctgtaggtaacgtgtggcactgctggcaaatgaaggtcatgagatgagttccttgtaggtaccagcttctggctcaagagttgaaggtgccgtcgcagggtcaggcctgccctgtcccgaagtgatctcctggaagacaagtgccttctccctccatggatctgtgatcttcccagctctgcatcaacacagcagcctgcagataacacttggggggacctcagcctctattcgcaactcataatccgtagactacaagatgaaatctcaataaattatttttgagtttattaaagattgacattttaagtacaacttttaaggactaattactgtgatggacacagaaatgtagctgtgttctggaactgaatcttacatggtatacttagtgctgctgggtaatttgttggtatattatctggttagtggttaatgcttcctttaaaaataattgagtcatccattcactctttttcagttttatctgtcaatagtagctacatttttaatgggagcaccttttatcccaaagtgctttataaattgagtggactgatatatatcacacccaggtatcactgtgctgtcctttgctgtcagatttagaaatgtttttaagagctatgtgaaaacagacaatattagtttaggtcgggaactgagatattgtaatcaaatagttaacatcaggaagttaatttggctggcaaaattctagggaaacttggccagaaaactggtgttgaaggcttttgctcatataaacaagtgccattgagtttcaaatgaccagcaaatatatttagaacccttcctgttttatgtctgtacctcgtccacccctcaggtaatacctgcctctcacaggtacagctgtttcttggaaatcctccaaccaaatagcagttttcctaacttgattagcttgagctgacagactgttagaatacagttctctggccacagctgatgagggctttctgtactgcacacagattgtgtactgcaccccagtccaggtgactggtacccactcgagttgtgccgtgcacaacctgtccagtatatgcatgtggtggccctactgactggtaatggttagaggcatttatggatttttagctttgaggaaaaaccatgacttttaacaaatttttatgggttatatgcctaaacccttatgccacatagtggtaaataattatgaaaaatggtctgttcataattggtaggtgccttttgtgagcagggagcataattattggtttattatggtaattatggtgattttttaaatatcatgtaatgttaaaacgttttctaacagtttactgttgcttatctccaagatattatggaattaagaatttttccagatgagtgttacatagattctttgaatttagtataaaagtactgagaattaagttttgtttgaaactcatagcaataatgctatgctgttgtgatccctctcaagttctgcatttaaaatatattttttctttataggaattgatgtataccatgaagtcattgtcagttgtagtagctctgatgttgaatgagatatcatgttttagcattccattttactgactagggtagaagaacacttttcttggctacatttggaggatacccagggagtcttgggtgttccttatctggggaagcaaacatttcactagtctctttttttcatcctttaaattgtaaattaaggattactcaagctcaccattattcaagattgggactcgcttcccagtcgacactctgccctgcctgtcattgctgcaaagagctgctgctttgccaacctaagcaaagaaaatacggcttctcttgcattattttcccttttggttggtttgttttctagaagtacgttcagatgctttggggaatgcaatgtatgatttgctagctctctcaccacttaactcactgtgaggataaatatgcatgctttttgtaattaactggtgctttgaaaatcttttttaagggagaaaaatctcaaccaaagttatgctcatccagacaagctgacctttgagttaatttcagcacaactcattcttcagtgcctcatgactgaaaacaaaaaacaaaaaaacgaaagcatcttcacaatgaagcttccagatagcaccgttttgctaaaagatacattctcattgttttccaacagtgatggcttccacataaggttaaacaaactaggtgcttgtaaataatttattacagtttactctatcgcatttctgtaacatgaaatgcatgcccttcttcaggggaagactgtggtcaagttaaaaaaaaaaaacaatattaaacaacatgaaactgcagtctgtttttgaaaatgagaatgtcctaagtgattcagaagagaggagggaagttgtgcactctgaaaatgcatgaaaaacaaaggcaaaaactagtgggaaatgtgtagaactgttaactgagatggcttcgagtcttccttctggaatctgttaaatttcacaaagtcatgagggtaaatggagaaaatatttctgggattacaatgaatgtaagcccaaattgtggaattgccagtaacctggatggggaaaagcatttcccatagcactccatgtaatatgagtgctctgtgagatgttcatcagtgttttatagaaatggtgttgctgggaaaccaagtttgcacctggaaacttacaatgcactttagcgcagtaagggcttggcatccggtagtgaaaaactgtctaacccagcattgcccaaactattttgacaccaggacctttttctcctttgggatacttatgaacctctcactaatgtcctgtggagaacattttgggaaacactatgttagatagttctttaaggagacaaaacggtaatgaacagatagcactggggcagaatatgcatgcattttgtaacgtccagtgtggcgttgaatagatgtgtatttcctcccctgcagaaaataagcacagaaaattataatgtaggtgatcggagctctttcctttgatagagagaacagccccaatgatcctggctttttcactgaacgtatcagaatacatggatgaattggggtaaataaggttttaattcagatctagaagaaagtattgtacgtttgaatgcagatttttatccacagatagttgtagtgtttagacatgacaggacctatcgttgaggtttctaagacttactatgggctgtaaacctgttttttaaaactattttagaaacctgagacttgccgtctggcattttagtttaatacaaactaatgattgcatttgaaagagattcttgaccttatttctaaacgtctagagctctgaaatgtcttgatggaaggtattaaactatttgcctgttgtacaaagaaatgttaagactcgtgaaaagaattactataaggtactgtgaaataactgcgattttgtgagcaaaacatacttggaaatgctgattgatttttatgcttgttagtgtattgcaagaaacacagaaaatgtagttttgttttaataaaccaaaaattgaacataaaaatg

SEQ ID NO: 16961 - DNA, 6266 bp, Homo sapiens
cactgcagctggcattggccgggactggaagtgcgggcttctgcagcagccgaagctggagctgctagggcagcagcggctcccctgttgtatggacattctgcacccgaaactgatagctgagtcctgaagttttatgttatgaaacagaagaactttcatcccagcacatgatttgggaattacactttgtgacatggatgaatctgcactgacccttggtacaatagatgtttcttatctgccacattcatcagaatacagtgttggtcgatgtaagcacacaagtgaggaatggggtgagtgtggctttagacccaccatcttcagatctgcaactttaaaatggaaagaaagcctaatgagtcggaaaaggccatttgttggaagatgttgttactcctgcactccccagagctgggacaaatttttcaaccccagtatcccgtctttgggtttgcggaatgttatttatatcaatgaaactcacacaagacaccgcggatggcttgcaagacgcctttcttacgttctttttattcaagagcgagatgtgcataagggcatgtttgccaccaatgtgactgaaaatgtgctgaacagcagtagagtacaagaggcaattgcagaagtggctgctgaattaaaccctgatggttctgcccagcagcaatcaaaagccgttaacaaagtgaaaaagaaagctaaaaggattcttcaagaaatggttgccactgtctcaccggcaatgatcagactgactgggtgggtgctgctaaaactgttcaacagcttcttttggaacattcaaattcacaaaggtcaacttgagatggttaaagctgcaactgagacgaatttgccgcttctgtttctaccagttcatagatcccatattgactatctgctgctcactttcattctcttctgccataacatcaaagcaccatacattgcttcaggcaataatctcaacatcccaatcttcagtaccttgatccataagcttgggggcttcttcatacgacgaaggctcgatgaaacaccagatggacggaaagatgttctctatagagctttgctccatgggcatatagttgaattacttcgacagcagcaattcttggagatcttcctggaaggcacacgttctaggagtggaaaaacctcttgtgctcgggcaggacttttgtcagttgtggtagatactctgtctaccaatgtcatcccagacatcttgataatacctgttggaatctcctatgatcgcattatcgaaggtcactacaatggtgaacaactgggcaaacctaagaagaatgagagcctgtggagtgtagcaagaggtgttattagaatgttacgaaaaaactatggttgtgtccgagtggattttgcacagccattttccttaaaggaatatttagaaagccaaagtcagaaaccggtgtctgctctactttccctggagcaagcgttgttaccagctatacttccttcaagacccagtgatgctgctgatgaaggtagagacacgtccattaatgagtccagaaatgcaacagatgaatccctacgaaggaggttgattgcaaatctggctgagcatattctattcactgctagcaagtcctgtgccattatgtccacacacattgtggcttgcctgctcctctacagacacaggcagggaattgatctctccacattggtcgaagacttctttgtgatgaaagaggaagtcctggctcgtgattttgacctggggttctcaggaaattcagaagatgtagtaatgcatgccatacagctgctgggaaattgtgtcacaatcacccacactagcaggaacgatgagttttttatcacccccagcacaactgtcccatcagtcttcgaactcaacttctacagcaatggggtacttcatgtctttatcatggaggccatcatagcttgcagcctttatgcagttctgaacaagaggggactggggggtcccactagcaccccacctaacctgatcagccaggagcagctggtgcggaaggcggccagcctgtgctaccttctctccaatgaaggcaccatctcactgccttgccagacattttaccaagtctgccatgaaacagtaggaaagtttatccagtatggcattcttacagtggcagagcacgatgaccaggaagatatcagtcctagtcttgctgagcagcagtgggacaagaagcttcctgaacctttgtcttggagaagtgatgaagaagatgaagacagtgactttggggaggaacagcgagattgctacctgaaggtgagccaatccaaggagcaccagcagtttatcaccttcttacagagactccttgggcctttgctggaggcctacagctctgctgccatctttgttcacaacttcagtggtcctgttccagaacctgagtatctgcaaaagttgcacaaatacctaataaccagaacagaaagaaatgttgcagtatatgctgagagtgccacatattgtcttgtgaagaatgctgtgaaaatgtttaaggatattggggttttcaaggagaccaaacaaaagagagtgtctgttttagaactgagcagcacttttctacctcaatgcaaccgacaaaaacttctagaatatattctgagttttgtggtgctgtaggtaacgtgtggcactgctggcaaatgaaggtcatgagatgagttccttgtaggtaccagcttctggctcaagagttgaaggtgccgtcgcagggtcaggcctgccctgtcccgaagtgatctcctggaagacaagtgccttctccctccatggatctgtgatcttcccagctctgcatcaacacagcagcctgcagataacacttggggggacctcagcctctattcgcaactcataatccgtagactacaagatgaaatctcaataaattatttttgagtttattaaagattgacattttaagtacaacttttaaggactaattactgtgatggacacagaaatgtagctgtgttctggaactgaatcttacatggtatacttagtgctgctgggtaatttgttggtatattatctggttagtggttaatgcttcctttaaaaataattgagtcatccattcactctttttcagttttatctgtcaatagtagctacatttttaatgggagcaccttttatcccaaagtgctttataaattgagtggactgatatatatcacacccaggtatcactgtgctgtcctttgctgtcagatttagaaatgtttttaagagctatgtgaaaacagacaatattagtttaggtcgggaactgagatattgtaatcaaatagttaacatcaggaagttaatttggctggcaaaattctagggaaacttggccagaaaactggtgttgaaggcttttgctcatataaacaagtgccattgagtttcaaatgaccagcaaatatatttagaacccttcctgttttatgtctgtacctcgtccacccctcaggtaatacctgcctctcacaggtacagctgtttcttggaaatcctccaaccaaatagcagttttcctaacttgattagcttgagctgacagactgttagaatacagttctctggccacagctgatgagggctttctgtactgcacacagattgtgtactgcaccccagtccaggtgactggtacccactcgagttgtgccgtgcacaacctgtccagtatatgcatgtggtggccctactgactggtaatggttagaggcatttatggatttttagctttgaggaaaaaccatgacttttaacaaatttttatgggttatatgcctaaacccttatgccacatagtggtaaataattatgaaaaatggtctgttcataattggtaggtgccttttgtgagcagggagcataattattggtttattatggtaattatggtgattttttaaatatcatgtaatgttaaatttttccagatgagtgttacatagattctttgaatttagtataaaagtactgagaattaagtttgtacttccataagcttggattttaaacactgatagtatctcatgagtaatgtgtgttttgggagagggagggatgctgattgatatttcacattgtatgaaataccatgtttgaaactcatagcaataatgctatgctgttgtgatccctctcaagttctgcattttgtagtagctctgatgttgaatgagatatcatgttttagcattccattttactgactagggtagaagaacacttttcttggctacatttggaggatacccagggagtcttgggtgttccttatctggggaagcaaacatttcactagtctctttttttcatcctttaaattgtaaattaaggattactcaagctcaccattattcaagattgggactcgcttcccagtcgacactctgccctgcctgtcattgctgcaaagagctgctgctttgccaacctaagcaaagaaaatacggcttctcttgcattattttcccttttggttggtttgttttctagaagtacgttcagatgctttggggaatgcaatgtatgatttgctagctctctcaccacttaactcactgtgaggataaatatgcatgctttttgtaattaactggtgctttgaaaatcttttttaagggagaaaaatctcaaccaaagttatgctcatccagacaagctgacctttgagttaatttcagcacaactcattcttcagtgcctcatgactgaaaacaaaaaacaaaaaaacgaaagcatcttcacaatgaagcttccagatagcaccgttttgctaaaagatacattctcattgttttccaacagtgatggcttccacataaggttaaacaaactaggtgcttgtaaataatttattacagtttactctatcgcatttctgtaacatgaaatgcatgcccttcttcaggggaagactgtggtcaagttaaaaaaaaaaaacaatattaaacaacatgaaactgcagtctgtttttgaaaatgagaatgtcctaagtgattcagaagagaggagggaagttgtgcactctgaaaatgcatgaaaaacaaaggcaaaaactagtgggaaatgtgtagaactgttaactgagatggcttcgagtcttccttctggaatctgttaaatttcacaaagtcatgagggtaaatggagaaaatatttctgggattacaatgaatgtaagcccaaattgtggaattgccagtaacctggatggggaaaagcatttcccatagcactccatgtaatatgagtgctctgtgagatgttcatcagtgttttatagaaatggtgttgctgggaaaccaagtttgcacctggaaacttacaatgcactttagcgcagtaagggcttggcatccggtagtgaaaaactgtctaacccagcattgcccaaactattttgacaccaggacctttttctcctttgggatacttatgaacctctcactaatgtcctgtggagaacattttgggaaacactatgttagatagttctttaaggagacaaaacggtaatgaacagatagcactggggcagaatatgcatgcattttgtaacgtccagtgtggcgttgaatagatgtgtatttcctcccctgcagaaaataagcacagaaaattataatgtaggtgatcggagctctttcctttgatagagagaacagccccaatgatcctggctttttcactgaacgtatcagaatacatggatgaattggggtaaataaggttttaattcagatctagaagaaagtattgtacgtttgaatgcagatttttatccacagatagttgtagtgtttagacatgacaggacctatcgttgaggtttctaagacttactatgggctgtaaacctgttttttaaaactattttagaaacctgagacttgccgtctggcattttagtttaatacaaactaatgattgcatttgaaagagattcttgaccttatttctaaacgtctagagctctgaaatgtcttgatggaaggtattaaactatttgcctgttgtacaaagaaatgttaagactcgtgaaaagaattactataaggtactgtgaaataactgcgattttgtgagcaaaacatacttggaaatgctgattgatttttatgcttgttagtgtattgcaagaaacacagaaaatgtagttttgttttaataaaccaaaaattgaacataaaaatg

SEQ ID NO: 16962 - DNA, 6317 bp, Homo sapiens
cactgcagctggcattggccgggactggaagtgcgggcttctgcagcagccgaagctggagctgctagggcagcagcggctcccctgttgtatggacattctgcacccgaaactgatagctgagtcctgaagttttatgttatgaaacagaagaactttcatcccagcacatgatttgggaattacactttgtgacatggatgaatctgcactgacccttggtacaatagatgtttcttatctgccacattcatcagaatacagtgttggtcgatgtaagcacacaagtgaggaatggggtgagtgtggctttagacccaccatcttcagatctgcaactttaaaatggaaagaaagcctaatgagtcggaaaaggccatttgttggaagatgttgttactcctgcactccccagagctgggacaaatttttcaaccccagtatcccgtctttgggtttgcggaatgttatttatatcaatgaaactcacacaagacaccgcggatggcttgcaagacgcctttcttacgttctttttattcaagagcgagatgtgcataagggcatgtttgccaccaatgtgactgaaaatgtgctgaacagcagtagagtacaagaggcaattgcagaagtggctgctgaattaaaccctgatggttctgcccagcagcaatcaaaagccgttaacaaagtgaaaaagaaagctaaaaggattcttcaagaaatggttgccactgtctcaccggcaatgatcagactgactgggtgggtgctgctaaaactgttcaacagcttcttttggaacattcaaattcacaaaggtcaacttgagatggttaaagctgcaactgagacgaatttgccgcttctgtttctaccagttcatagatcccatattgactatctgctgctcactttcattctcttctgccataacatcaaagcaccatacattgcttcaggcaataatctcaacatcccaatcttcagtaccttgatccataagcttgggggcttcttcatacgacgaaggctcgatgaaacaccagatggacggaaagatgttctctatagagctttgctccatgggcatatagttgaattacttcgacagcagcaattcttggagatcttcctggaaggcacacgttctaggagtggaaaaacctcttgtgctcgggcaggacttttgtcagttgtggtagatactctgtctaccaatgtcatcccagacatcttgataatacctgttggaatctcctatgatcgcattatcgaaggtcactacaatggtgaacaactgggcaaacctaagaagaatgagagcctgtggagtgtagcaagaggtgttattagaatgttacgaaaaaactatggttgtgtccgagtggattttgcacagccattttccttaaaggaatatttagaaagccaaagtcagaaaccggtgtctgctctactttccctggagcaagcgttgttaccagctatacttccttcaagacccagtgatgctgctgatgaaggtagagacacgtccattaatgagtccagaaatgcaacagatgaatccctacgaaggaggttgattgcaaatctggctgagcatattctattcactgctagcaagtcctgtgccattatgtccacacacattgtggcttgcctgctcctctacagacacaggcagggaattgatctctccacattggtcgaagacttctttgtgatgaaagaggaagtcctggctcgtgattttgacctggggttctcaggaaattcagaagatgtagtaatgcatgccatacagctgctgggaaattgtgtcacaatcacccacactagcaggaacgatgagttttttatcacccccagcacaactgtcccatcagtcttcgaactcaacttctacagcaatggggtacttcatgtctttatcatggaggccatcatagcttgcagcctttatgcagttctgaacaagaggggactggggggtcccactagcaccccacctaacctgatcagccaggagcagctggtgcggaaggcggccagcctgtgctaccttctctccaatgaaggcaccatctcactgccttgccagacattttaccaagtctgccatgaaacagtaggaaagtttatccagtatggcattcttacagtggcagagcacgatgaccaggaagatatcagtcctagtcttgctgagcagcagtgggacaagaagcttcctgaacctttgtcttggagaagtgatgaagaagatgaagacagtgactttggggaggaacagcgagattgctacctgaaggtgagccaatccaaggagcaccagcagtttatcaccttcttacagagactccttgggcctttgctggaggcctacagctctgctgccatctttgttcacaacttcagtggtcctgttccagaacctgagtatctgcaaaagttgcacaaatacctaataaccagaacagaaagaaatgttgcagtatatgctgagagtgccacatattgtcttgtgaagaatgctgtgaaaatgtttaaggatattggggttttcaaggagaccaaacaaaagagagtgtctgttttagaactgagcagcacttttctacctcaatgcaaccgacaaaaacttctagaatatattctgagttttgtggtgctgtaggtaacgtgtggcactgctggcaaatgaaggtcatgagatgagttccttgtaggtaccagcttctggctcaagagttgaaggtgccgtcgcagggtcaggcctgccctgtcccgaagtgatctcctggaagacaagtgccttctccctccatggatctgtgatcttcccagctctgcatcaacacagcagcctgcagataacacttggggggacctcagcctctattcgcaactcataatccgtagactacaagatgaaatctcaataaattatttttgagtttattaaagattgacattttaagtacaacttttaaggactaattactgtgatggacacagaaatgtagctgtgttctggaactgaatcttacatggtatacttagtgctgctgggtaatttgttggtatattatctggttagtggttaatgcttcctttaaaaataattgagtcatccattcactctttttcagttttatctgtcaatagtagctacatttttaatgggagcaccttttatcccaaagtgctttataaattgagtggactgatatatatcacacccaggtatcactgtgctgtcctttgctgtcagatttagaaatgtttttaagagctatgtgaaaacagacaatattagtttaggtcgggaactgagatattgtaatcaaatagttaacatcaggaagttaatttggctggcaaaattctagggaaacttggccagaaaactggtgttgaaggcttttgctcatataaacaagtgccattgagtttcaaatgaccagcaaatatatttagaacccttcctgttttatgtctgtacctcgtccacccctcaggtaatacctgcctctcacaggtacagctgtttcttggaaatcctccaaccaaatagcagttttcctaacttgattagcttgagctgacagactgttagaatacagttctctggccacagctgatgagggctttctgtactgcacacagattgtgtactgcaccccagtccaggtgactggtacccactcgagttgtgccgtgcacaacctgtccagtatatgcatgtggtggccctactgactggtaatggttagaggcatttatggatttttagctttgaggaaaaaccatgacttttaacaaatttttatgggttatatgcctaaacccttatgccacatagtggtaaataattatgaaaaatggtctgttcataattggtaggtgccttttgtgagcagggagcataattattggtttattatggtaattatggtgattttttaaatatcatgtaatgttaaaacgttttctaacagtttactgttgcttatctccaagatattatggaattaagaatttttccagatgagtgttacatagattctttgaatttagtataaaagtactgagaattaagtttgtacttccataagcttggattttaaacactgatagtatctcatgagtaatgtgtgttttgggagagggagggatgctgattgatatttcacattgtatgaaataccatgtttgaaactcatagcaataatgctatgctgttgtgatccctctcaagttctgcatttaaaatatattttttctttataggaattgatgtataccatgaagtcattgtcagttgtagtagctctgatgttgaatgagatatcatgttttagcattccattttactgactagggtagaagaacacttttcttggctacatttggaggatacccagggagtcttgggtgttccttatctggggaagcaaacatttcactagtctctttttttcatcctttaaattgtaaattaaggattactcaagctcaccattattcaagattgggactcgcttcccagtcgacactctgccctgcctgtcattgctgcaaagagctgctgctttgccaacctaagcaaagaaaatacggcttctcttgcattattttcccttttggttggtttgttttctagaagtacgttcagatgctttggggaatgcaatgtatgatttgctagctctctcaccacttaactcactgtgaggataaatatgcatgctttttgtaattaactggtgctttgaaaatcttttttaagggagaaaaatctcaaccaaagttatgctcatccagacaagctgacctttgagttaatttcagcacaactcattcttcagtgcctcatgactgaaaacaaaaaacaaaaaaacgaaagcatcttcacaatgaagcttccagatagcaccgttttgctaaaagatacattctcattgttttccaacagtgatggcttccacataaggttaaacaaactaggtgcttgtaaataatttattacagtttactctatcgcatttctgtaacatgaaatgcatgcccttcttcaggggaagactgtggtcaagttaaaaactaagtgattcagaagagaggagggaagttgtgcactctgaaaatgcatgaaaaacaaaggcaaaaactagtgggaaatgtgtagaactgttaactgagatggcttcgagtcttccttctggaatctgttaaatttcacaaagtcatgagggtaaatggagaaaatatttctgggattacaatgaatgtaagcccaaattgtggaattgccagtaacctggatggggaaaagcatttcccatagcactccatgtaatatgagtgctctgtgagatgttcatcagtgttttatagaaatggtgttgctgggaaaccaagtttgcacctggaaacttacaatgcactttagcgcagtaagggcttggcatccggtagtgaaaaactgtctaacccagcattgcccaaactattttgacaccaggacctttttctcctttgggatacttatgaacctctcactaatgtcctgtggagaacattttgggaaacactatgttagatagttctttaaggagacaaaacggtaatgaacagatagcactggggcagaatatgcatgcattttgtaacgtccagtgtggcgttgaatagatgtgtatttcctcccctgcagaaaataagcacagaaaattataatgtaggtgatcggagctctttcctttgatagagagaacagccccaatgatcctggctttttcactgaacgtatcagaatacatggatgaattggggtaaataaggttttaattcagatctagaagaaagtattgtacgtttgaatgcagatttttatccacagatagttgtagtgtttagacatgacaggacctatcgttgaggtttctaagacttactatgggctgtaaacctgttttttaaaactattttagaaacctgagacttgccgtctggcattttagtttaatacaaactaatgattgcatttgaaagagattcttgaccttatttctaaacgtctagagctctgaaatgtcttgatggaaggtattaaactatttgcctgttgtacaaagaaatgttaagactcgtgaaaagaattactataaggtactgtgaaataactgcgattttgtgagcaaaacatacttggaaatgctgattgatttttatgcttgttagtgtattgcaagaaacacagaaaatgtagttttgttttaataaaccaaaaattgaacataaaaatg

SEQ ID NO: 16963 - DNA, 6320 bp, Homo sapiens
cactgcagctggcattggccgggactggaagtgcgggcttctgcagcagccgaagctggagctgctagggcagcagcggctcccctgttgtatggacattctgcacccgaaactgatagctgagtcctgaagttttatgttatgaaacagaagaactttcatcccagcacatgatttgggaattacactttgtgacatggatgaatctgcactgacccttggtacaatagatgtttcttatctgccacattcatcagaatacagtgttggtcgatgtaagcacacaagtgaggaatggggtgagtgtggctttagacccaccatcttcagatctgcaactttaaaatggaaagaaagcctaatgagtcggaaaaggccatttgttggaagatgttgttactcctgcactccccagagctgggacaaatttttcaaccccagtatcccgtctttgggtttgcggaatgttatttatatcaatgaaactcacacaagacaccgcggatggcttgcaagacgcctttcttacgttctttttattcaagagcgagatgtgcataagggcatgtttgccaccaatgtgactgaaaatgtgctgaacagcagtagagtacaagaggcaattgcagaagtggctgctgaattaaaccctgatggttctgcccagcagcaatcaaaagccgttaacaaagtgaaaaagaaagctaaaaggattcttcaagaaatggttgccactgtctcaccggcaatgatcagactgactgggtgggtgctgctaaaactgttcaacagcttcttttggaacattcaaattcacaaaggtcaacttgagatggttaaagctgcaactgagacgaatttgccgcttctgtttctaccagttcatagatcccatattgactatctgctgctcactttcattctcttctgccataacatcaaagcaccatacattgcttcaggcaataatctcaacatcccaatcttcagtaccttgatccataagcttgggggcttcttcatacgacgaaggctcgatgaaacaccagatggacggaaagatgttctctatagagctttgctccatgggcatatagttgaattacttcgacagcagcaattcttggagatcttcctggaaggcacacgttctaggagtggaaaaacctcttgtgctcgggcaggacttttgtcagttgtggtagatactctgtctaccaatgtcatcccagacatcttgataatacctgttggaatctcctatgatcgcattatcgaaggtcactacaatggtgaacaactgggcaaacctaagaagaatgagagcctgtggagtgtagcaagaggtgttattagaatgttacgaaaaaactatggttgtgtccgagtggattttgcacagccattttccttaaaggaatatttagaaagccaaagtcagaaaccggtgtctgctctactttccctggagcaagcgttgttaccagctatacttccttcaagacccagtgatgctgctgatgaaggtagagacacgtccattaatgagtccagaaatgcaacagatgaatccctacgaaggaggttgattgcaaatctggctgagcatattctattcactgctagcaagtcctgtgccattatgtccacacacattgtggcttgcctgctcctctacagacacaggcagggaattgatctctccacattggtcgaagacttctttgtgatgaaagaggaagtcctggctcgtgattttgacctggggttctcaggaaattcagaagatgtagtaatgcatgccatacagctgctgggaaattgtgtcacaatcacccacactagcaggaacgatgagttttttatcacccccagcacaactgtcccatcagtcttcgaactcaacttctacagcaatggggtacttcatgtctttatcatggaggccatcatagcttgcagcctttatgcagttctgaacaagaggggactggggggtcccactagcaccccacctaacctgatcagccaggagcagctggtgcggaaggcggccagcctgtgctaccttctctccaatgaaggcaccatctcactgccttgccagacattttaccaagtctgccatgaaacagtaggaaagtttatccagtatggcattcttacagtggcagagcacgatgaccaggaagatatcagtcctagtcttgctgagcagcagtgggacaagaagcttcctgaacctttgtcttggagaagtgatgaagaagatgaagacagtgactttggggaggaacagcgagattgctacctgaaggtgagccaatccaaggagcaccagcagtttatcaccttcttacagagactccttgggcctttgctggaggcctacagctctgctgccatctttgttcacaacttcagtggtcctgttccagaacctgagtatctgcaaaagttgcacaaatacctaataaccagaacagaaagaaatgttgcagtatatgctgagagtgccacatattgtcttgtgaagaatgctgtgaaaatgtttaaggatattggggttttcaaggagaccaaacaaaagagagtgtctgttttagaactgagcagcacttttctacctcaatgcaaccgacaaaaacttctagaatatattctgagttttgtggtgctgtaggtaacgtgtggcactgctggcaaatgaaggtcatgagatgagttccttgtaggtaccagcttctggctcaagagttgaaggtgccgtcgcagggtcaggcctgccctgtcccgaagtgatctcctggaagacaagtgccttctccctccatggatctgtgatcttcccagctctgcatcaacacagcagcctgcagataacacttggggggacctcagcctctattcgcaactcataatccgtagactacaagatgaaatctcaataaattatttttgagtttattaaagattgacattttaagtacaacttttaaggactaattactgtgatggacacagaaatgtagctgtgttctggaactgaatcttacatggtatacttagtgctgctgggtaatttgttggtatattatctggttagtggttaatgcttcctttaaaaataattgagtcatccattcactctttttcagttttatctgtcaatagtagctacatttttaatgggagcaccttttatcccaaagtgctttataaattgagtggactgatatatatcacacccaggtatcactgtgctgtcctttgctgtcagatttagaaatgtttttaagagctatgtgaaaacagacaatattagtttaggtcgggaactgagatattgtaatcaaatagttaacatcaggaagttaatttggctggcaaaattctagggaaacttggccagaaaactggtgttgaaggcttttgctcatataaacaagtgccattgagtttcaaatgaccagcaaatatatttagaacccttcctgttttatgtctgtacctcgtccacccctcaggtaatacctgcctctcacaggtacagctgtttcttggaaatcctccaaccaaatagcagttttcctaacttgattagcttgagctgacagactgttagaatacagttctctggccacagctgatgagggctttctgtactgcacacagattgtgtactgcaccccagtccaggtgactggtacccactcgagttgtgccgtgcacaacctgtccagtatatgcatgtggtggccctactgactggtaatggttagaggcatttatggatttttagctttgaggaaaaaccatgacttttaacaaatttttatgggttatatgcctaaacccttatgccacatagtggtaaataattatgaaaaatggtctgttcataattggtaggtgccttttgtgagcagggagcataattattggtttattatggtaattatggtgattttttaaatatcatgtaatgttaaaacgttttctaacagtttactgttgcttatctccaagatattatggaattaagaatttttccagatgagtgttacatagattctttgaatttagtataaaagtactgagaattaagtttgtacttccataagcttggattttaaacactgatagtatctcatgagtaatgtgtgttttgggagagggagggatgctgattgatatttcacattgtatgaaataccatgtttgaaactcatagcaataatgctatgctgttgtgatccctctcaagttctgcatttaaaatatattttttctttataggaattgatgtataccatgaagtcattgtcagttgtagtagctctgatgttgaatgagatatcatgttttagcattccattttactgactagggtagaagaacacttttcttggctacatttggaggatacccagggagtcttgggtgttccttatctggggaagcaaacatttcactagtctctttttttcatcctttaaattgtaaattaaggattactcaagctcaccattattcaagattgggactcgcttcccagtcgacactctgccctgcctgtcattgctgcaaagagctgctgctttgccaacctaagcaaagaaaatacggcttctcttgcattattttcccttttggttggtttgttttctagaagtacgttcagatgctttggggaatgcaatgtatgatttgctagctctctcaccacttaactcactgtgaggataaatatgcatgctttttgtaattaactggtgctttgaaaatcttttttaagggagaaaaatctcaaccaaagttatgctcatccagacaagctgacctttgagttaatttcagcacaactcattcttcagtgcctcatgactgaaaacaaaaaacaaaaaaacgaaagcatcttcacaatgaagcttccagatagcaccgttttgctaaaagatacattctcattgttttccaacagtgatggcttccacataaggttaaacaaactaggtgcttgtaaataatttattacagtttactctatcgcatttctgtaacatgaaatgcatgcccttcttcaggggaagactgtggtcaagttaaaaaaaaaaaacaatattaaacaacatgaaactgcagtctgtttttgaaaatgagaatgtcctaagtgattcagaagagaggagggaagttgtgcactctgaaaatgcatgaaaaacaaaggcaaaaactagtgggaaatgtgtagaactgttaactgagatggcttcgagtcttccttctggaatctgttaaatttcacaaagtcatgagggtaaatggagaaaatatttctgggattacaatgaatgtaagcccaaattgtggaattgccagtaacctggatggggaaaagcatttcccatagcactccatgtaatatgagtgctctgtgagatgttcatcagtgttttatagaaatggtgttgctgggaaaccaagtttgcacctggaaacttacaatgcactttagcgcagtaagggcttggcatccggtagtgaaaaactgtctaacccagcattgcccaaactattttgacaccaggacctttttctcctttgggatacttatgaacctctcactaatgtcctgtggagaacattttgggaaacactatgttagatagttctttaaggagacaaaacggtaatgaacagatagcactggggcagaatatgcatgcattttgtaacgtccagtgtggcgttgaatagatgtgtatttcctcccctgcagaaaataagcacagaaaattataatgtaggtgatcggagctctttcctttgatagagagaacagccccaatgatcctggctttttcactgaacgtatcagaatacatggatgaattggggtaaataaggttttaattcagatctagaagaaagtattgtacgtttgaatgcagatttttatccacagatagttgtagtgtttagacatgacaggacctatcgttgaggtttctaagacttactatgggctgtaaacctgttttttataatgattgcatttgaaagagattcttgaccttatttctaaacgtctagagctctgaaatgtcttgatggaaggtattaaactatttgcctgttgtacaaagaaatgttaagactcgtgaaaagaattactataaggtactgtgaaataactgcgattttgtgagcaaaacatacttggaaatgctgattgatttttatgcttgttagtgtattgcaagaaacacagaaaatgtagttttgttttaataaaccaaaaattgaacataaaaatg

SEQ ID NO: 16964 - DNA, 4988 bp, Homo sapiens
  misc_feature (4920)..(4920): n is a, c, g, or t
  misc_feature (4942)..(4942): n is a, c, g, or t
cactgcagctggcattggccgggactggaagtgcgggcttctgcagcagccgaagctggagctgctagggcagcagcggctcccctgttgtatggacattctgcacccgaaactgatagctgagtcctgaagttttatgttatgaaacagaagaactttcatcccagcacatgatttgggaattacactttgtgacatggatgaatctgcactgacccttggtacaatagatgtttcttatctgccacattcatcagaatacagtgttggtcgatgtaagcacacaagtgaggaatggggtgagtgtggctttagacccaccatcttcagatctgcaactttaaaatggaaagaaagcctaatgagtcggaaaaggccatttgttggaagatgttgttactcctgcactccccagagctgggacaaatttttcaaccccagtatcccgtctttgggtttgcggaatgttatttatatcaatgaaactcacacaagacaccgcggatggcttgcaagacgcctttcttacgttctttttattcaagagcgagatgtgcataagggcatgtttgccaccaatgtgactgaaaatgtgctgaacagcagtagagtacaagaggcaattgcagaagtggctgctgaattaaaccctgatggttctgcccagcagcaatcaaaagccgttaacaaagtgaaaaagaaagctaaaaggattcttcaagaaatggttgccactgtctcaccggcaatgatcagactgactgggtgggtgctgctaaaactgttcaacagcttcttttggaacattcaaattcacaaaggtcaacttgagatggttaaagctgcaactgagacgaatttgccgcttctgtttctaccagttcatagatcccatattgactatctgctgctcactttcattctcttctgccataacatcaaagcaccatacattgcttcaggcaataatctcaacatcccaatcttcagtaccttgatccataagcttgggggcttcttcatacgacgaaggctcgatgaaacaccagatggacggaaagatgttctctatagagctttgctccatgggcatatagttgaattacttcgacagcagcaattcttggagatcttcctggaaggcacacgttctaggagtggaaaaacctcttgtgctcgggcaggacttttgtcagttgtggtagatactctgtctaccaatgtcatcccagacatcttgataatacctgttggaatctcctatgatcgcattatcgaaggtcactacaatggtgaacaactgggcaaacctaagaagaatgagagcctgtggagtgtagcaagaggtgttattagaatgttacgaaaaaactatggttgtgtccgagtggattttgcacagccattttccttaaaggaatatttagaaagccaaagtcagaaaccggtgtctgctctactttccctggagcaagcgttgttaccagctatacttccttcaagacccagtgatgctgctgatgaaggtagagacacgtccattaatgagtccagaaatgcaacagatgaatccctacgaaggaggttgattgcaaatctggctgagcatattctattcactgctagcaagtcctgtgccattatgtccacacacattgtggcttgcctgctcctctacagacacaggcagggaattgatctctccacattggtcgaagacttctttgtgatgaaagaggaagtcctggctcgtgattttgacctggggttctcaggaaattcagaagatgtagtaatgcatgccatacagctgctgggaaattgtgtcacaatcacccacactagcaggaacgatgagttttttatcacccccagcacaactgtcccatcagtcttcgaactcaacttctacagcaatggggtacttcatgtctttatcatggaggccatcatagcttgcagcctttatgcagttctgaacaagaggggactggggggtcccactagcaccccacctaacctgatcagccaggagcagctggtgcggaaggcggccagcctgtgctaccttctctccaatgaaggcaccatctcactgccttgccagacattttaccaagtctgccatgaaacagtaggaaagtttatccagtatggcattcttacagtggcagagcacgatgaccaggaagatatcagtcctagtcttgctgagcagcagtgggacaagaagcttcctgaacctttgtcttggagaagtgatgaagaagatgaagacagtgactttggggaggaacagcgagattgctacctgaaggtgagccaatccaaggagcaccagcagtttatcaccttcttacagagactccttgggcctttgctggaggcctacagctctgctgccatctttgttcacaacttcagtggtcctgttccagaacctgagtatctgcaaaagttgcacaaatacctaataaccagaacagaaagaaatgttgcagtatatgctgagagtgccacatattgtcttgtgaagaatgctgtgaaaatgtttaaggatattggggttttcaaggagaccaaacaaaagagagtgtctgttttagaactgagcagcacttttctacctcaatgcaaccgacaaaaacttctagaatatattctgagttttgtggtgctgtaggtaacgtgtggcactgctggcaaatgaaggtcatgagatgagttccttgtaggtaccagcttctggctcaagagttgaaggtgccgtcgcagggtcaggcctgccctgtcccgaagtgatctcctggaagacaagtgccttctccctccatggatctgtgatcttcccagctctgcatcaacacagcagcctgcagataacacttggggggacctcagcctctattcgcaactcataatccgtagactacaagatgaaatctcaataaattatttttgagtttattaaagattgacattttaagtacaacttttaaggactaattactgtgatggacacagaaatgtagctgtgttctggaactgaatcttacatggtatacttagtgctgctgggtaatttgttggtatattatctggttagtggttaatgcttcctttaaaaataattgagtcatccattcactctttttcagttttatctgtcaatagtagctacatttttaatgggagcaccttttatcccaaagtgctttataaattgagtggactgatatatatcacacccaggtatcactgtgctgtcctttgctgtcagatttagaaatgtttttaagagctatgtgaaaacagacaatattagtttaggtcgggaactgagatattgtaatcaaatagttaacatcaggaagttaatttggctggcaaaattctagggaaacttggccagaaaactggtgttgaaggcttttgctcatataaacaagtgccattgagtttcaaatgaccagcaaatatatttagaacccttcctgttttatgtctgtacctcgtccacccctcaggtaatacctgcctctcacaggtacagctgtttcttggaaatcctccaaccaaatagcagttttcctaacttgattagcttgagctgacagactgttagaatacagttctctggccacagctgatgagggctttctgtactgcacacagattgtgtactgcaccccagtccaggtgactggtacccactcgagttgtgccgtgcacaacctgtccagtatatgcatgtggtggccctactgactggtaatggttagaggcatttatggatttttagctttgaggaaaaaccatgacttttaacaaatttttatgggttatatgcctaaacccttatgccacatagtggtaaataattatgaaaaatggtctgttcataattggtaggtgccttttgtgagcagggagcataattattggtttattatggtaattatggtgattttttaaatatcatgtaatgttaaaacgttttctaacagtttactgttgcttatctccaagatattatggaattaagaatttttccagatgagtgttacatagattctttgaatttagtataaaagtactgagaattaagtttgtacttccataagcttggattttaaacactgatagtatctcatgagtaatgtgtgttttgggagagggagggatgctgattgatatttcacattgtatgaaataccatgtttgaaactcatagcaataatgctatgctgttgtgatccctctcaagttctgcatttaaaatatattttttctttataggaattgatgtataccatgaagtcattgtcagttgtagtagctctgatgttgaatgagatatcatgttttagcattccattttactgactagggtagaagaacacttttcttggctacatttggaggatacccagggagtcttgggtgttccttatctggggaagcaaacatttcactagtctctttttttcatcctttaaattgtaaattaaggattactcaagctcaccattattcaagattgggactcgcttcccagtcgacactctgccctgcctgtcattgctgcaaagagctgctgctttgccaacctaagcaaagaaaatacggcttctcttgcattattttcccttttggttggtttgttttctagaagtacgttcagatgctttggggaatgcaatgtatgatttgctagctctctcaccacttaactcactgtgaggataaatatgcatgctttttgtaattaactggtgctttgaaaatcttttttaagggagaaaaatctcaaccaaagttatgctcatccagacaagctgacctttgagttaatttcagcacaactcattcttcagtgcctcatgactgaaaacaaaaaacaaaaaaaaactcgagggntggccttggaacggcatcaatnttggtgtctgtgagatgagtaagaaagagtagataagagggctaca

SEQ ID NO: 16965 - DNA, 4304 bp, Homo sapiens
cactgcagctggcattggccgggactggaagtgcgggcttctgcagcagccgaagctggagctgctagggcagcagcggctcccctgttgtatggacattctgcacccgaaactgatagctgagtcctgaagttttatgttatgaaacagaagaactttcatcccagcacatgatttgggaattacactttgtgacatggatgaatctgcactgacccttggtacaatagatgtttcttatctgccacattcatcagaatacagtgttggtcgatgtaagcacacaagtgaggaatggggtgagtgtggctttagacccaccatcttcagatctgcaactttaaaatggaaagaaagcctaatgagtcggaaaaggccatttgttggaagatgttgttactcctgcactccccagagctgggacaaatttttcaaccccagtatcccgtctttgggtttgcggaatgttatttatatcaatgaaactcacacaagacaccgcggatggcttgcaagacgcctttcttacgttctttttattcaagagcgagatgtgcataagggcatgtttgccaccaatgtgactgaaaatgtgctgaacagcagtagagtacaagaggcaattgcagaagtggctgctgaattaaaccctgatggttctgcccagcagcaatcaaaagccgttaacaaagtgaaaaagaaagctaaaaggattcttcaagaaatggttgccactgtctcaccggcaatgatcagactgactgggtgggtgctgctaaaactgttcaacagcttcttttggaacattcaaattcacaaaggtcaacttgagatggttaaagctgcaactgagacgaatttgccgcttctgtttctaccagttcatagatcccatattgactatctgctgctcactttcattctcttctgccataacatcaaagcaccatacattgcttcaggcaataatctcaacatcccaatcttcagtaccttgatccataagcttgggggcttcttcatacgacgaaggctcgatgaaacaccagatggacggaaagatgttctctatagagctttgctccatgggcatatagttgaattacttcgacagcagcaattcttggagatcttcctggaaggcacacgttctaggagtggaaaaacctcttgtgctcgggcaggacttttgtcagttgtggtagatactctgtctaccaatgtcatcccagacatcttgataatacctgttggaatctcctatgatcgcattatcgaaggtcactacaatggtgaacaactgggcaaacctaagaagaatgagagcctgtggagtgtagcaagaggtgttattagaatgttacgaaaaaactatggttgtgtccgagtggattttgcacagccattttccttaaaggaatatttagaaagccaaagtcagaaaccggtgtctgctctactttccctggagcaagcgttgttaccagctatacttccttcaagacccagtgatgctgctgatgaaggtagagacacgtccattaatgagtccagaaatgcaacagatgaatccctacgaaggaggttgattgcaaatctggctgagcatattctattcactgctagcaagtcctgtgccattatgtccacacacattgtggcttgcctgctcctctacagacacaggcagggaattgatctctccacattggtcgaagacttctttgtgatgaaagaggaagtcctggctcgtgattttgacctggggttctcaggaaattcagaagatgtagtaatgcatgccatacagctgctgggaaattgtgtcacaatcacccacactagcaggaacgatgagttttttatcacccccagcacaactgtcccatcagtcttcgaactcaacttctacagcaatggggtacttcatgtctttatcatggaggccatcatagcttgcagcctttatgcagttctgaacaagaggggactggggggtcccactagcaccccacctaacctgatcagccaggagcagctggtgcggaaggcggccagcctgtgctaccttctctccaatgaaggcaccatctcactgccttgccagacattttaccaagtctgccatgaaacagtaggaaagtttatccagtatggcattcttacagtggcagagcacgatgaccaggaagatatcagtcctagtcttgctgagcagcagtgggacaagaagcttcctgaacctttgtcttggagaagtgatgaagaagatgaagacagtgactttggggaggaacagcgagattgctacctgaaggtgagccaatccaaggagcaccagcagtttatcaccttcttacagagactccttgggcctttgctggaggcctacagctctgctgccatctttgttcacaacttcagtggtcctgttccagaacctgagtatctgcaaaagttgcacaaatacctaataaccagaacagaaagaaatgttgcagtatatgctgagagtgccacatattgtcttgtgaagaatgctgtgaaaatgtttaaggatattggggttttcaaggagaccaaacaaaagagagtgtctgttttagaactgagcagcacttttctacctcaatgcaaccgacaaaaacttctagaatatattctgagttttgtggtgctgtaggtaacgtgtggcactgctggcaaatgaaggtcatgagatgagttccttgtaggtaccagcttctggctcaagagttgaaggtgccgtcgcagggtcaggcctgccctgtcccgaagtgatctcctggaagacaagtgccttctccctccatggatctgtgatcttcccagctctgcatcaacacagcagcctgcagataacacttggggggacctcagcctctattcgcaactcataatccgtagactacaagatgaaatctcaataaattatttttgagtttattaaagattgacattttaagtacaacttttaaggactaattactgtgatggacacagaaatgtagctgtgttctggaactgaatcttacatggtatacttagtgctgctgggtaatttgttggtatattatctggttagtggttaatgcttcctttaaaaataattgagtcatccattcactctttttcagttttatctgtcaatagtagctacatttttaatgggagcaccttttatcccaaagtgctttataaattgagtggactgatatatatcacacccaggtatcactgtgctgtcctttgctgtcagatttagaaatgtttttaagagctatgtgaaaacagacaatattagtttaggtcgggaactgagatattgtaatcaaatagttaacatcaggaagttaatttggctggcaaaattctagggaaacttggccagaaaactggtgttgaaggcttttgctcatataaacaagtgccattgagtttcaaatgaccagcaaatatatttagaacccttcctgttttatgtctgtacctcgtccacccctcaggtaatacctgcctctcacaggtacagctgtttcttggaaatcctccaaccaaatagcagttttcctaacttgattagcttgagctgacagactgttagaatacagttctctggccacagctgatgagggctttctgtactgcacacagattgtgtactgcaccccagtccaggtgactggtacccactcgagttgtgccgtgcacaacctgtccagtatatgcatgtggtggccctactgactggtaatggttagaggcatttatggatttttagctttgaggaaaaaccatgacttttaacaaatttttatgggttatatgcctaaacccttatgccacatagtggtaaataattatgaaaaatggtctgttcataattggtaggtgccttttgtgagcagggagcataattattggtttattatggtaattatggtgattttttaaatatcatgtaatgttaaaacgttttctaacagtttactgttgcttatctccaagatattatggaattaagaatttttccagatgagtgttacatagattctttgaatttagtataaaagtactgagaattaagtttgtacttccataagcttggattttaaacactgatagtatctcatgagtaatgtgtgttttgggagagggagggatgctgattgatatttcacattgtatgaaataccatggttgaaataataaaaaaaatgtcaagccggtgggatcccttctaaagaaccgcattaaaatttatttttggtctaaggaatttt

SEQ ID NO: 16966 - DNA, 437 bp, Homo sapiens
cagctggtctggctcaaagactgggccaaatggattgcttttaaagacatggagtttgattatgtgttatacatgttagcatatgttcaggttggagaagggccatatgtgggagcgatagaggtagcatgactacattactcaaactgtacatttagcctgtgtcctgtttctccttctgatattttcagtatttgccttctctccccaactaaaaaagaaaaccagcaaggtgcggtggctcatgcctgtaatcccagcactttgagaggccaaggcggttggatcaagaagtcaggagttcaagaccactgtggccaacatggtgaaaccctgtctgtactaaaaacacaaaaattagccgggcatgctggcgtgtgcctgtaatctcagctacttgggaggctgaggcaggagaattgcttgagctggtacca

SEQ ID NO: 16967 - DNA, 6765 bp, Homo sapiens
cgccggtggaggggcgcgcggccgcgagcaaaggagggagggaaggaaggaagagagggaggcgggcaagcaggcgggcgcgggggtcggggactgaggcagtagagggaggcgagagcccggcagccgcttcgcgctgtttgctgcgcgggcttttggagggggcggccgtttagtcggctgaggagaagcggacaccagcggcgttggtgatagcgcctgggggagggggactggagaggcgagaaggggggtcgctgcggtggttctctcgctgtcgctctctctttgcctcgctcccggctcggcgggctcctcccggcgtctctctcgcctccggggtcccgctccccgccccccgcggtatgtcttgatcccgagcagcgggtttcatggggctcctcaggattatgatgccgcccaagttgcagctgctggcggtggtggccttcgcggtggcgatgctcttcttggaaaaccagatccagaaactggaggagtcccgctcgaagctagaaagggctattgcaagacacgaagtccgagaaattgagcagcgacatacaatggatggccctcggcaagatgccactttagatgaggaagaggacatggtgatcatttataacagagttcccaaaacggcaagcacttcatttaccaatatcgcctatgacctgtgtgcaaagaataaataccatgtccttcatatcaacactaccaaaaataatccagtgatgtcattgcaagatcaggtgcgctttgtaaagaatataacttcctggaaagagatgaaaccaggattttatcatggacacgtttcttacttggattttgcaaaatttggtgtgaagaagaaaccaatttacattaatgtcataagggatcctattgagaggctagtttcttattattactttctgagatttggagatgattatagaccagggttacggagacgaaaacaaggagacaaaaagacctttgatgaatgtgtagcagaaggtggctcagactgtgctccagagaagctctggcttcaaatcccgttcttctgtggccatagctccgaatgctggaatgtgggaagcaggtgggctatggatcaagccaagtataacctaattaatgaatattttctggtgggagttactgaagaacttgaagattttatcatgttattggaggcagcattgccccggtttttcaggggtgctactgaactctatcgcacaggaaagaaatctcatcttaggaaaaccacagagaagaaactccccactaaacaaaccattgcaaaactacagcaatctgatcatttaggcaaatggagaatgagttctatgaatttgcactagagcagttccaattcatcagagcccatgccgttcgagaaaaagatggagacctctacatcctcgcacaaaactttttctatgaaaagatttaccctaagtcgaactgagtataaggtgtgactattagattcttgaactaaaatttgaccctgtcttcacctttgttctcagctccacagtctggattgctgacagtaggtgtatatgacaatttgtattgagccaaattaggaaacagacagtaacgtcaaggaagtagatactggctggcattgtcagtgttctaagtttcaggcatttttatttttcctggctaaacgttggtgaaagttataacctcctgcctgggagaaaatatacatcacctaaaatgaacttatggcaggtctaatcaaaaggctaaatacaatttcagaaaaggttctgatactcttgtttttgataaagcattttttcaactaaccatgaattaagatgagtccatttgcctcttctgccttcactgagggtttgggttatacacctctactgaattgtgttaataactgtttggcagtgtgtactttgtttttgtgagtcatgtctcatgaaatttattggaatgtttaatcatatttgctaagaaatgtttctgctgtagttggatttgcccatatttatgtaggtggttttaattttttaaatggtgattagtgttaaaaatcaatttaaatcatgactaatatggtaaaaagataaagcatcaaagcagtatttctcattcctgcctcctcaatatctaatactgggaagatacttcaaagaatattgagattgtctgaagttttagttaagattttcacacattaatatcaaaaaagtaagtttagtatttgtttctccatgggttatttgtaaagctgtaaactgagatatcggtgactccgtattatgactccattagtgagctgtggtatgggtaggattttcctacttcttctgtacttttacctgtagactatttttactaaggtgctttataatgtgttttaaagcattgcatttacaaaacaaggaaaatgctgtaaatattgcatattttatgtatttggaccaaaaggttacaagtaattagacaaaagtggttttgcaccaattttatgtcaagtaaaaccatcagacctactgttcttgtatttctcatttaactttactgttaagacatcactgaaatgaacttcagtaagctttcaattttgatacacagttcattattcataacttgaggcagtaattacagtggaatgagtactggacaaggagtcaaaaaacttgatttcaggtcctagctctagcacttacagctgtgtgatcttgggcaagtcacttaacctctctttgcctcaatttcctcatcttgaaatgaggataataatacctgctgtacctacctcacagggctgttgtgaggattaaatgagatggcatgtgaaagcactttgaaaattgtaaagcgctatgtaaatgtaaggtattatagaaacatctttaacatatagtttcataccattcattttttaacaaagaaagggaaaagtctgcttgtaagctggttgaaaaagttaatcttgatataaatttgtgtttgataaatatcctctcagtgttttatcttccatgtttcaacaactattgaaatatgaaatgcctgtgaactcttaaagcttcatgagcagctgcttgagttcaggaagttcactgttagaaataggctttgttagctgactagggtcagggaaacttttctcttcaaatttgaaagctgtttctgttttcattttacattattattcagaaatggtagctattctatacctatggtttaagtaaatatttctgaataaggcttcaccatactgtaagcattttaggtagattgccttaaaggttatgggagggcatgagggaacacttcttatgagaaaacatttataaacaaaagaaacatttataaactaaagaaaaactaaaagaatgacagaacaatcatcttagcaccctttcctcacaataatataaaaatattaaaagaacataggcaggctttttttaaatttggcttttttctttccttttttcaaattgacttttataggtatttcctgaaagtgtatacaaattatttcctcgcccaaaataaagcaccacttcaaggtgtggtttgacattacatgctaatgaacaaacccagtatgcaagttattcttgcaccacatgctcaaatcttcttgaggtgcattaactcttttaggtaactagagcagtacttggtgaactagatcaggaggtcagtaaactttctgtggaagggccagagagtaaatattttaggctttgcagcccatacggtctctgtcacagctagtcaaccctgccattttaccacaaaagcagcaatagacattatgtaaacaaatgagcacagttatgttccaataaaactttatttacaaaaacagatgacatcccagatgcagaccatgggcaaccaaccattgcactggctaaatcattatttatggagaaatcctctttgtgtctctactctagatgcctaaaagagtttatatacttctaaaagctcctaacttatatccaaagaattgctttctgattcgtgtagtctctcccacagattcataaacttttatgacttatattgtttccaggtgggcatggtttatttcccagtttaacagttcagaataggggcatttattttatcatattttagggtgggttaggagtatcctttctggagactgagaaaggggtgtatttaattccatcaggtccagtacagtactaggagtcataatactttataatcaattaaataaatagaaccactgagacaataatgtatttttttaaagtggcaaatgtggttttcttttttcagcctttgcgctttttcagtattttgaccatagggagataatttttttataatacaaaagtaaccacttggaattttaaagataatgttatgtgtgtatgtgaaatatatatacatatatatatatgtttatttcctaaaagaagaaaagatacctttctgttcaacttgtatcaactcctcttttctaattgctgtgaaatggcaactgttgataaattattgtgattgttttaaaatctaatgggaagtaaaatatattttgattttacccagcttaatctgtaaagtagcacttaaatatatctgatagcaacacttaagatattgcatggggattactttcctatcatccatatgcatttgtgcaacttcaaacatattgggtgcttctgaattcctgatgattggatttaagctattgaaaattggataatttaaacttaatgatttttataattttctgatcttaaaatttggttaatgcctataatctgttgctttttctcaatatgtgtcctattggaaattcctcaaatcgttggtgccatcagtgatttacaaacaatattttgatattgcagatgacttgcttactgtatttgcattgttagaaaacagtttgtagacaatgattcttttttaataaaatcaaataattctaaaagtgctagagaatttaactaaaagctggttcccaaatgcatagctggcattttaatttaaattcaaatctacatagagaacatccgtgtaaatcatctaactggattttcccattggtcattcccaaacacacctatggtcctagaatccttaagagaagcaccctgtaaccttttatgtggtttgcctttaagaggcccaggtgcttctcctttatgatttgagttggcctcttcataaattagtgctgtttactttcagaggaagcagagaagttgctgttatgtttttgcatccgtttaccctatgcaaagttgctgtatgatgccaactaaactgctctttaggcagccttctgaggagaaaagcaaccctgtttcaaatccactgccaattcagctcctctggagtggagctttctgatttcttggagcaggaattttagagattgaaatgaatgatcatttagtcagatttatcctgtaatttcatgcagctttgtggcctttgcagtactatttataaaatggaccctgatggtgatgaactctttagaacgcattactgttaagcctgtgttgagacattgatgctgtctatctcattttttagacagtttttgtagctttctattgagagtcaggtatgtgagcatctctgaagcagtgttgaatgtaattttcggaaacatggattgtgtattttgacttttattttataaatacacagctcaacagtgccttttttttccctcatagtcctgttggaagatgctcactactttctctcttctctctccctgccctcccccactccattcagttgattcatttatgcaaattctgtttccaacttgaaaccattttgtcacatctgttggagagataatcactccttttccttaacattctgccagctttctgatgttgaagtgtttcagttgactacctgatgcaaaagctataaaataaacagtgggaaggggaaaaattggtgtcctgttttaatattttcttttgtagccttgacactgatggacattttccaagctgactcagtgttcagtgtcaacttaactctcagatagtgttgccatcaagaaagcatgcaacatcattggtttctaatgattttatggcttgtgacaatattttatctggactgacatgcctctgctgcttttgctttgtacttcattgctggtaataaaatttcagatggaaaacttacaaaatatatacttaattagaagaaaaaaatagagaaagggctattagaattaaaaaaatttgaaagtaacttaatctaacatttatggcacagtttggacatatccataattttttttgggaacacacatttctgattttttttttcccccttaaagaagaaagtctcaattccattgattttcaattcttagccactggctcattgctttgagcaatgcttgattgattctatttatattatatgatattgggttgataaaataccagttcaatgatgagttttcttaacagaatttggtttgtacttgcagtggctgaacaaagagcatggcttgagaatcaaagggatctgcatttagcaatgtgatgtcagtaaatggacataacaggattgttgtaaaggttgggcatgatgtatgcaaagtactggccagggtagactaataactgatggcatttatatgctgtgctggaatattgttaccaagctgatgtgccgttctcaccctgcagaatactggttttgtcatttcataaatgatatttttataaatatttttgaatgactgta

SEQ ID NO: 16968 - DNA, 2022 bp, Homo sapiens
aaaaagtgtagggagggtacctctcacagaagagtcttatgactggcatcaggggaaggtcaccaagtctttcctgtacatgctgtttatcaaattcattcatctcgaagtattcagtatgccagaaagggctattgcaagacacgaagtccgagaaattgagcagcgacatacaatggatggccctcggcaagatgccactttagatgaggaagaggacatggtgatcatttataacagagttcccaaaacggcaagcacttcatttaccaatatcgcctatgacctgtgtgcaaagaataaataccatgtccttcatatcaacactaccaaaaataatccagtgatgtcattgcaagatcaggtgcgctttgtaaagaatataacttcctggaaagagatgaaaccaggattttatcatggacacgtttcttacttggattttgcaaaatttggtgtgaagaagaaaccaatttacattaatgtcataagggatcctattgagaggctagtttcttattattactttctgagatttggagatgattatagaccagggttacggagacgaaaacaaggagacaaaaagacctttgatgaatgtgtagcagaaggtggctcagactgtgctccagagaagctctggcttcaaatcccgttcttctgtggccatagctccgaatgctggaatgtgggaagcaggtgggctatggatcaagccaagtataacctaattaatgaatattttctggtgggagttactgaagaacttgaagattttatcatgttattggaggcagcattgccccggtttttcaggggtgctactgaactctatcgcacagcaccagatactgctacaccatctcatcggcatggacctatatgtggcagcaagtccatctcatcgcttttggtgaaagtcagtccagtttgtaaagattctcattgccttggaaagtgttccaggaatggactttctgcagtatgatgacctgcaaaagcagcccttccatttacatttcaaactccaagtcagccgtgtcaaagtttgaaccagaactgtggaggataatgggtcagatgcaattagcagcccagagaaccacacgttgcagtctgatttatttttttgcccatcagattccaagaatcctagtgcttaaaagcaactaaacaatcgctctattgtactgaaataaagcccggttaattcagaaatcaattgcaccaccaggtggggcacactctggccccaaacagatggggttgaaaactcccctcaaaatgcagtcttgttaaattaaaaacttgatccaggagtggaacaaatagggagccatgaatggaatggagtcaggtccactcaggcggattctttcttctcccactccttttcctttaaaaaagaaaaattccccatttcactttcatcagtgttagcatctatgcagaaacgcagccatccaccctttgcagttgaatgtgttactttaattagtctgaaaattaaagggcaactccgggccaatgtgaatgattatgaaaatacatgtgcatcccatgcaatcttctcatttaattaatagtcttgtaaactatatggctcactttaagtcagtcaagaggtataacaactccattttaaatatccacttaatacttaacaggatgtgaggaacacactatagcatacggtcccttctcaagtttcactgtctgaaatttttcaaagctgacccaagtcaacctgaaaaatgtttaacaccctgggcttgaacacaagaaactctgtgatgaacagacattcaattacattttttaaaagtgagaagcatttttgtaaaatagcgactctggaaactaattggcagccgcaaaacttgtgagcaaaggccaaatcttgtggggaacttttactacagtaacacgactcaaagaaaatgtgaataaaaggcatctttgtttcccagtcaaattagctgattaagaaataaaacatcttaacatgtttttaaaata

SEQ ID NO: 16969 - DNA, 1389 bp, Homo sapiens
ctgctggcgggaagggagaagagtgggaggaggaaataagcaacaggcagcttcctttcttgacagatggaaaataaagggcctgtgcacagctcggcgaactgctccgtggacctcccagcggggctgctttctgaggtgatggtctcctcgctccttagccagcctggtggagccagctactgacgttggaaaggagttggaggatggagcaccagatactgctacaccatctcatcggcatggacctatatgtggcagcaagtccatctcatcgcttttggtgaaagtcagtccagtttgtaaagattctcattgccttggaaagtgttccaggaatggactttctgcagtatgatgacctgcaaaagcagcccttccatttacatttcaaactccaagtcagccgtgtcaaagtttgaaccagaactgtggaggataatgggtcagatgcaattagcagcccagagaaccacacgttgcagtctgatttatttttttgcccatcagattccaagaatcctagtgcttaaaagcaactaaacaatcgctctattgtactgaaataaagcccggttaattcagaaatcaattgcaccaccaggtggggcacactctggccccaaacagatggggttgaaaactcccctcaaaatgcagtcttgttaaattaaaaacttgatccaggagtggaacaaatagggagccatgaatggaatggagtcaggtccactcaggcggattctttcttctcccactccttttcctttaaaaaagaaaaattccccatttcactttcatcagtgttagcatctatgcagaaacgcagccatccaccctttgcagttgaatgtgttactttaattagtctgaaaattaaagggcaactccgggccaatgtgaatgattatgaaaatacatgtgcatcccatgcaatcttctcatttaattaatagtcttgtaaactatatggctcactttaagtcagtcaagaggtataacaactccattttaaatatccacttaatacttaacaggatgtgaggaacacactatagcatacggtcccttctcaagtttcactgtctgaaatttttcaaagctgacccaagtcaacctgaaaaatgtttaacaccctgggcttgaacacaagaaactctgtgatgaacagacattcaattacattttttaaaagtgagaagcatttttgtaaaatagcgactctggaaactaattggcagccgcaaaacttgtgagcaaaggccaaatcttgtggggaacttttactacagtaacacgactcaaagaaaatgtgaataaaaggcatctttgtttcccagtcaaattagctgattaagaaataaaacatcttaacatgtttttaaaata

SEQ ID NO: 16970 - DNA, 952 bp, Homo sapiens
ctgctggcgggaagggagaagagtgggaggaggaaataagcaacaggcagcttcctttcttgacagatggaaaataaagggcctgtgcacagctcggcgaactgctccgtggacctcccagcggggctgctttctgaggtgatggtctcctcgctccttagccagcctggtggagccagctactgacgttggaaaggagttggaggatggagcaccagatactgctacaccatctcatcggcatggacctatatgtggcagcaagtccatctcatcgcttttggtgaaagtcagtccagtttgtaaagattctcattgtcactgtagacgaggaactgggacaccaaaaggagaaactctggccacgcttgcaccctgttcccaatcctggtccagtgtcacccacagatggtaaggagctctagagacctcaccagcccctgggattggtcacctcactcttctatggacagagattcctgctgggatcctttgagggcaagcagacccttcttccagctcggactgtgaactccactgcagccgtaaggactgtctgtgacagtgagcccgagatgactgggctctgtgctccctcccggccctccaatccttggcctgccacagagaactgagctcttttattagcaccatgaatgtgactgatacagctagccattcccttgtgcgaatgactcagtttattaatgctctgctaaagatggcttctttgcttgccagcagccttaaacagtatttcattaaaactggcttaattattttgagaagacggcccaattaaaagctatacactccctctatgtgagtgtttatacatagagctgtatatataatacatatttgtaagtgtgtgtatatatatatgtgtatgtatgtgtctataaatatataggcttagcaatttcattacatgggataaattgttggaaaa

SEQ ID NO: 16971 - DNA, 1252 bp, Homo sapiens
cgcggtcgcagccggggagcactcgccacggtgctgtggaattctctggtttttcacgcaaggtcaggcgtcctgctggcgccctctcgccaccctgccctcccgtcagaagcccggctcctcgccggggaaggccggatgctggcccgccgggacctgggacttgtgccacatggagtgtcgggagtctccattgccgcgagttctacaccacagggccaggctgtttgctccccatcggtcgctgcccccagcaccctgttgttattaaggactcatttgcttggagcggcatcattacaagggtgtggggtcgcggctcctttgtccaggactacgcaggggcttgaccccagggcgctggtttaggccggatctggggtcccttgtcactcccaggcttcttccacttccgaattctggagaaccgggaatcaagccctgcgcgttcctcttcttcctccttcgtgccgaaagcacgcttcatgtctgccagggcatcagttctgaaacaccagatactgctacaccatctcatcggcatggacctatatgtggcagcaagtccatctcatcgcttttggtgaaagtcagtccagtttgtaaagattctcattgtcactgtagacgaggaactgggacaccaaaaggagaaactctggccacgcttgcaccctgttcccaatcctggtccagtgtcacccacagatggtaaggagctctagagacctcaccagcccctgggattggtcacctcactcttctatggacagagattcctgctgggatcctttgagggcaagcagacccttcttccagctcggactgtgaactccactgcagccgtaaggactgtctgtgacagtgagcccgagatgactgggctctgtgctccctcccggccctccaatccttggcctgccacagagaactgagctcttttattagcaccatgaatgtgactgatacagctagccattcccttgtgcgaatgactcagtttattaatgctctgctaaagatggcttctttgcttgccagcagccttaaacagtatttcattaaaactggcttaattattttgagaagacggcccaattaaaagctatacactccctctatgtgagtgtttatacatagagctgtatatataatacatatttgtaagtgtgtgtatatatatatgtgtatgtatgtgtctataaatatataggcttagcaatttcattacatgggataaattgttggaaaa

SEQ ID NO: 16972 - DNA, 1198 bp, Homo sapiens
ctgctggcgggaagggagaagagtgggaggaggaaataagcaacaggcagcttcctttcttgacagatggaaaataaagggcctgtgcacagctcggcgaactgctccgtggacctcccagcggggctgctttctgaggtgatggtctcctcgctccttagccagcctggtggagccagctactgacgttggaaaggagttggaggatggagcaccagatactgctacaccatctcatcggcatggacctatatgtggcagcaagtccatctcatcgcttttggtgaaagtcagtccagtttgtaaagattctcattgtgagtatggctaaaccatccctttgactaaaaaccaaaccagatactcctttacctatcaatacctcctgctgctaaaaagcagcagctaaaaagcagcaggaggtattgataagggaagtcctatctaaattcctggtttagagaatgactatcctcattttatgagttaaacattacccccaattaacacctctgaaaaaccctcccaacatgtttatctcattaatatcacggggttggcaggtcactgtagacgaggaactgggacaccaaaaggagaaactctggccacgcttgcaccctgttcccaatcctggtccagtgtcacccacagatggtaaggagctctagagacctcaccagcccctgggattggtcacctcactcttctatggacagagattcctgctgggatcctttgagggcaagcagacccttcttccagctcggactgtgaactccactgcagccgtaaggactgtctgtgacagtgagcccgagatgactgggctctgtgctccctcccggccctccaatccttggcctgccacagagaactgagctcttttattagcaccatgaatgtgactgatacagctagccattcccttgtgcgaatgactcagtttattaatgctctgctaaagatggcttctttgcttgccagcagccttaaacagtatttcattaaaactggcttaattattttgagaagacggcccaattaaaagctatacactccctctatgtgagtgtttatacatagagctgtatatataatacatatttgtaagtgtgtgtatatatatatgtgtatgtatgtgtctataaatatataggcttagcaatttcattacatgggataaattgttggaaaa

SEQ ID NO: 16973 - DNA, 533 bp, Homo sapiens
cgcggtcgcagccggggagcactcgccacggtgctgtggaattctctggtttttcacgcaaggtcaggcgtcctgctggcgccctctcgccaccctgccctcccgtcagaagcccggctcctcgccggggaaggccggatgctggcccgccgggacctgggacttgtgccacatggagtgtcgggagtctccattgccgcgagttctacaccacagggccaggctgtttgctccccatcggtcgctgcccccagcaccctgttgttattaaggactcatttgcttggagcggcatcattacaagggtgtgggcaccagatactgctacaccatctcatcggcatggacctatatgtggcagcaagtccatctcatcgcttttggtgaaagtcagtccagtttgtaaagattctcattgttttgcaggcttagaggtcttggcttccaaagggagaaagcttccaccaggggacacagaagggtcccattgaactctaagctatggttactggtggggcacttcagattccatg

SEQ ID NO: 16974 - DNA, 6533 bp, Homo sapiens
cgccggtggaggggcgcgcggccgcgagcaaaggagggagggaaggaaggaagagagggaggcgggcaagcaggcgggcgcgggggtcggggactgaggcagtagagggaggcgagagcccggcagccgcttcgcgctgtttgctgcgcgggcttttggagggggcggccgtttagtcggctgaggagaagcggacaccagcggcgttggtgatagcgcctgggggagggggactggagaggcgagaaggggggtcgctgcggtggttctctcgctgtcgctctctctttgcctcgctcccggctcggcgggctcctcccggcgtctctctcgcctccggggtcccgctccccgccccccgcggtatgtcttgatcccgagcagcgggtttcatggggctcctcaggattatgatgccgcccaagttgcagctgctggcggtggtggccttcgcggtggcgatgctcttcttggaaaaccagatccagaaactggaggagtcccgctcgaagctagaaagggctattgcaagacacgaagtccgagaaattgagcagcgacatacaatggatggccctcggcaagatgccactttagatgaggaagaggacatggtgatcatttataacagagttcccaaaacggcaagcacttcatttaccaatatcgcctatgacctgtgtgcaaagaataaataccatgtccttcatatcaacactaccaaaaataatccagtgatgtcattgcaagatcaggtgcgctttgtaaagaatataacttcctggaaagagatgaaaccaggattttatcatggacacgtttcttacttggattttgcaaaatttggtgtgaagaagaaaccaatttacattaatgtcataagggatcctattgagaggctagtttcttattattactttctgagatttggagatgattatagaccagggttacggagacgaaaacaaggagacaaaaagacctttgatgaatgtgtagcagaaggtggctcagactgtgctccagagaagctctggcttcaaatcccgttcttctgtggccatagctccgaatgctggaatgtgggaagcaggtgggctatggatcaagccaagtataacctaattaatgaatattttctggtgggagttactgaagaacttgaagattttatcatgttattggaggcagcattgccccggtttttcaggggtgctactgaactctatcgcacaggaaagaaatctcatcttaggaaaaccacagagaagaaactccccactaaacaaaccattgcaaaactacagcaatctgatcatttaggcaaatggagaatgagttctatgaatttgcactagagcagttccaattcatcagagcccatgccgttcgagaaaaagatggagacctctacatcctcgcacaaaactttttctatgaaaagatttaccctaagtcgaactgagtataaggtgtgactattagattcttgaactaaaatttgaccctgtcttcacctttgttctcagctccacagtctggattgctgacagtaggtgtatatgacaatttgtattgagccaaattaggaaacagacagtaacgtcaaggaagtagatactggctggcattgtcagtgttctaagtttcaggcatttttatttttcctggctaaacgttggtgaaagttataacctcctgcctgggagaaaatatacatcacctaaaatgaacttatggcaggtctaatcaaaaggctaaatacaatttcagaaaaggttctgatactcttgtttttgataaagcattttttcaactaaccatgaattaagatgagtccatttgcctcttctgccttcactgagggtttgggttatacacctctactgaattgtgttaataactgtttggcagtgtgtactttgtttttgtgagtcatgtctcatgaaatttattggaatgtttaatcatatttgctaagaaatgtttctgctgtagttggatttgcccatatttatgtaggtggttttaattttttaaatggtgattagtgttaaaaatcaatttaaatcatgactaatatggtaaaaagataaagcatcaaagcagtatttctcattcctgcctcctcaatatctaatactgggaagatacttcaaagaatattgagattgtctgaagttttagttaagattttcacacattaatatcaaaaaagtaagtttagtatttgtttctccatgggttatttgtaaagctgtaaactgagatatcggtgactccgtattatgactccattagtgagctgtggtatgggtaggattttcctacttcttctgtacttttacctgtagactatttttactaaggtgctttataatgtgttttaaagcattgcatttacaaaacaaggaaaatgctgtaaatattgcatattttatgtatttggaccaaaaggttacaagtaattagacaaaagtggttttgcaccaattttatgtcaagtaaaaccatcagacctactgttcttgtatttctcatttaactttactgttaagacatcactgaaatgaacttcagtaagctttcaattttgatacacagttcattattcataacttgaggcagtaattacagtggaatgagtactggacaaggagtcaaaaaacttgatttcaggtcctagctctagcacttacagctgtgtgatcttgggcaagtcacttaacctctctttgcctcaatttcctcatcttgaaatgaggataataatacctgctgtacctacctcacagggctgttgtgaggattaaatgagatggcatgtgaaagcactttgaaaattgtaaagcgctatgtaaatgtaaggtattatagaaacatctttaacatatagtttcataccattcattttttaacaaagaaagggaaaagtctgcttgtaagctggttgaaaaagttaatcttgatataaatttgtgtttgataaatatcctctcagtgttttatcttccatgtttcaacaactattgaaatatgaaatgcctgtgaactcttaaagcttcatgagcagctgcttgagttcaggaagttcactgttagaaataggctttgttagctgactagggtcagggaaacttttctcttcaaatttgaaagctgtttctgttttcattttacattattattcagaaatggtagctattctatacctatggtttaagtaaatatttctgaataaggcttcaccatactgtaagcattttaggtagattgccttaaaggttatgggagggcatgagggaacacttcttatgagaaaacatttataaacaaaagaaacatttataaactaaagaaaaactaaaagaatgacagaacaatcatcttagcaccctttcctcacaataatataaaaatattaaaagaacataggcaggctttttttaaatttggcttttttctttccttttttcaaattgacttttataggtatttcctgaaagtgtatacaaattatttcctcgcccaaaataaagcaccacttcaaggtgtggtttgacattacatgctaatgaacaaacccagtatgcaagttattcttgcaccacatgctcaaatcttcttgaggtgcattaactcttttaggtaactagagcagtacttggtgaactagatcaggaggtcagtaaactttctgtggaagggccagagagtaaatattttaggctttgcagcccatacggtctctgtcacagctagtcaaccctgccattttaccacaaaagcagcaatagacattatgtaaacttttatgacttatattgtttccaggtgggcatggtttatttcccagtttaacagttcagaataggggcatttattttatcatattttagggtgggttaggagtatcctttctggagactgagaaaggggtgtatttaattccatcaggtccagtacagtactaggagtcataatactttataatcaattaaataaatagaaccactgagacaataatgtatttttttaaagtggcaaatgtggttttcttttttcagcctttgcgctttttcagtattttgaccatagggagataatttttttataatacaaaagtaaccacttggaattttaaagataatgttatgtgtgtatgtgaaatatatatacatatatatatatgtttatttcctaaaagaagaaaagatacctttctgttcaacttgtatcaactcctcttttctaattgctgtgaaatggcaactgttgataaattattgtgattgttttaaaatctaatgggaagtaaaatatattttgattttacccagcttaatctgtaaagtagcacttaaatatatctgatagcaacacttaagatattgcatggggattactttcctatcatccatatgcatttgtgcaacttcaaacatattgggtgcttctgaattcctgatgattggatttaagctattgaaaattggataatttaaacttaatgatttttataattttctgatcttaaaatttggttaatgcctataatctgttgctttttctcaatatgtgtcctattggaaattcctcaaatcgttggtgccatcagtgatttacaaacaatattttgatattgcagatgacttgcttactgtatttgcattgttagaaaacagtttgtagacaatgattcttttttaataaaatcaaataattctaaaagtgctagagaatttaactaaaagctggttcccaaatgcatagctggcattttaatttaaattcaaatctacatagagaacatccgtgtaaatcatctaactggattttcccattggtcattcccaaacacacctatggtcctagaatccttaagagaagcaccctgtaaccttttatgtggtttgcctttaagaggcccaggtgcttctcctttatgatttgagttggcctcttcataaattagtgctgtttactttcagaggaagcagagaagttgctgttatgtttttgcatccgtttaccctatgcaaagttgctgtatgatgccaactaaactgctctttaggcagccttctgaggagaaaagcaaccctgtttcaaatccactgccaattcagctcctctggagtggagctttctgatttcttggagcaggaattttagagattgaaatgaatgatcatttagtcagatttatcctgtaatttcatgcagctttgtggcctttgcagtactatttataaaatggaccctgatggtgatgaactctttagaacgcattactgttaagcctgtgttgagacattgatgctgtctatctcattttttagacagtttttgtagctttctattgagagtcaggtatgtgagcatctctgaagcagtgttgaatgtaattttcggaaacatggattgtgtattttgacttttattttataaatacacagctcaacagtgccttttttttccctcatagtcctgttggaagatgctcactactttctctcttctctctccctgccctcccccactccattcagttgattcatttatgcaaattctgtttccaacttgaaaccattttgtcacatctgttggagagataatcactccttttccttaacattctgccagctttctgatgttgaagtgtttcagttgactacctgatgcaaaagctataaaataaacagtgggaaggggaaaaattggtgtcctgttttaatattttcttttgtagccttgacactgatggacattttccaagctgactcagtgttcagtgtcaacttaactctcagatagtgttgccatcaagaaagcatgcaacatcattggtttctaatgattttatggcttgtgacaatattttatctggactgacatgcctctgctgcttttgctttgtacttcattgctggtaataaaatttcagatggaaaacttacaaaatatatacttaattagaagaaaaaaatagagaaagggctattagaattaaaaaaatttgaaagtaacttaatctaacatttatggcacagtttggacatatccataattttttttgggaacacacatttctgattttttttttcccccttaaagaagaaagtctcaattccattgattttcaattcttagccactggctcattgctttgagcaatgcttgattgattctatttatattatatgatattgggttgataaaataccagttcaatgatgagttttcttaacagaatttggtttgtacttgcagtggctgaacaaagagcatggcttgagaatcaaagggatctgcatttagcaatgtgatgtcagtaaatggacataacaggattgttgtaaaggttgggcatgatgtatgcaaagtactggccagggtagactaataactgatggcatttatatgctgtgctggaatattgttaccaagctgatgtgccgttctcaccctgcagaatactggttttgtcatttcataaatgatatttttataaatatttttgaatgactgta

SEQ ID NO: 16975 - DNA, 6422 bp, Homo sapiens
cgccggtggaggggcgcgcggccgcgagcaaaggagggagggaaggaaggaagagagggaggcgggcaagcaggcgggcgcgggggtcggggactgaggcagtagagggaggcgagagcccggcagccgcttcgcgctgtttgctgcgcgggcttttggagggggcggccgtttagtcggctgaggagaagcggacaccagcggcgttggtgatagcgcctgggggagggggactggagaggcgagaaggggggtcgctgcggtggttctctcgctgtcgctctctctttgcctcgctcccggctcggcgggctcctcccggcgtctctctcgcctccggggtcccgctccccgccccccgcggtatgtcttgatcccgagcagcgggtttcatggggctcctcaggattatgatgccgcccaagttgcagctgctggcggtggtggccttcgcggtggcgatgctcttcttggaaaaccagatccagaaactggaggagtcccgctcgaagctagaaagggctattgcaagacacgaagtccgagaaattgagcagcgacatacaatggatggccctcggcaagatgccactttagatgaggaagaggacatggtgatcatttataacagagttcccaaaacggcaagcacttcatttaccaatatcgcctatgacctgtgtgcaaagaataaataccatgtccttcatatcaacactaccaaaaataatccagtgatgtcattgcaagatcaggtgcgctttgtaaagaatataacttcctggaaagagatgaaaccaggattttatcatggacacgtttcttacttggattttgcaaaatttggtgtgaagaagaaaccaatttacattaatgtcataagggatcctattgagaggctagtttcttattattactttctgagatttggagatgattatagaccagggttacggagacgaaaacaaggagacaaaaagacctttgatgaatgtgtagcagaaggtggctcagactgtgctccagagaagctctggcttcaaatcccgttcttctgtggccatagctccgaatgctggaatgtgggaagcaggtgggctatggatcaagccaagtataacctaattaatgaatattttctggtgggagttactgaagaacttgaagattttatcatgttattggaggcagcattgccccggtttttcaggggtgctactgaactctatcgcacaggaaagaaatctcatcttaggaaaaccacagagaagaaactccccactaaacaaaccattgcaaaactacagcaatctgatcatttaggcaaatggagaatgagttctatgaatttgcactagagcagttccaattcatcagagcccatgccgttcgagaaaaagatggagacctctacatcctcgcacaaaactttttctatgaaaagatttaccctaagtcgaactgagtataaggtgtgactattagattcttgaactaaaatttgaccctgtcttcacctttgttctcagctccacagtctggattgctgacagtaggtgtatatgacaatttgtattgagccaaattaggaaacagacagtaacgtcaaggaagtagatactggctggcattgtcagtgttctaagtttcaggcatttttatttttcctggctaaacgttggtgaaagttataacctcctgcctgggagaaaatatacatcacctaaaatgaacttatggcaggtctaatcaaaaggctaaatacaatttcagaaaaggttctgatactcttgtttttgataaagcattttttcaactaaccatgaattaagatgagtccatttgcctcttctgccttcactgagggtttgggttatacacctctactgaattgtgttaataactgtttggcagtgtgtactttgtttttgtgagtcatgtctcatgaaatttattggaatgtttaatcatatttgctaagaaatgtttctgctgtagttggatttgcccatatttatgtaggtggttttaattttttaaatggtgattagtgttaaaaatcaatttaaatcatgactaatatggtaaaaagataaagcatcaaagcagtatttctcattcctgcctcctcaatatctaatactgggaagatacttcaaagaatattgagattgtctgaagttttagttaagattttcacacattaatatcaaaaaagtaagtttagtatttgtttctccatgggttatttgtaaagctgtaaactgagatatcggtgactccgtattatgactccattagtgagctgtggtatgggtaggattttcctacttcttctgtacttttacctgtagactatttttactaaggtgctttataatgtgttttaaagcattgcatttacaaaacaaggaaaatgctgtaaatattgcatattttatgtatttggaccaaaaggttacaagtaattagacaaaagtggttttgcaccaattttatgtcaagtaaaaccatcagacctactgttcttgtatttctcatttaactttactgttaagacatcactgaaatgaacttcagtaagctttcaattttgatacacagttcattattcataacttgaggcagtaattacagtggaatgagtactggacaaggagtcaaaaaacttgatttcaggtcctagctctagcacttacagctgtgtgatcttgggcaagtcacttaacctctctttgcctcaatttcctcatcttgaaatgaggataataatacctgctgtacctacctcacagggctgttgtgaggattaaatgagatggcatgtgaaagcactttgaaaattgtaaagcgctatgtaaatgtaaggtattatagaaacatctttaacatatagtttcataccattcattttttaacaaagaaagggaaaagtctgcttgtaagctggttgaaaaagttaatcttgatataaatttgtgtttgataaatatcctctcagtgttttatcttccatgtttcaacaactattgaaatatgaaatgcctgtgaactcttaaagcttcatgagcagctgcttgagttcaggaagttcactgttagaaataggctttgttagctgactagggtcagggaaacttttctcttcaaatttgaaagctgtttctgttttcattttacattattattcagaaatggtagctattctatacctatggtttaagtaaatatttctgaataaggcttcaccatactgtaagcattttaggtagattgccttaaaggttatgggagggcatgagggaacacttcttatgagaaaacatttataaacaaaagaaacatttataaactaaagaaaaactaaaagaatgacagaacaatcatcttagcaccctttcctcacaataatataaaaatattaaaagaacataggcaggctttttttaaatttggcttttttctttccttttttcaaattgacttttataggtatttcctgaaagtgtatacaaattatttcctcgcccaaaataaagcaccacttcaaggtgtggtttgacattacatgctaatgaacaaacccagtatgcaagttattcttgcaccacatgctcaaatcttcttgaggtgcattaactcttttaggtaactagagcagtacttggtgaactagatcaggaggtcagtaaactttctgtggaagggccagagagtaaatattttaggctttgcagcccatacggtctctgtcacagctagtcaaccctgccattttaccacaaaagcagcaatagacattatgtaaacaaatgagcacagttatgttccaataaaactttatttacaaaaacagatgacatcccagatgcagaccatgggcaaccaaccattgcactggctaaatcattatttatggagaaatcctctttgtgtctctactctagatgcctaaaagagtttatatacttctaaaagctcctaacttatatccaaagaattgctttctgattcgtgtagtctctcccacagattcataaacttttatgacttatattgtttccaggtgggcatggtttatttcccagtttaacagttcagaataggggcatttattttatcatattttagggtgggttaggagtatcctttctggagactgagaaaggggtgtatttaattccatcaggtccagtacagtactaggagtcataatactttataatcaattaaataaatagaaccactgagacaataatgtatttttttaaagtggcaaatgtggttttcttttttcagcctttgcgctttttcagtattttgaccatagggagataatttttttataatacaaaagtaaccacttggaattttaaagataatgttatgtgtgtatgtgaaatatatatacatatatatatatgtttatttcctaaaagaagaaaagatacctttctgttcaacttgtatcaactcctcttttctaattgctgtgaaatggcaactgttgataaattattgtgattgttttaaaatctaatgggaagtaaaatatattttgattttacccagcttaatctgtaaagtagcacttaaatatatctgatagcaacacttaagatattgcatggggattactttcctatcatccatatgcatttgtgcaacttcaaacatattgggtgcttctgaattcctgatgattggatttaagctattgaaaattggataatttaaacttaatgatttttataattttctgatcttaaaatttggttaatgcctataatctgttgctttttctcaatatgtgtcctattggaaattcctcaaatcgttggtgccatcagtgatttacaaacaatattttgatattgcagatgacttgcttactgtatttgcattgttagaaaacagtttgtagacaatgattcttttttaataaaatcaaataattctaaaagtgctagagaatttaactaaaagctggttcccaaatgcatagctggcattttaatttaaattcaaatctacatagagaacatccgtgtaaatcatctaactggattttcccattggtcattcccaaacacacctatggtcctagaatccttaagagaagcaccctgtaaccttttatgtggtttgcctttaagaggcccaggtgcttctcctttatgatttgagttggcctcttcataaattagtgctgtttactttcagaggaagcagagaagttgctgttatgtttttgcatccgtttaccctatgcaaagttgctgtatgatgccaactaaactgctctttaggcagccttctgaggagaaaagcaaccctgtttcaaatccactgccaattcagctcctctggagtggagctttctgatttcttggagcaggaattttagagattgaaatgaatgatcatttagtcagatttatcctgtaatttcatgcaaattctgtttccaacttgaaaccattttgtcacatctgttggagagataatcactccttttccttaacattctgccagctttctgatgttgaagtgtttcagttgactacctgatgcaaaagctataaaataaacagtgggaaggggaaaaattggtgtcctgttttaatattttcttttgtagccttgacactgatggacattttccaagctgactcagtgttcagtgtcaacttaactctcagatagtgttgccatcaagaaagcatgcaacatcattggtttctaatgattttatggcttgtgacaatattttatctggactgacatgcctctgctgcttttgctttgtacttcattgctggtaataaaatttcagatggaaaacttacaaaatatatacttaattagaagaaaaaaatagagaaagggctattagaattaaaaaaatttgaaagtaacttaatctaacatttatggcacagtttggacatatccataattttttttgggaacacacatttctgattttttttttcccccttaaagaagaaagtctcaattccattgattttcaattcttagccactggctcattgctttgagcaatgcttgattgattctatttatattatatgatattgggttgataaaataccagttcaatgatgagttttcttaacagaatttggtttgtacttgcagtggctgaacaaagagcatggcttgagaatcaaagggatctgcatttagcaatgtgatgtcagtaaatggacataacaggattgttgtaaaggttgggcatgatgtatgcaaagtactggccagggtagactaataactgatggcatttatatgctgtgctggaatattgttaccaagctgatgtgccgttctcaccctgcagaatactggttttgtcatttcataaatgatatttttataaatatttttgaatgactgta

SEQ ID NO: 16976 - DNA, 6374 bp, Homo sapiens
aaaaagtgtagggagggtacctctcacagaagagtcttatgactggcatcaggggaaggtcaccaagtctttcctgtacatgctgtttatcaaattcattcatctcgaagtattcagtatgccagaaagggctattgcaagacacgaagtccgagaaattgagcagcgacatacaatggatggccctcggcaagatgccactttagatgaggaagaggacatggtgatcatttataacagagttcccaaaacggcaagcacttcatttaccaatatcgcctatgacctgtgtgcaaagaataaataccatgtccttcatatcaacactaccaaaaataatccagtgatgtcattgcaagatcaggtgcgctttgtaaagaatataacttcctggaaagagatgaaaccaggattttatcatggacacgtttcttacttggattttgcaaaatttggtgtgaagaagaaaccaatttacattaatgtcataagggatcctattgagaggctagtttcttattattactttctgagatttggagatgattatagaccagggttacggagacgaaaacaaggagacaaaaagacctttgatgaatgtgtagcagaaggtggctcagactgtgctccagagaagctctggcttcaaatcccgttcttctgtggccatagctccgaatgctggaatgtgggaagcaggtgggctatggatcaagccaagtataacctaattaatgaatattttctggtgggagttactgaagaacttgaagattttatcatgttattggaggcagcattgccccggtttttcaggggtgctactgaactctatcgcacaggaaagaaatctcatcttaggaaaaccacagagaagaaactccccactaaacaaaccattgcaaaactacagcaatctgatcatttaggcaaatggagaatgagttctatgaatttgcactagagcagttccaattcatcagagcccatgccgttcgagaaaaagatggagacctctacatcctcgcacaaaactttttctatgaaaagatttaccctaagtcgaactgagtataaggtgtgactattagattcttgaactaaaatttgaccctgtcttcacctttgttctcagctccacagtctggattgctgacagtaggtgtatatgacaatttgtattgagccaaattaggaaacagacagtaacgtcaaggaagtagatactggctggcattgtcagtgttctaagtttcaggcatttttatttttcctggctaaacgttggtgaaagttataacctcctgcctgggagaaaatatacatcacctaaaatgaacttatggcaggtctaatcaaaaggctaaatacaatttcagaaaaggttctgatactcttgtttttgataaagcattttttcaactaaccatgaattaagatgagtccatttgcctcttctgccttcactgagggtttgggttatacacctctactgaattgtgttaataactgtttggcagtgtgtactttgtttttgtgagtcatgtctcatgaaatttattggaatgtttaatcatatttgctaagaaatgtttctgctgtagttggatttgcccatatttatgtaggtggttttaattttttaaatggtgattagtgttaaaaatcaatttaaatcatgactaatatggtaaaaagataaagcatcaaagcagtatttctcattcctgcctcctcaatatctaatactgggaagatacttcaaagaatattgagattgtctgaagttttagttaagattttcacacattaatatcaaaaaagtaagtttagtatttgtttctccatgggttatttgtaaagctgtaaactgagatatcggtgactccgtattatgactccattagtgagctgtggtatgggtaggattttcctacttcttctgtacttttacctgtagactatttttactaaggtgctttataatgtgttttaaagcattgcatttacaaaacaaggaaaatgctgtaaatattgcatattttatgtatttggaccaaaaggttacaagtaattagacaaaagtggttttgcaccaattttatgtcaagtaaaaccatcagacctactgttcttgtatttctcatttaactttactgttaagacatcactgaaatgaacttcagtaagctttcaattttgatacacagttcattattcataacttgaggcagtaattacagtggaatgagtactggacaaggagtcaaaaaacttgatttcaggtcctagctctagcacttacagctgtgtgatcttgggcaagtcacttaacctctctttgcctcaatttcctcatcttgaaatgaggataataatacctgctgtacctacctcacagggctgttgtgaggattaaatgagatggcatgtgaaagcactttgaaaattgtaaagcgctatgtaaatgtaaggtattatagaaacatctttaacatatagtttcataccattcattttttaacaaagaaagggaaaagtctgcttgtaagctggttgaaaaagttaatcttgatataaatttgtgtttgataaatatcctctcagtgttttatcttccatgtttcaacaactattgaaatatgaaatgcctgtgaactcttaaagcttcatgagcagctgcttgagttcaggaagttcactgttagaaataggctttgttagctgactagggtcagggaaacttttctcttcaaatttgaaagctgtttctgttttcattttacattattattcagaaatggtagctattctatacctatggtttaagtaaatatttctgaataaggcttcaccatactgtaagcattttaggtagattgccttaaaggttatgggagggcatgagggaacacttcttatgagaaaacatttataaacaaaagaaacatttataaactaaagaaaaactaaaagaatgacagaacaatcatcttagcaccctttcctcacaataatataaaaatattaaaagaacataggcaggctttttttaaatttggcttttttctttccttttttcaaattgacttttataggtatttcctgaaagtgtatacaaattatttcctcgcccaaaataaagcaccacttcaaggtgtggtttgacattacatgctaatgaacaaacccagtatgcaagttattcttgcaccacatgctcaaatcttcttgaggtgcattaactcttttaggtaactagagcagtacttggtgaactagatcaggaggtcagtaaactttctgtggaagggccagagagtaaatattttaggctttgcagcccatacggtctctgtcacagctagtcaaccctgccattttaccacaaaagcagcaatagacattatgtaaacaaatgagcacagttatgttccaataaaactttatttacaaaaacagatgacatcccagatgcagaccatgggcaaccaaccattgcactggctaaatcattatttatggagaaatcctctttgtgtctctactctagatgcctaaaagagtttatatacttctaaaagctcctaacttatatccaaagaattgctttctgattcgtgtagtctctcccacagattcataaacttttatgacttatattgtttccaggtgggcatggtttatttcccagtttaacagttcagaataggggcatttattttatcatattttagggtgggttaggagtatcctttctggagactgagaaaggggtgtatttaattccatcaggtccagtacagtactaggagtcataatactttataatcaattaaataaatagaaccactgagacaataatgtatttttttaaagtggcaaatgtggttttcttttttcagcctttgcgctttttcagtattttgaccatagggagataatttttttataatacaaaagtaaccacttggaattttaaagataatgttatgtgtgtatgtgaaatatatatacatatatatatatgtttatttcctaaaagaagaaaagatacctttctgttcaacttgtatcaactcctcttttctaattgctgtgaaatggcaactgttgataaattattgtgattgttttaaaatctaatgggaagtaaaatatattttgattttacccagcttaatctgtaaagtagcacttaaatatatctgatagcaacacttaagatattgcatggggattactttcctatcatccatatgcatttgtgcaacttcaaacatattgggtgcttctgaattcctgatgattggatttaagctattgaaaattggataatttaaacttaatgatttttataattttctgatcttaaaatttggttaatgcctataatctgttgctttttctcaatatgtgtcctattggaaattcctcaaatcgttggtgccatcagtgatttacaaacaatattttgatattgcagatgacttgcttactgtatttgcattgttagaaaacagtttgtagacaatgattcttttttaataaaatcaaataattctaaaagtgctagagaatttaactaaaagctggttcccaaatgcatagctggcattttaatttaaattcaaatctacatagagaacatccgtgtaaatcatctaactggattttcccattggtcattcccaaacacacctatggtcctagaatccttaagagaagcaccctgtaaccttttatgtggtttgcctttaagaggcccaggtgcttctcctttatgatttgagttggcctcttcataaattagtgctgtttactttcagaggaagcagagaagttgctgttatgtttttgcatccgtttaccctatgcaaagttgctgtatgatgccaactaaactgctctttaggcagccttctgaggagaaaagcaaccctgtttcaaatccactgccaattcagctcctctggagtggagctttctgatttcttggagcaggaattttagagattgaaatgaatgatcatttagtcagatttatcctgtaatttcatgcagctttgtggcctttgcagtactatttataaaatggaccctgatggtgatgaactctttagaacgcattactgttaagcctgtgttgagacattgatgctgtctatctcattttttagacagtttttgtagctttctattgagagtcaggtatgtgagcatctctgaagcagtgttgaatgtaattttcggaaacatggattgtgtattttgacttttattttataaatacacagctcaacagtgccttttttttccctcatagtcctgttggaagatgctcactactttctctcttctctctccctgccctcccccactccattcagttgattcatttatgcaaattctgtttccaacttgaaaccattttgtcacatctgttggagagataatcactccttttccttaacattctgccagctttctgatgttgaagtgtttcagttgactacctgatgcaaaagctataaaataaacagtgggaaggggaaaaattggtgtcctgttttaatattttcttttgtagccttgacactgatggacattttccaagctgactcagtgttcagtgtcaacttaactctcagatagtgttgccatcaagaaagcatgcaacatcattggtttctaatgattttatggcttgtgacaatattttatctggactgacatgcctctgctgcttttgctttgtacttcattgctggtaataaaatttcagatggaaaacttacaaaatatatacttaattagaagaaaaaaatagagaaagggctattagaattaaaaaaatttgaaagtaacttaatctaacatttatggcacagtttggacatatccataattttttttgggaacacacatttctgattttttttttcccccttaaagaagaaagtctcaattccattgattttcaattcttagccactggctcattgctttgagcaatgcttgattgattctatttatattatatgatattgggttgataaaataccagttcaatgatgagttttcttaacagaatttggtttgtacttgcagtggctgaacaaagagcatggcttgagaatcaaagggatctgcatttagcaatgtgatgtcagtaaatggacataacaggattgttgtaaaggttgggcatgatgtatgcaaagtactggccagggtagactaataactgatggcatttatatgctgtgctggaatattgttaccaagctgatgtgccgttctcaccctgcagaatactggttttgtcatttcataaatgatatttttataaatatttttgaatgactgta

SEQ ID NO: 16977 - DNA, 2027 bp, Homo sapiens
cgccggtggaggggcgcgcggccgcgagcaaaggagggagggaaggaaggaagagagggaggcgggcaagcaggcgggcgcgggggtcggggactgaggcagtagagggaggcgagagcccggcagccgcttcgcgctgtttgctgcgcgggcttttggagggggcggccgtttagtcggctgaggagaagcggacaccagcggcgttggtgatagcgcctgggggagggggactggagaggcgagaaggggggtcgctgcggtggttctctcgctgtcgctctctctttgcctcgctcccggctcggcgggctcctcccggcgtctctctcgcctccggggtcccgctccccgccccccgcggtatgtcttgatcccgagcagcgggtttcatggggctcctcaggattatgatgccgcccaagttgcagctgctggcggtggtggccttcgcggtggcgatgctcttcttggaaaaccagatccagaaactggaggagtcccgctcgaagctagaaagggctattgcaagacacgaagtccgagaaattgagcagcgacatacaatggatggccctcggcaagatgccactttagatgaggaagaggacatggtgatcatttataacagagttcccaaaacggcaagcacttcatttaccaatatcgcctatgacctgtgtgcaaagaataaataccatgtccttcatatcaacactaccaaaaataatccagtgatgtcattgcaagatcaggtgcgctttgtaaagaatataacttcctggaaagagatgaaaccaggattttatcatggacacgtttcttacttggattttgcaaaatttggtgtgaagaagaaaccaatttacattaatgtcataagggatcctattgagaggctagtttcttattattactttctgagatttggagatgattatagaccagggttacggagacgaaaacaaggagacaaaaagacctttgatgaatgtgtagcagaaggtggctcagactgtgctccagagaagctctggcttcaaatcccgttcttctgtggccatagctccgaatgctggaatgtgggaagcaggtgggctatggatcaagccaagtataacctaattaatgaatattttctggtgggagttactgaagaacttgaagattttatcatgttattggaggcagcattgccccggtttttcaggggtgctactgaactctatcgcacaggaaagaaatctcatcttaggaaaaccacagagaagaaactccccactaaacaaaccattgcaaaactacagcaatctgatcatttaggcaaatggagaatgagttctatgaatttgcactagagcagttccaattcatcagagcccatgccgttcgagaaaaagatggagacctctacatcctcgcacaaaactttttctatgaaaagatttaccctaagtcgaactgagtataaggtgtgactattagattcttgaactaaaatttgaccctgtcttcacctttgttctcagctccacagtctggattgctgacagtaggtgtatatgacaatttgtattgagccaaattaggaaacagacagtaacgtcaaggaagtagatactggctggcattgtcagtgttctaagtttcaggcatttttatttttcctggctaaacgttggtgaaagttataacctcctgcctgggagaaaatatacatcacctaaaatgaacttatggcaggtctaatcaaaaggctaaatacaatttcagaaaaggttctgatactcttgtttttgataaagcattttttcaactaaccatgaattaagatgagtccatttgcctcttctgccttcactgagggtttgggttatacacctctactgaattgtgttaataactgtttggcagtgtgtactttgtttttgtgagtcatgtctcatgaaatttattggaatgtttaatcatatttgctaagaaatgtttctgctgtagttgattgcctaaatgaaggaccgagccga

SEQ ID NO: 16978 - DNA, 3595 bp, Homo sapiens
tcgtgccgaattcggcacgaggaaatggtagctattctatacctatggtttaagtaaatatttctgaataaggcttcaccatactgtaagcattttaggtagattgccttaaaggttatgggagggcatgagggaacacttcttatgagaaaacatttataaacaaaagaaacatttataaactaaagaaaaactaaaagaatgacagaacaatcatcttagcaccctttcctcacaataatataaaaatattaaaagaacataggcaggctttttttaaatttggcttttttctttccttttttcaaattgacttttataggtatttcctgaaagtgtatacaaattatttcctcgcccaaaataaagcaccacttcaaggtgtggtttgacattacatgctaatgaacaaacccagtatgcaagttattcttgcaccacatgctcaaatcttcttgaggtgcattaactcttttaggtaactagagcagtacttggtgaactagatcaggaggtcagtaaactttctgtggaagggccagagagtaaatattttaggctttgcagcccatacggtctctgtcacagctagtcaaccctgccattttaccacaaaagcagcaatagacattatgtaaacaaatgagcacagttatgttccaataaaactttatttacaaaaacagatgacatcccagatgcagaccatgggcaaccaaccattgcactggctaaatcattatttatggagaaatcctctttgtgtctctactctagatgcctaaaagagtttatatacttctaaaagctcctaacttatatccaaagaattgctttctgattcgtgtagtctctcccacagattcataaacttttatgacttatattgtttccaggtgggcatggtttatttcccagtttaacagttcagaataggggcatttattttatcatattttagggtgggttaggagtatcctttctggagactgagaaaggggtgtatttaattccatcaggtccagtacagtactaggagtcataatactttataatcaattaaataaatagaaccactgagacaataatgtatttttttaaagtggcaaatgtggttttcttttttcagcctttgcgctttttcagtattttgaccatagggagataatttttttataatacaaaagtaaccacttggaattttaaagataatgttatgtgtgtatgtgaaatatatatacatatatatatatgtttatttcctaaaagaagaaaagatacctttctgttcaacttgtatcaactcctcttttctaattgctgtgaaatggcaactgttgataaattattgtgattgttttaaaatctaatgggaagtaaaatatattttgattttacccagcttaatctgtaaagtagcacttaaatatatctgatagcaacacttaagatattgcatggggattactttcctatcatccatatgcatttgtgcaacttcaaacatattgggtgcttctgaattcctgatgattggatttaagctattgaaaattggataatttaaacttaatgatttttataattttctgatcttaaaatttggttaatgcctataatctgttgctttttctcaatatgtgtcctattggaaattcctcaaatcgttggtgccatcagtgatttacaaacaatattttgatattgcagatgacttgcttactgtatttgcattgttagaaaacagtttgtagacaatgattcttttttaataaaatcaaataattctaaaagtgctagagaatttaactaaaagctggttcccaaatgcatagctggcattttaatttaaattcaaatctacatagagaacatccgtgtaaatcatctaactggattttcccattggtcattcccaaacacacctatggtcctagaatccttaagagaagcaccctgtaaccttttatgtggtttgcctttaagaggcccaggtgcttctcctttatgatttgagttggcctcttcataaattagtgctgtttactttcagaggaagcagagaagttgctgttatgtttttgcatccgtttaccctatgcaaagttgctgtatgatgccaactaaactgctctttaggcagccttctgaggagaaaagcaaccctgtttcaaatccactgccaattcagctcctctggagtggagctttctgatttcttggagcaggaattttagagattgaaatgaatgatcatttagtcagatttatcctgtaatttcatgcagctttgtggcctttgcagtactatttataaaatggaccctgatggtgatgaactctttagaacgcattactgttaagcctgtgttgagacattgatgctgtctatctcattttttagacagtttttgtagctttctattgagagtcaggtatgtgagcatctctgaagcagtgttgaatgtaattttcggaaacatggattgtgtattttgacttttattttataaatacacagctcaacagtgccttttttttccctcatagtcctgttggaagatgctcactactttctctcttctctctccctgccctcccccactccattcagttgattcatttatgcaaattctgtttccaacttgaaaccattttgtcacatctgttggagagataatcactccttttccttaacattctgccagctttctgatgttgaagtgtttcagttgactacctgatgcaaaagctataaaataaacagtgggaaggggaaaaattggtgtcctgttttaatattttcttttgtagccttgacactgatggacattttccaagctgactcagtgttcagtgtcaacttaactctcagatagtgttgccatcaagaaagcatgcaacatcattggtttctaatgattttatggcttgtgacaatattttatctggactgacatgcctctgctgcttttgctttgtacttcattgctggtaataaaatttcagatggaaaacttacaaaatatatacttaattagaagaaaaaaatagagaaagggctattagaattaaaaaaatttgaaagtaacttaatctaacatttatggcacagtttggacatatccataattttttttgggaacacacatttctgattttttttttcccccttaaagaagaaagtctcaattccattgattttcaattcttagccactggctcattgctttgagcaatgcttgattgattctatttatattatatgatattgggttgataaaataccagttcaatgatgagttttcttaacagaatttggtttgtacttgcagtggctgaacaaagagcatggcttgagaatcaaagggatctgcatttagcaatgtgatgtcagtaaatggacataacaggattgttgtaaaggttgggcatgatgtatgcaaagtactggccagggtagactaataactgatggcatttatatgctgtgctggaatattgttaccaagctgatgtgccgttctcaccctgcagaatactggttttgtcatttcataaatgatatttttataaatatttttgaatgactgta

SEQ ID NO: 16979 - DNA, 2540 bp, Homo sapiens
agcggccgctcgcgatctagactgagacaataatgtatttttttaaagtggcaaatgtggttttcttttttcagcctttgcgctttttcagtattttgaccatagggagataatttttttataatacaaaagtaaccacttggaattttaaagataatgttatgtgtgtatgtgaaatatatatacatatatatatatgtttatttcctaaaagaagaaaagatacctttctgttcaacttgtatcaactcctcttttctaattgctgtgaaatggcaactgttgataaattattgtgattgttttaaaatctaatgggaagtaaaatatattttgattttacccagcttaatctgtaaagtagcacttaaatatatctgatagcaacacttaagatattgcatggggattactttcctatcatccatatgcatttgtgcaacttcaaacatattgggtgcttctgaattcctgatgattggatttaagctattgaaaattggataatttaaacttaatgatttttataattttctgatcttaaaatttggttaatgcctataatctgttgctttttctcaatatgtgtcctattggaaattcctcaaatcgttggtgccatcagtgatttacaaacaatattttgatattgcagatgacttgcttactgtatttgcattgttagaaaacagtttgtagacaatgattcttttttaataaaatcaaataattctaaaagtgctagagaatttaactaaaagctggttcccaaatgcatagctggcattttaatttaaattcaaatctacatagagaacatccgtgtaaatcatctaactggattttcccattggtcattcccaaacacacctatggtcctagaatccttaagagaagcaccctgtaaccttttatgtggtttgcctttaagaggcccaggtgcttctcctttatgatttgagttggcctcttcataaattagtgctgtttactttcagaggaagcagagaagttgctgttatgtttttgcatccgtttaccctatgcaaagttgctgtatgatgccaactaaactgctctttaggcagccttctgaggagaaaagcaaccctgtttcaaatccactgccaattcagctcctctggagtggagctttctgatttcttggagcaggaattttagagattgaaatgaatgatcatttagtcagatttatcctgtaatttcatgcagctttgtggcctttgcagtactatttataaaatggaccctgatggtgatgaactctttagaacgcattactgttaagcctgtgttgagacattgatgctgtctatctcattttttagacagtttttgtagctttctattgagagtcaggtatgtgagcatctctgaagcagtgttgaatgtaattttcggaaacatggattgtgtattttgacttttattttataaatacacagctcaacagtgccttttttttccctcatagtcctgttggaagatgctcactactttctctcttctctctccctgccctcccccactccattcagttgattcatttatgcaaattctgtttccaacttgaaaccattttgtcacatctgttggagagataatcactccttttccttaacattctgccagctttctgatgttgaagtgtttcagttgactacctgatgcaaaagctataaaataaacagtgggaaggggaaaaattggtgtcctgttttaatattttcttttgtagccttgacactgatggacattttccaagctgactcagtgttcagtgtcaacttaactctcagatagtgttgccatcaagaaagcatgcaacatcattggtttctaatgattttatggcttgtgacaatattttatctggactgacatgcctctgctgcttttgctttgtacttcattgctggtaataaaatttcagatggaaaacttacaaaatatatacttaattagaagaaaaaaatagagaaagggctattagaattaaaaaaatttgaaagtaacttaatctaacatttatggcacagtttggacatatccataattttttttgggaacacacatttctgattttttttttcccccttaaagaagaaagtctcaattccattgattttcaattcttagccactggctcattgctttgagcaatgcttgattgattctatttatattatatgatattgggttgataaaataccagttcaatgatgagttttcttaacagaatttggtttgtacttgcagtggctgaacaaagagcatggcttgagaatcaaagggatctgcatttagcaatgtgatgtcagtaaatggacataacaggattgttgtaaaggttgggcatgatgtatgcaaagtactggccagggtagactaataactgatggcatttatatgctgtgctggaatattgttaccaagctgatgtgccgttctcaccctgcagaatactggttttgtcatttcataaatgatatttttataaatatttttgaatgactgta

SEQ ID NO: 16980 - DNA, 2465 bp, Homo sapiens
ccaaataggaggaggattacattgtttctctataacactgagcaagagagctcagacgcacatgttggaattttaaagataatgttatgtgtgtatgtgaaatatatatacatatatatatatgtttatttcctaaaagaagaaaagatacctttctgttcaacttgtatcaactcctcttttctaattgctgtgaaatggcaactgttgataaattattgtgattgttttaaaatctaatgggaagtaaaatatattttgattttacccagcttaatctgtaaagtagcacttaaatatatctgatagcaacacttaagatattgcatggggattactttcctatcatccatatgcatttgtgcaacttcaaacatattgggtgcttctgaattcctgatgattggatttaagctattgaaaattggataatttaaacttaatgatttttataattttctgatcttaaaatttggttaatgcctataatctgttgctttttctcaatatgtgtcctattggaaattcctcaaatcgttggtgccatcagtgatttacaaacaatattttgatattgcagatgacttgcttactgtatttgcattgttagaaaacagtttgtagacaatgattcttttttaataaaatcaaataattctaaaagtgctagagaatttaactaaaagctggttcccaaatgcatagctggcattttaatttaaattcaaatctacatagagaacatccgtgtaaatcatctaactggattttcccattggtcattcccaaacacacctatggtcctagaatccttaagagaagcaccctgtaaccttttatgtggtttgcctttaagaggcccaggtgcttctcctttatgatttgagttggcctcttcataaattagtgctgtttactttcagaggaagcagagaagttgctgttatgtttttgcatccgtttaccctatgcaaagttgctgtatgatgccaactaaactgctctttaggcagccttctgaggagaaaagcaaccctgtttcaaatccactgccaattcagctcctctggagtggagctttctgatttcttggagcaggaattttagagattgaaatgaatgatcatttagtcagatttatcctgtaatttcatgcagctttgtggcctttgcagtactatttataaaatggaccctgatggtgatgaactctttagaacgcattactgttaagcctgtgttgagacattgatgctgtctatctcattttttagacagtttttgtagctttctattgagagtcaggtatgtgagcatctctgaagcagtgttgaatgtaattttcggaaacatggattgtgtattttgacttttattttataaatacacagctcaacagtgccttttttttccctcatagtcctgttggaagatgctcactactttctctcttctctctccctgccctcccccactccattcagttgattcatttatgcaaattctgtttccaacttgaaaccattttgtcacatctgttggagagataatcactccttttccttaacattctgccagctttctgatgttgaagtgtttcagttgactacctgatgcaaaagctataaaataaacagtgggaaggggaaaaattggtgtcctgttttaatattttcttttgtagccttgacactgatggacattttccaagctgactcagtgttcagtgtcaacttaactctcagatagtgttgccatcaagaaagcatgcaacatcattggtttctaatgattttatggcttgtgacaatattttatctggactgacatgcctctgctgcttttgctttgtacttcattgctggtaataaaatttcagatggaaaacttacaaaatatatacttaattagaagaaaaaaatagagaaagggctattagaattaaaaaaatttgaaagtaacttaatctaacatttatggcacagtttggacatatccataattttttttgggaacacacatttctgattttttttttcccccttaaagaagaaagtctcaattccattgattttcaattcttagccactggctcattgctttgagcaatgcttgattgattctatttatattatatgatattgggttgataaaataccagttcaatgatgagttttcttaacagaatttggtttgtacttgcagtggctgaacaaagagcatggcttgagaatcaaagggatctgcatttagcaatgtgatgtcagtaaatggacataacaggattgttgtaaaggttgggcatgatgtatgcaaagtactggccagggtagactaataactgatggcatttatatgctgtgctggaatattgttaccaagctgatgtgccgttctcaccctgcagaatactggttttgtcatttcataaatgatatttttataaatatttttgaatgactgta

SEQ ID NO: 16981 - DNA, 1976 bp, Homo sapiens
cgccggtggaggggcgcgcggccgcgagcaaaggagggagggaaggaaggaagagagggaggcgggcaagcaggcgggcgcgggggtcggggactgaggcagtagagggaggcgagagcccggcagccgcttcgcgctgtttgctgcgcgggcttttggagggggcggccgtttagtcggctgaggagaagcggacaccagcggcgttggtgatagcgcctgggggagggggactggagaggcgagaaggggggtcgctgcggtggttctctcgctgtcgctctctctttgcctcgctcccggctcggcgggctcctcccggcgtctctctcgcctccggggtcccgctccccgccccccgcggtatgtcttgatcccgagcagcgggtttcatggggctcctcaggattatgatgccgcccaagttgcagctgctggcggtggtggccttcgcggtggcgatgctcttcttggaaaaccagatccagaaactggaggagtcccgctcgaagctagaaagggctattgcaagacacgaagtccgagaaattgagcagcgacatacaatggatggccctcggcaagatgccactttagatgaggaagaggacatggtgatcatttataacagagttcccaaaacggcaagcacttcatttaccaatatcgcctatgacctgtgtgcaaagaataaataccatgtccttcatatcaacactaccaaaaataatccagtgatgtcattgcaagatcaggtgcgctttgtaaagaatataacttcctggaaagagatgaaaccaggattttatcatggacacgtttcttacttggattttgcaaaatttggtgtgaagaagaaaccaatttacattaatgtcataagggatcctattgagaggctagtttcttattattactttctgagatttggagatgattatagaccagggttacggagacgaaaacaaggagacaaaaagacctttgatgaatgtgtagcagaaggtggctcagactgtgctccagagaagctctggcttcaaatcccgttcttctgtggccatagctccgaatgctggaatgtgggaagcaggtgggctatggatcaagccaagtataacctaattaatgaatattttctggtgggagttactgaagaacttgaagattttatcatgttattggaggcagcattgccccggtttttcaggggtgctactgaactctatcgcacagcaccagatactgctacaccatctcatcggcatggacctatatgtggcagcaagtccatctcatcgcttttggtgaaagtcagtccagtttgtaaagattctcattgtcactgtagacgaggaactgggacaccaaaaggagaaactctggccacgcttgcaccctgttcccaatcctggtccagtgtcacccacagatggtaaggagctctagagacctcaccagcccctgggattggtcacctcactcttctatggacagagattcctgctgggatcctttgagggcaagcagacccttcttccagctcggactgtgaactccactgcagccgtaaggactgtctgtgacagtgagcccgagatgactgggctctgtgctccctcccggccctccaatccttggcctgccacagagaactgagctcttttattagcaccatgaatgtgactgatacagctagccattcccttgtgcgaatgactcagtttattaatgctctgctaaagatggcttctttgcttgccagcagccttaaacagtatttcattaaaactggcttaattattttgagaagacggcccaattaaaagctatacactccctctatgtgagtgtttatacatagagctgtatatataatacatatttgtaagtgtgtgtatatatatatgtgtatgtatgtgtctataaatatataggcttagcaatttcattacatgggataaattgttggaaaa

SEQ ID NO: 16982 - DNA, 1596 bp, Homo sapiens
cgccggtggaggggcgcgcggccgcgagcaaaggagggagggaaggaaggaagagagggaggcgggcaagcaggcgggcgcgggggtcggggactgaggcagtagagggaggcgagagcccggcagccgcttcgcgctgtttgctgcgcgggcttttggagggggcggccgtttagtcggctgaggagaagcggacaccagcggcgttggtgatagcgcctgggggagggggactggagaggcgagaaggggggtcgctgcggtggttctctcgctgtcgctctctctttgcctcgctcccggctcggcgggctcctcccggcgtctctctcgcctccggggtcccgctccccgccccccgcggtatgtcttgatcccgagcagcgggtttcatggggctcctcaggattatgatgccgcccaagttgcagctgctggcggtggtggccttcgcggtggcgatgctcttcttggaaaaccagatccagaaactggaggagtcccgctcgaagctagaaagggctattgcaagacacgaagtccgagaaattgagcagcgacatacaatggatggccctcggcaagatgccactttagatgaggaagaggacatggtgatcatttataacagagttcccaaaacggcaagcacttcatttaccaatatcgcctatgacctgtgtgcaaagaataaataccatgtccttcatatcaacactaccaaaaataatccagtgatgtcattgcaagatcaggtgcgctttgtaaagaatataacttcctggaaagagatgaaaccaggattttatcatggacacgtttcttacttggattttgcaaaatttggtgtgaagaagaaaccaatttacattaatgtcataagggatcctattgagaggctagtttcttattattactttctgagatttggagatgattatagaccagggttacggagacgaaaacaaggagacaaaaagacctttgatgaatgtgtagcagaaggtggctcagactgtgctccagagaagctctggcttcaaatcccgttcttctgtggccatagctccgaatgctggtaggggagataaagttggctcagattgattatcatccttattatctctataatctgtgtttcatttcacaagggctagatatagggaaatcggtgaaagactagactaaaaataacatgtaattcagtaatatctagttttgcagttacttttaaatgcatttaaaagattcctcatgtagagtgatatcctaatatccttgcattgttttctgagatgccggtttttagtatttcttatttttggtgttatgttttgctgtattccagcagagctcttagagactgggggtgggggtgggtgtcataaatcttattttgtccaaagcttactgttttagctattcatgttaaattaagaaaaggcttagtgggttaaaattcacctggttttactgttaaactgattttgactttaagagaagccaaggttatggctgtggtttagtttgctagtaaatatcaagtggaaaataaagatactttaataaaaactgtatttcctcaaaaagtaatga

SEQ ID NO: 16983 - DNA, 6911 bp, Homo sapiens
cgccggtggaggggcgcgcggccgcgagcaaaggagggagggaaggaaggaagagagggaggcgggcaagcaggcgggcgcgggggtcggggactgaggcagtagagggaggcgagagcccggcagccgcttcgcgctgtttgctgcgcgggcttttggagggggcggccgtttagtcggctgaggagaagcggacaccagcggcgttggtgatagcgcctgggggagggggactggagaggcgagaaggggggtcgctgcggtggttctctcgctgtcgctctctctttgcctcgctcccggctcggcgggctcctcccggcgtctctctcgcctccggggtcccgctccccgccccccgcggtatgtcttgatcccgagcagcgggtttcatggggctcctcaggattatgatgccgcccaagttgcagctgctggcggtggtggccttcgcggtggcgatgctcttcttggaaaaccagatccagaaactggaggagtcccgctcgaagctagaaagggctattgcaagacacgaagtccgagaaattgagcagcgacatacaatggatggccctcggcaagatgccactttagatgaggaagaggacatggtgatcatttataacagagttcccaaaacggcaagcacttcatttaccaatatcgcctatgacctgtgtgcaaagaataaataccatgtccttcatatcaacactaccaaaaataatccagtgatgtcattgcaagatcaggtgcgctttgtaaagaatataacttcctggaaagagatgaaaccaggattttatcatggacacgtttcttacttggattttgcaaaatttggtgtgaagaagaaaccaatttacattaatgtcataagggatcctattgagaggctagtttcttattattactttctgagatttggagatgattatagaccagggttacggagacgaaaacaaggagacaaaaagacctttgatgaatgtgtagcagaaggtggctcagactgtgctccagagaagctctggcttcaaatcccgttcttctgtggccatagctccgaatgctggaatgtgggaagcaggtgggctatggatcaagccaagtataacctaattaatgaatattttctggtgggagttactgaagaacttgaagattttatcatgttattggaggcagcattgccccggtttttcaggggtgctactgaactctatcgcacaggaaagaaatctcatcttaggaaaaccacagagaagaaactccccactaaacaaaccattgcaaaactacagcaatctgatcatttaggcaaatggagaatgagttctatgaatttgcactagagcagttccaattcatcagagcccatgccgttcgagaaaaagatggagacctctacatcctcgcacaaaactttttctatgaaaagatttaccctaagtcgaactgagtataaggtgtgactattagattcttgaactaaaatttgaccctgtcttcacctttgttctcagctccacagtctggattgctgacagtaggtgtatatgacaatttgtattgagccaaattaggaaacagacagtaacgtcaaggaagtagatactggctggcattgtcagtgttctaagtttcaggcatttttatttttcctggctaaacgttggtgaaagttataacctcctgcctgggagaaaatatacatcacctaaaatgaacttatggcaggtctaatcaaaaggctaaatacaatttcagaaaaggttctgatactcttgtttttgataaagcattttttcaactaaccatgaattaagatgagtccatttgcctcttctgccttcactgagggtttgggttatacacctctactgaattgtgttaataactgtttggcagtgtgtactttgtttttgtgagtcatgtctcatgaaatttattggaatgtttaatcatatttgctaagaaatgtttctgctgtagttggatttgcccatatttatgtaggtggttttaattttttaaatggtgattagtgttaaaaatcaatttaaatcatgactaatatggtaaaaagataaagcatcaaagcagtatttctcattcctgcctcctcaatatctaatactgggaagatacttcaaagaatattgagattgtctgaagttttagttaagattttcacacattaatatcaaaaaagtaagtttagtatttgtttctccatgggttatttgtaaagctgtaaactgagatatcggtgactccgtattatgactccattagtgagctgtggtatgggtaggattttcctacttcttctgtacttttacctgtagactatttttactaaggtgctttataatgtgttttaaagcattgcatttacaaaacaaggaaaatgctgtaaatattgcatattttatgtatttggaccaaaaggttacaagtaattagacaaaagtggttttgcaccaattttatgtcaagtaaaaccatcagacctactgttcttgtatttctcatttaactttactgttaagacatcactgaaatgaacttcagtaagctttcaattttgatacacagttcattattcataacttgaggcagtaattacagtggaatgagtactggacaaggagtcaaaaaacttgatttcaggtcctagctctagcacttacagctgtgtgatcttgggcaagtcacttaacctctctttgcctcaatttcctcatcttgaaatgaggataataatacctgctgtacctacctcacagggctgttgtgaggattaaatgagatggcatgtgaaagcactttgaaaattgtaaagcgctatgtaaatgtaaggtattatagaaacatctttaacatatagtttcataccattcattttttaacaaagaaagggaaaagtctgcttgtaagctggttgaaaaagttaatcttgatataaatttgtgtttgataaatatcctctcagtgttttatcttccatgtttcaacaactattgaaatatgaaatgcctgtgaactcttaaagcttcatgagcagctgcttgagttcaggaagttcactgttagaaataggctttgttagctgactagggtcagggaaacttttctcttcaaatttgaaagctgtttctgttttcattttacattattattcagaaatggtagctattctatacctatggtttaagtaaatatttctgaataaggcttcaccatactgtaagcattttaggtagattgccttaaaggttatgggagggcatgagggaacacttcttatgagaaaacatttataaacaaaagaaacatttataaactaaagaaaaactaaaagaatgacagaacaatcatcttagcaccctttcctcacaataatataaaaatattaaaagaacataggcaggctttttttaaatttggcttttttctttccttttttcaaattgacttttataggtatttcctgaaagtgtatacaaattatttcctcgcccaaaataaagcaccacttcaaggtgtggtttgacattacatgctaatgaacaaacccagtatgcaagttattcttgcaccacatgctcaaatcttcttgaggtgcattaactcttttaggtaactagagcagtacttggtgaactagatcaggaggtcagtaaactttctgtggaagggccagagagtaaatattttaggctttgcagcccatacggtctctgtcacagctagtcaaccctgccattttaccacaaaagcagcaatagacattatgtaaacaaatgagcacagttatgttccaataaaactttatttacaaaaacagatgacatcccagatgcagaccatgggcaaccaaccattgcactggctaaatcattatttatggagaaatcctctttgtgtctctactctagatgcctaaaagagtttatatacttctaaaagctcctaacttatatccaaagaattgctttctgattcgtgtagtctctcccacagattcataaacttttatgacttatattgtttccaggtgggcatggtttatttcccagtttaacagttcagaataggggcatttattttatcatattttagggtgggttaggagtatcctttctggagactgagaaaggggtgtatttaattccatcaggtccagtacagtactaggagtcataatactttataatcaattaaataaatagaaccactgagacaataatgtatttttttaaagtggcaaatgtggttttcttttttcagcctttgcgctttttcagtattttgaccatagggagataatttttttataatacaaaagtaaccacttggaattttaaagataatgttatgtgtgtatgtgaaatatatatacatatatatatatgtttatttcctaaaagaagaaaagatacctttctgttcaacttgtatcaactcctcttttctaattgctgtgaaatggcaactgttgataaattattgtgattgttttaaaatctaatgggaagtaaaatatattttgattttacccagcttaatctgtaaagtagcacttaaatatatctgatagcaacacttaagatattgcatggggattactttcctatcatccatatgcatttgtgcaacttcaaacatattgggtgcttctgaattcctgatgattggatttaagctattgaaaattggataatttaaacttaatgatttttataattttctgatcttaaaatttggttaatgcctataatctgttgctttttctcaatatgtgtcctattggaaattcctcaaatcgttggtgccatcagtgatttacaaacaatattttgatattgcagatgacttgcttactgtatttgcattgttagaaaacagtttgtagacaatgattcttttttaataaaatcaaataattctaaaagtgctagagaatttaactaaaagctggttcccaaatgcatagctggcattttaatttaaattcaaatctacatagagaacatccgtgtaaatcatctaactggattttcccattggtcattcccaaacacacctatggtcctagaatccttaagagaagcaccctgtaaccttttatgtggtttgcctttaagaggcccaggtgcttctcctttatgatttgagttggcctcttcataaattagtgctgtttactttcagaggaagcagagaagttgctgttatgtttttgcatccgtttaccctatgcaaagttgctgtatgatgccaactaaactgctctttaggcagccttctgaggagaaaagcaaccctgtttcaaatccactgccaattcagctcctctggagtggagctttctgatttcttggagcaggaattttagagattgaaatgaatgatcatttagtcagatttatcctgtaatttcatgcagctttgtggcctttgcagtactatttataaaatggaccctgatggtgatgaactctttagaacgcattactgttaagcctgtgttgagacattgatgctgtctatctcattttttagacagtttttgtagctttctattgagagtcaggtatgtgagcatctctgaagcagtgttgaatgtaattttcggaaacatggattgtgtattttgacttttattttataaatacacagctcaacagtgccttttttttccctcatagtcctgttggaagatgctcactactttctctcttctctctccctgccctcccccactccattcagttgattcatttatgcaaattctgtttccaacttgaaaccattttgtcacatctgttggagagataatcactccttttccttaacattctgccagctttctgatgttgaagtgtttcagttgactacctgatgcaaaagctataaaataaacagtgggaaggggaaaaattggtgtcctgttttaatattttcttttgtagccttgacactgatggacattttccaagctgactcagtgttcagtgtcaacttaactctcagatagtgttgccatcaagaaagcatgcaacatcattggtttctaatgattttatggcttgtgacaatattttatctggactgacatgcctctgctgcttttgctttgtacttcattgctggtaataaaatttcagatggaaaacttacaaaatatatacttaattagaagaaaaaaatagagaaagggctattagaattaaaaaaatttgaaagtaacttaatctaacatttatggcacagtttggacatatccataattttttttgggaacacacatttctgattttttttttcccccttaaagaagaaagtctcaattccattgattttcaattcttagccactggctcattgctttgagcaatgcttgattgattctatttatattatatgatattgggttgataaaataccagttcaatgatgagttttcttaacagaatttggtttgtacttgcagtggctgaacaaagagcatggcttgagaatcaaagggatctgcatttagcaatgtgatgtcagtaaatggacataacaggattgttgtaaaggttgggcatgatgtatgcaaagtactggccagggtagactaataactgatggcatttatatgctgtgctggaatattgttaccaagctgatgtgccgttctcaccctgcagaatactggttttgtcatttcataaatgatatttttataaatatttttgaatgactgtactttttactgattatcttaataccgcctcacttatgtacctgtagcataaatattcctggttctgattcttgctgttctttccacatacaaatcactcatttgtacagattaaaggggggaaacgctgactgttctaaagaagata

SEQ ID NO: 16984 - DNA, 1885 bp, Homo sapiens
ttcgggcccggctggcgggcggcgccgggagcgcgggggcggcgggcccgggtcgagcatgtagcggctgctggcggcggggctcccggggcgggccgggcgggccgcgggagccgcacgcggcgatatggaagaggagggcaagaagggcaagaagcctggaattgtctcgccatttaaacgagtattcctaaaaggtgaaaagagtagagataagaaagcccatgagaaggtgacagagaggcgccctctgcacactgtggtgttgtcattgcctgagcgcgtcgagccagacagactgctgagcgactatattgagaaggaggtaaagtatttaggtcagttaacgtccataccaggatacctgaatccctccagtaggactgaaatcctgcatttcatagacaatgcaaagagagcccaccagcttccgggacacttgactcaggagcacgatgctgtgctcagcctgtctgcgtacaacgtcaagctggcctggagggacggggaggatatcatcctcagggtgcccatccatgacatcgccgccgtctcctatgttcgggatgacgctgcacacctggtggtcctgaagacagcccaggacccagggatctcccccagccagagtctgtgtgcggaaagttccagaggcctcagtgcaggctccctgtcggagagtgcagttgggcccgtggaggcatgctgcctggtcatcctggctgcagagagcaaggtcgctgcggaggagctttgctgtctgctaggccaggtcttccaggttgtttacacggagtccaccatcgactttctggacagagcgatatttgatggggcctctaccccgacccaccacctgtccctgcacagcgatgactcttctacaaaagtggacattaaggagacctacgaggtggaagccagcactttctgcttccctgaatctgtggatgtgggtggtgcatcaccccacagcaagaccatcagtgagagcgagctgagcgccagcgccactgagctgctgcaggactacatgctgacgctgcgcaccaagctgtcatcacaggagatccagcagtttgcagcactgctgcacgagtaccgcaatggggcctctatccacgagttctgcatcaacctgcggcagctctacggggacagccgcaagttcctgctgcttggtctgaggcccttcatccctgagaaggacagccagcacttcgagaacttcctggagaccattggcgtgaaggatggccgcggcatcatcactgacagctttggcaggcaccggcgggccctgagcaccacatccagttccaccaccaatgggaacagggccacgggcagctctgatgaccggtcggcaccctcagagggggatgagtgggaccgcatgatctcggacatcagcagcgacattgaggcgctgggctgcagcatggaccaggactcagcatgatggacagtggatgggggggcacccacaccttccgcgcagtcgtcataggccttcccagaaggagctgcccagacctgcgtgtcagcccttggtggtggccagggagaggcgcccggtgcagatggccccgggcggcccaggtcctctactgtgaaggagcagggagctgccgagggacacgagcctcagtgcggggtggaaggctctttgccttgtccaccagggctcagccaagccctgcagtgtgtccccgctcggggagggcccggccgagcgggcagggagagccagtcctgtcggctgggcccttggacggctgtcagttttgcacatgatgttcctattgtaactctcagagaccttaaaaagaagtttactgcaatgtgaataatttaatctctggttgccaagcaaaaaaaagat

SEQ ID NO: 16985 - DNA, 724 bp, Homo sapiens
ttcgggcccggctggcgggcggcgccgggagcgcgggggcggcgggcccgggtcgagcatgtagcggctgctggcggcggggctcccggggcgggccgggcgggccgcgggagccgcacgcggcgatatggaagaggagggcaagaagggcaagaagcctggaattgtctcgccatttaaacgagtattcctaaaaggtgaaaagagtagagataagaaagcccatgagaaggtgacagagaggcgccctctgcacactgtggtgttgtcattgcctgagcgcgtcgagccagacagactgctgagcgactatattgagaaggaggtaaagggctcccattaatcacatattgatatttattttatttttcatgccctttcatttttctctcatttttcctattctttactcttcccaatgccttctgggaatgtttcaaaccactctccgtcttatgaattcattcctcaactgtattcattcaaccctgaattaaattgtttgtttctactatatctgattggtccttttttataactccttgtccctatttgtttccagtgccctcctacatgcccttgagaatatttattaggattattgtaaattcttgttttctctggcttatcagttcttctccctccagaattagttgtttagtttgtgatcttgcctttccagtgcttgaggtctgtgttccacagatctgtctttattttttcc

SEQ ID NO: 16986 - DNA, 2140 bp, Homo sapiens
tttgaaattaatgtccttctgttgactgcagaatttctgctggaaatgcagggaggctgcttgtggggttcgcgtgctgtgggaagtagggaaaatgagctggtttactttgtgtctttttgtgcatgcagactgtttggattttgccaacagtttctgggtgctgcctgctttttaaacttttaaaaaattgtaaacagcttcagtggctttgcagaaggaagctgtggtttctggtcttcctgttcagtcatgtttttttcagagggagggctaacatctggccatatttttcaacaaattcagaagtgagtagagaatgcatagtagctgtcggcagaggaggaaccagaatctctccaaagaaattcctcaaacagaatttcacacagggtattccatggagaatgagcctggaattgtctcgccatttaaacgagtattcctaaaaggtgaaaagagtagagataagaaagcccatgagaaggtgacagagaggcgccctctgcacactgtggtgttgtcattgcctgagcgcgtcgagccagacagactgctgagcgactatattgagaaggaggtaaagtatttaggtcagttaacgtccataccaggatacctgaatccctccagtaggactgaaatcctgcatttcatagacaatgcaaagagagcccaccagcttccgggacacttgactcaggagcacgatgctgtgctcagcctgtctgcgtacaacgtcaagctggcctggagggacggggaggatatcatcctcagggtgcccatccatgacatcgccgccgtctcctatgttcgggatgacgctgcacacctggtggtcctgaagacagcccaggacccagggatctcccccagccagagtctgtgtgcggaaagttccagaggcctcagtgcaggctccctgtcggagagtgcagttgggcccgtggaggcatgctgcctggtcatcctggctgcagagagcaaggtcgctgcggaggagctttgctgtctgctaggccaggtcttccaggttgtttacacggagtccaccatcgactttctggacagagcgatatttgatggggcctctaccccgacccaccacctgtccctgcacagcgatgactcttctacaaaagtggacattaaggagacctacgaggtggaagccagcactttctgcttccctgaatctgtggatgtgggtggtgcatcaccccacagcaagaccatcagtgagagcgagctgagcgccagcgccactgagctgctgcaggactacatgctgacgctgcgcaccaagctgtcatcacaggagatccagcagtttgcagcactgctgcacgagtaccgcaatggggcctctatccacgagttctgcatcaacctgcggcagctctacggggacagccgcaagttcctgctgcttggtctgaggcccttcatccctgagaaggacagccagcacttcgagaacttcctggagaccattggcgtgaaggatggccgcggcatcatcactgacagctttggcaggcaccggcgggccctgagcaccacatccagttccaccaccaatgggaacagggccacgggcagctctgatgaccggtcggcaccctcagagggggatgagtgggaccgcatgatctcggacatcagcagcgacattgaggcgctgggctgcagcatggaccaggactcagcatgatggacagtggatgggggggcacccacaccttccgcgcagtcgtcataggccttcccagaaggagctgcccagacctgcgtgtcagcccttggtggtggccagggagaggcgcccggtgcagatggccccgggcggcccaggtcctctactgtgaaggagcagggagctgccgagggacacgagcctcagtgcggggtggaaggctctttgccttgtccaccagggctcagccaagccctgcagtgtgtccccgctcggggagggcccggccgagcgggcagggagagccagtcctgtcggctgggcccttggacggctgtcagttttgcacatgatgttcctattgtaactctcagagaccttaaaaagaagtttactgcaatgtgaataatttaatctctggttgccaagcaaaaaaaagat

SEQ ID NO: 16987 - DNA, 1831 bp, Homo sapiens
ggcaggctgggaagtcggccgccgtaaagatggcggcaaattgaaaaagttggagctgctcccgcgcgcgctgagtgggcggagcgaacagggggctggacagcctggaattgtctcgccatttaaacgagtattcctaaaaggtgaaaagagtagagataagaaagcccatgagaaggtgacagagaggcgccctctgcacactgtggtgttgtcattgcctgagcgcgtcgagccagacagactgctgagcgactatattgagaaggaggtaaagtatttaggtcagttaacgtccataccaggatacctgaatccctccagtaggactgaaatcctgcatttcatagacaatgcaaagagagcccaccagcttccgggacacttgactcaggagcacgatgctgtgctcagcctgtctgcgtacaacgtcaagctggcctggagggacggggaggatatcatcctcagggtgcccatccatgacatcgccgccgtctcctatgttcgggatgacgctgcacacctggtggtcctgaagacagcccaggacccagggatctcccccagccagagtctgtgtgcggaaagttccagaggcctcagtgcaggctccctgtcggagagtgcagttgggcccgtggaggcatgctgcctggtcatcctggctgcagagagcaaggtcgctgcggaggagctttgctgtctgctaggccaggtcttccaggttgtttacacggagtccaccatcgactttctggacagagcgatatttgatggggcctctaccccgacccaccacctgtccctgcacagcgatgactcttctacaaaagtggacattaaggagacctacgaggtggaagccagcactttctgcttccctgaatctgtggatgtgggtggtgcatcaccccacagcaagaccatcagtgagagcgagctgagcgccagcgccactgagctgctgcaggactacatgctgacgctgcgcaccaagctgtcatcacaggagatccagcagtttgcagcactgctgcacgagtaccgcaatggggcctctatccacgagttctgcatcaacctgcggcagctctacggggacagccgcaagttcctgctgcttggtctgaggcccttcatccctgagaaggacagccagcacttcgagaacttcctggagaccattggcgtgaaggatggccgcggcatcatcactgacagctttggcaggcaccggcgggccctgagcaccacatccagttccaccaccaatgggaacagggccacgggcagctctgatgaccggtcggcaccctcagagggggatgagtgggaccgcatgatctcggacatcagcagcgacattgaggcgctgggctgcagcatggaccaggactcagcatgatggacagtggatgggggggcacccacaccttccgcgcagtcgtcataggccttcccagaaggagctgcccagacctgcgtgtcagcccttggtggtggccagggagaggcgcccggtgcagatggccccgggcggcccaggtcctctactgtgaaggagcagggagctgccgagggacacgagcctcagtgcggggtggaaggctctttgccttgtccaccagggctcagccaagccctgcagtgtgtccccgctcggggagggcccggccgagcgggcagggagagccagtcctgtcggctgggcccttggacggctgtcagttttgcacatgatgttcctattgtaactctcagagaccttaaaaagaagtttactgcaatgtgaataatttaatctctggttgccaagcaaaaaaaagat

SEQ ID NO: 16988 - DNA, 2861 bp, Homo sapiens
ttcgggcccggctggcgggcggcgccgggagcgcgggggcggcgggcccgggtcgagcatgtagcggctgctggcggcggggctcccggggcgggccgggcgggccgcgggagccgcacgcggcgatatggaagaggagggcaagaagggcaagaagcctggaattgtctcgccatttaaacgagtattcctaaaaggtgaaaagagtagagataagaaagcccatgagaaggtgacagagaggcgccctctgcacactgtggtgttgtcattgcctgagcgcgtcgagccagacagactgctgagcgactatattgagaaggaggtaaagtatttaggtcagttaacgtccataccaggatacctgaatccctccagtaggactgaaatcctgcatttcatagacaatgcaaagagagcccaccagcttccgggacacttgactcaggagcacgatgctgtgctcagcctgtctgcgtacaacgtcaagctggcctggagggacggggaggatatcatcctcagggtgcccatccatgacatcgccgccgtctcctatgttcgggatgacgctgcacacctggtggtcctgaagacagcccaggacccagggatctcccccagccagagtctgtgtgcggaaagttccagaggcctcagtgcaggctccctgtcggagagtgcagttgggcccgtggaggcatgctgcctggtcatcctggctgcagagagcaaggtcgctgcggaggagctttgctgtctgctaggccaggtcttccaggttgtttacacggagtccaccatcgactttctggacagagcgatatttgatggggcctctaccccgacccaccacctgtccctgcacagcgccagccacgtgacctcttccacagtcacatcttcctttgactgtcagcttcctctgcatttcaggactcttgcaatcacattgagcccacccaaattctccagggtcatctccctatttcaaggtcagctgattagcatcctttactcccctttgaaattggtaacatattcaccaattccagggattaggatgtggacgtctttggggggtcattattctgccctccatacttaccttgttcctagtgccagaaatgtcccttttatctctcagcctctccctctgcttcatttaaaatcttaccctctctgcaacactcacctgcctcgctcacaaagctttcactcactgtctgtgctggggtgaaatgtgccttcctcaggtttgaaatagcaaattacagtctgtgtcacacggacctaatgtcatttgttgaatgtagctgctcagtgccagaccctttgctggtctgagggtcttgggaatcctgtggcttcactgggttcagatggggagtcagactgcccggctctgactgtggtttctgctgtgtgacctgggccaagttgtgtaactctctgacttacttcctaatctacaagtgaagacaggggtgatatatgcctgggttaaaggagacaaagccccagtaaccctgcctggcacatgagtgatacctcaaagacagcttttgctggctctggccatgggtgaatgtggacttcagaccagcgtgcagcaggatttgcatttgccaggatccccaggaggggtgtatgtgggctcaagtctgggaagccctgccctgaggcacacagcacattccagagtgcgggcagcttgatgaaggacagcagggtccctgaagaccagggctgccgctgtctcctgtaaatacagcagtgggctggactcaaaatgcctccccactatgtccctgaaagtcatcttagttttctgcatcttccttacagatgactcttctacaaaagtggacattaaggagacctacgaggtggaagccagcactttctgcttccctgaatctgtggatgtgggtggtgcatcaccccacagcaagaccatcagtgagagcgagctgagcgccagcgccactgagctgctgcaggactacatgctgacgctgcgcaccaagctgtcatcacaggagatccagcagtttgcagcactgctgcacgagtaccgcaatggggcctctatccacgagttctgcatcaacctgcggcagctctacggggacagccgcaagttcctgctgcttggtctgaggcccttcatccctgagaaggacagccagcacttcgagaacttcctggagaccattggcgtgaaggatggccgcggcatcatcactgacagctttggcaggcaccggcgggccctgagcaccacatccagttccaccaccaatgggaacagggccacgggcagctctgatgaccggtcggcaccctcagagggggatgagtgggaccgcatgatctcggacatcagcagcgacattgaggcgctgggctgcagcatggaccaggactcagcatgatggacagtggatgggggggcacccacaccttccgcgcagtcgtcataggccttcccagaaggagctgcccagacctgcgtgtcagcccttggtggtggccagggagaggcgcccggtgcagatggccccgggcggcccaggtcctctactgtgaaggagcagggagctgccgagggacacgagcctcagtgcggggtggaaggctctttgccttgtccaccagggctcagccaagccctgcagtgtgtccccgctcggggagggcccggccgagcgggcagggagagccagtcctgtcggctgggcccttggacggctgtcagttttgcacatgatgttcctattgtaactctcagagaccttaaaaagaagtttactgcaatgtgaataatttaatctctggttgccaagcaaaaaaaagat

SEQ ID NO: 16989 - DNA, 2008 bp, Homo sapiens
ttcgggcccggctggcgggcggcgccgggagcgcgggggcggcgggcccgggtcgagcatgtagcggctgctggcggcggggctcccggggcgggccgggcgggccgcgggagccgcacgcggcgatatggaagaggagggcaagaagggcaagaagcctggaattgtctcgccatttaaacgagtattcctaaaaggtgaaaagagtagagataagaaagcccatgagaaggtgacagagaggcgccctctgcacactgtggtgttgtcattgcctgagcgcgtcgagccagacagactgctgagcgactatattgagaaggaggtaaagtatttaggtcagttaacgtccataccaggatacctgaatccctccagtaggactgaaatcctgcatttcatagacaatgcaaagagagcccaccagcttccgggacacttgactcaggagcacgatgctgtgctcagcctgtctgcgtacaacgtcaagctggcctggagggacggggaggatatcatcctcagggtgcccatccatgacatcgccgccgtctcctatgttcgggatgacgctgcacacctggtggtcctgaagacagcccaggacccagggatctcccccagccagagtctgtgtgcggaaagttccagaggcctcagtgcaggctccctgtcggagagtgcagttgggcccgtggaggcatgctgcctggtcatcctggctgcagagagcaaggtcgctgcggaggagctttgctgtctgctaggccaggtcttccaggttgtttacacggagtccaccatcgactttctggacagagcgatatttgatggggcctctaccccgacccaccacctgtccctgcacagcgccagccacgtgacctcttccacagtcacatcttcctttgactgtcagcttcctctgcatttcaggactcttgcaatcacattgagcccacccaaattctccagggtcatctccctatttcaagatgactcttctacaaaagtggacattaaggagacctacgaggtggaagccagcactttctgcttccctgaatctgtggatgtgggtggtgcatcaccccacagcaagaccatcagtgagagcgagctgagcgccagcgccactgagctgctgcaggactacatgctgacgctgcgcaccaagctgtcatcacaggagatccagcagtttgcagcactgctgcacgagtaccgcaatggggcctctatccacgagttctgcatcaacctgcggcagctctacggggacagccgcaagttcctgctgcttggtctgaggcccttcatccctgagaaggacagccagcacttcgagaacttcctggagaccattggcgtgaaggatggccgcggcatcatcactgacagctttggcaggcaccggcgggccctgagcaccacatccagttccaccaccaatgggaacagggccacgggcagctctgatgaccggtcggcaccctcagagggggatgagtgggaccgcatgatctcggacatcagcagcgacattgaggcgctgggctgcagcatggaccaggactcagcatgatggacagtggatgggggggcacccacaccttccgcgcagtcgtcataggccttcccagaaggagctgcccagacctgcgtgtcagcccttggtggtggccagggagaggcgcccggtgcagatggccccgggcggcccaggtcctctactgtgaaggagcagggagctgccgagggacacgagcctcagtgcggggtggaaggctctttgccttgtccaccagggctcagccaagccctgcagtgtgtccccgctcggggagggcccggccgagcgggcagggagagccagtcctgtcggctgggcccttggacggctgtcagttttgcacatgatgttcctattgtaactctcagagaccttaaaaagaagtttactgcaatgtgaataatttaatctctggttgccaagcaaaaaaaagat

SEQ ID NO: 16990 - DNA, 1781 bp, Homo sapiens
  misc_feature (1664)..(1664): n is a, c, g, or t
  misc_feature (1666)..(1666): n is a, c, g, or t
  misc_feature (1671)..(1671): n is a, c, g, or t
  misc_feature (1687)..(1687): n is a, c, g, or t
ttcgggcccggctggcgggcggcgccgggagcgcgggggcggcgggcccgggtcgagcatgtagcggctgctggcggcggggctcccggggcgggccgggcgggccgcgggagccgcacgcggcgatatggaagaggagggcaagaagggcaagaagcctggaattgtctcgccatttaaacgagtattcctaaaaggtgaaaagagtagagataagaaagcccatgagaaggtgacagagaggcgccctctgcacactgtggtgttgtcattgcctgagcgcgtcgagccagacagactgctgagcgactatattgagaaggaggtaaagtatttaggtcagttaacgtccataccaggatacctgaatccctccagtaggactgaaatcctgcatttcatagacaatgcaaagagagcccaccagcttccgggacacttgactcaggagcacgatgctgtgctcagcctgtctgcgtacaacgtcaagctggcctggagggacggggaggatatcatcctcagggtgcccatccatgacatcgccgccgtctcctatgttcgggatgacgctgcacacctggtggtcctgaagacagcccaggacccagggatctcccccagccagagtctgtgtgcggaaagttccagaggcctcagtgcaggctccctgtcggagagtgcagttgggcccgtggaggcatgctgcctggtcatcctggctgcagagagcaaggtcgctgcggaggagctttgctgtctgctaggccaggtcttccaggttgtttacacggagtccaccatcgactttctggacagagcgatatttgatggggcctctaccccgacccaccacctgtccctgcacagcgatgactcttctacaaaagtggacattaaggagacctacgaggtggaagccagcactttctgcttccctgaatctgtggatgtgggtggtgcatcaccccacagcaagaccatcagtgagagcgagctgagcgccagcgccactgagctgctgcaggactacatgctgacgctgcgcaccaagctgtcatcacaggagatccagcagtttgcagcactgctgcacgagtaccgcaatggggcctctatccacgagttctgcatcaacctgcggcagctctacggggacagccgcaagttcctgctgcttggtctgaggcccttcatccctgagaaggacagccagcacttcgagaacttcctggagaccattggcgtgaaggatggccgcggcatcatcactgacagctttggcaggcaccggcgggccctgagcaccacatccagttccaccaccaatgggaacagggccacgggcagctctgatgaccggtcggcaccctcagagggggatgagtgggaccgcatgatctcggacatcagcagcgacattgaggcgctgggctgcagcatggaccaggactcagcatgatggacagtggatgggggggcacccacaccttccgcgcagtcgtcataggccttcccagaaggagctgcccagacctgcgtgtcagcccttggtggtggccagggagaggcgcccggtgcagatggccccgggcggcccaggtcctctactgtgaaggagcagggagctgccgagggacacgagcctcagtgcggggtggggngnaggcntgctgccccaggcacnaccggcaggtccgccggaggccgcgccgcggaacaccgcgggctgggcgccggcgaacagacccaccaaaggcggttaaaaccgctcgggcgag

SEQ ID NO: 16991 - DNA, 2046 bp, Homo sapiens
ttcgggcccggctggcgggcggcgccgggagcgcgggggcggcgggcccgggtcgagcatgtagcggctgctggcggcggggctcccggggcgggccgggcgggccgcgggagccgcacgcggcgatatggaagaggagggcaagaagggcaagaagcctggaattgtctcgccatttaaacgagtattcctaaaaggtgaaaagagtagagataagaaagcccatgagaaggtgacagagaggcgccctctgcacactgtggtgttgtcattgcctgagcgcgtcgagccagacagactgctgagcgactatattgagaaggaggtaaagtatttaggtcagttaacgtccataccaggatacctgaatccctccagtaggactgaaatcctgcatttcatagacaatgcaaagagagcccaccagcttccgggacacttgactcaggagcacgatgctgtgctcagcctgtctgcgtacaacgtcaagctggcctggagggacggggaggatatcatcctcagggtgcccatccatgacatcgccgccgtctcctatgttcgggatgacgctgcacacctggtggtcctgaagacagcccaggacccagggatctcccccagccagagtctgtgtgcggaaagttccagaggcctcagtgcaggctccctgtcggagagtgcagttgggcccgtggaggcatgctgcctggtcatcctggctgcagagagcaaggtcgctgcggaggagctttgctgtctgctaggccaggtcttccaggttgtttacacggagtccaccatcgactttctggacagagcgatatttgatggggcctctaccccgacccaccacctgtccctgcacagcgagcccaactcagagccatgcccccggggagccccaggaccaggccaagctgaccaccctgcatgcccagtcagctctcctctcatcatcatcatcatcacttacattcctctgttcaaggacagggacccacacacacggcatggactaggtttcctgaaacgtgtgtgggatggagggtcggggaagccacccgctcacataccacattctttcgcagctgcttccctgaatctgtggatgtgggtggtgcatcaccccacagcaagaccatcagtgagagcgagctgagcgccagcgccactgagctgctgcaggactacatgctgacgctgcgcaccaagctgtcatcacaggagatccagcagtttgcagcactgctgcacgagtaccgcaatggggcctctatccacgagttctgcatcaacctgcggcagctctacggggacagccgcaagttcctgctgcttggtctgaggcccttcatccctgagaaggacagccagcacttcgagaacttcctggagaccattggcgtgaaggatggccgcggcatcatcactgacagctttggcaggcaccggcgggccctgagcaccacatccagttccaccaccaatgggaacagggccacgggcagctctgatgaccggtcggcaccctcagagggggatgagtgggaccgcatgatctcggacatcagcagcgacattgaggcgctgggctgcagcatggaccaggactcagcatgatggacagtggatgggggggcacccacaccttccgcgcagtcgtcataggccttcccagaaggagctgcccagacctgcgtgtcagcccttggtggtggccagggagaggcgcccggtgcagatggccccgggcggcccaggtcctctactgtgaaggagcagggagctgccgagggacacgagcctcagtgcggggtggaaggctctttgccttgtccaccagggctcagccaagccctgcagtgtgtccccgctcggggagggcccggccgagcgggcagggagagccagtcctgtcggctgggcccttggacggctgtcagttttgcacatgatgttcctattgtaactctcagagaccttaaaaagaagtttactgcaatgtgaataatttaatctctggttgccaagcaaaaaaaagat

SEQ ID NO: 16992 - DNA, 1966 bp, Homo sapiens
tttgaaattaatgtccttctgttgactgcagaatttctgctggaaatgcagggaggctgcttgtggggttcgcgtgctgtgggaagtagggaaaatgagctggtttactttgtgtctttttgtgcatgcagactgtttggattttgccaacagtttctgggtgctgcctgctttttaaacttttaaaaaattgtaaacagcttcagtggctttgcagaaggaagctgtggtttctggtcttcctgttcagtcatgtttttttcagagggagggctaacatctggccatatttttcaacaaattcagaagtgagtagagaatgcatagtagctgtcggcagaggaggaaccagaatctctccaaagaaattcctcaaacagaatttcacacagggtattccatggagaatgagtatttaggtcagttaacgtccataccaggatacctgaatccctccagtaggactgaaatcctgcatttcatagacaatgcaaagagagcccaccagcttccgggacacttgactcaggagcacgatgctgtgctcagcctgtctgcgtacaacgtcaagctggcctggagggacggggaggatatcatcctcagggtgcccatccatgacatcgccgccgtctcctatgttcgggatgacgctgcacacctggtggtcctgaagacagcccaggacccagggatctcccccagccagagtctgtgtgcggaaagttccagaggcctcagtgcaggctccctgtcggagagtgcagttgggcccgtggaggcatgctgcctggtcatcctggctgcagagagcaaggtcgctgcggaggagctttgctgtctgctaggccaggtcttccaggttgtttacacggagtccaccatcgactttctggacagagcgatatttgatggggcctctaccccgacccaccacctgtccctgcacagcgatgactcttctacaaaagtggacattaaggagacctacgaggtggaagccagcactttctgcttccctgaatctgtggatgtgggtggtgcatcaccccacagcaagaccatcagtgagagcgagctgagcgccagcgccactgagctgctgcaggactacatgctgacgctgcgcaccaagctgtcatcacaggagatccagcagtttgcagcactgctgcacgagtaccgcaatggggcctctatccacgagttctgcatcaacctgcggcagctctacggggacagccgcaagttcctgctgcttggtctgaggcccttcatccctgagaaggacagccagcacttcgagaacttcctggagaccattggcgtgaaggatggccgcggcatcatcactgacagctttggcaggcaccggcgggccctgagcaccacatccagttccaccaccaatgggaacagggccacgggcagctctgatgaccggtcggcaccctcagagggggatgagtgggaccgcatgatctcggacatcagcagcgacattgaggcgctgggctgcagcatggaccaggactcagcatgatggacagtggatgggggggcacccacaccttccgcgcagtcgtcataggccttcccagaaggagctgcccagacctgcgtgtcagcccttggtggtggccagggagaggcgcccggtgcagatggccccgggcggcccaggtcctctactgtgaaggagcagggagctgccgagggacacgagcctcagtgcggggtggaaggctctttgccttgtccaccagggctcagccaagccctgcagtgtgtccccgctcggggagggcccggccgagcgggcagggagagccagtcctgtcggctgggcccttggacggctgtcagttttgcacatgatgttcctattgtaactctcagagaccttaaaaagaagtttactgcaatgtgaataatttaatctctggttgccaagcaaaaaaaagat

SEQ ID NO: 16993 - DNA, 1711 bp, Homo sapiens
ttcgggcccggctggcgggcggcgccgggagcgcgggggcggcgggcccgggtcgagcatgtagcggctgctggcggcggggctcccggggcgggccgggcgggccgcgggagccgcacgcggcgatatggaagaggagggcaagaagggcaagaagtatttaggtcagttaacgtccataccaggatacctgaatccctccagtaggactgaaatcctgcatttcatagacaatgcaaagagagcccaccagcttccgggacacttgactcaggagcacgatgctgtgctcagcctgtctgcgtacaacgtcaagctggcctggagggacggggaggatatcatcctcagggtgcccatccatgacatcgccgccgtctcctatgttcgggatgacgctgcacacctggtggtcctgaagacagcccaggacccagggatctcccccagccagagtctgtgtgcggaaagttccagaggcctcagtgcaggctccctgtcggagagtgcagttgggcccgtggaggcatgctgcctggtcatcctggctgcagagagcaaggtcgctgcggaggagctttgctgtctgctaggccaggtcttccaggttgtttacacggagtccaccatcgactttctggacagagcgatatttgatggggcctctaccccgacccaccacctgtccctgcacagcgatgactcttctacaaaagtggacattaaggagacctacgaggtggaagccagcactttctgcttccctgaatctgtggatgtgggtggtgcatcaccccacagcaagaccatcagtgagagcgagctgagcgccagcgccactgagctgctgcaggactacatgctgacgctgcgcaccaagctgtcatcacaggagatccagcagtttgcagcactgctgcacgagtaccgcaatggggcctctatccacgagttctgcatcaacctgcggcagctctacggggacagccgcaagttcctgctgcttggtctgaggcccttcatccctgagaaggacagccagcacttcgagaacttcctggagaccattggcgtgaaggatggccgcggcatcatcactgacagctttggcaggcaccggcgggccctgagcaccacatccagttccaccaccaatgggaacagggccacgggcagctctgatgaccggtcggcaccctcagagggggatgagtgggaccgcatgatctcggacatcagcagcgacattgaggcgctgggctgcagcatggaccaggactcagcatgatggacagtggatgggggggcacccacaccttccgcgcagtcgtcataggccttcccagaaggagctgcccagacctgcgtgtcagcccttggtggtggccagggagaggcgcccggtgcagatggccccgggcggcccaggtcctctactgtgaaggagcagggagctgccgagggacacgagcctcagtgcggggtggaaggctctttgccttgtccaccagggctcagccaagccctgcagtgtgtccccgctcggggagggcccggccgagcgggcagggagagccagtcctgtcggctgggcccttggacggctgtcagttttgcacatgatgttcctattgtaactctcagagaccttaaaaagaagtttactgcaatgtgaataatttaatctctggttgccaagcaaaaaaaagat

SEQ ID NO: 16994 - DNA, 1657 bp, Homo sapiens
ggcaggctgggaagtcggccgccgtaaagatggcggcaaattgaaaaagttggagctgctcccgcgcgcgctgagtgggcggagcgaacagggggctggacagtatttaggtcagttaacgtccataccaggatacctgaatccctccagtaggactgaaatcctgcatttcatagacaatgcaaagagagcccaccagcttccgggacacttgactcaggagcacgatgctgtgctcagcctgtctgcgtacaacgtcaagctggcctggagggacggggaggatatcatcctcagggtgcccatccatgacatcgccgccgtctcctatgttcgggatgacgctgcacacctggtggtcctgaagacagcccaggacccagggatctcccccagccagagtctgtgtgcggaaagttccagaggcctcagtgcaggctccctgtcggagagtgcagttgggcccgtggaggcatgctgcctggtcatcctggctgcagagagcaaggtcgctgcggaggagctttgctgtctgctaggccaggtcttccaggttgtttacacggagtccaccatcgactttctggacagagcgatatttgatggggcctctaccccgacccaccacctgtccctgcacagcgatgactcttctacaaaagtggacattaaggagacctacgaggtggaagccagcactttctgcttccctgaatctgtggatgtgggtggtgcatcaccccacagcaagaccatcagtgagagcgagctgagcgccagcgccactgagctgctgcaggactacatgctgacgctgcgcaccaagctgtcatcacaggagatccagcagtttgcagcactgctgcacgagtaccgcaatggggcctctatccacgagttctgcatcaacctgcggcagctctacggggacagccgcaagttcctgctgcttggtctgaggcccttcatccctgagaaggacagccagcacttcgagaacttcctggagaccattggcgtgaaggatggccgcggcatcatcactgacagctttggcaggcaccggcgggccctgagcaccacatccagttccaccaccaatgggaacagggccacgggcagctctgatgaccggtcggcaccctcagagggggatgagtgggaccgcatgatctcggacatcagcagcgacattgaggcgctgggctgcagcatggaccaggactcagcatgatggacagtggatgggggggcacccacaccttccgcgcagtcgtcataggccttcccagaaggagctgcccagacctgcgtgtcagcccttggtggtggccagggagaggcgcccggtgcagatggccccgggcggcccaggtcctctactgtgaaggagcagggagctgccgagggacacgagcctcagtgcggggtggaaggctctttgccttgtccaccagggctcagccaagccctgcagtgtgtccccgctcggggagggcccggccgagcgggcagggagagccagtcctgtcggctgggcccttggacggctgtcagttttgcacatgatgttcctattgtaactctcagagaccttaaaaagaagtttactgcaatgtgaataatttaatctctggttgccaagcaaaaaaaagat

SEQ ID NO: 16995 - DNA, 2263 bp, Homo sapiens
tttgaaattaatgtccttctgttgactgcagaatttctgctggaaatgcagggaggctgcttgtggggttcgcgtgctgtgggaagtagggaaaatgagctggtttactttgtgtctttttgtgcatgcagactgtttggattttgccaacagtttctgggtgctgcctgctttttaaacttttaaaaaattgtaaacagcttcagtggctttgcagaaggaagctgtggtttctggtcttcctgttcagtcatgtttttttcagagggagggctaacatctggccatatttttcaacaaattcagaagtgagtagagaatgcatagtagctgtcggcagaggaggaaccagaatctctccaaagaaattcctcaaacagaatttcacacagggtattccatggagaatgagcctggaattgtctcgccatttaaacgagtattcctaaaaggtgaaaagagtagagataagaaagcccatgagaaggtgacagagaggcgccctctgcacactgtggtgttgtcattgcctgagcgcgtcgagccagacagactgctgagcgactatattgagaaggaggtaaagatggagttttgctcttgttgcccaggctggagtataatggcgcagtcttggctcaccacaacctccgcctcccgggttcaagcaattatcctgcctcagcctcctgagtagctgagattacagtatttaggtcagttaacgtccataccaggatacctgaatccctccagtaggactgaaatcctgcatttcatagacaatgcaaagagagcccaccagcttccgggacacttgactcaggagcacgatgctgtgctcagcctgtctgcgtacaacgtcaagctggcctggagggacggggaggatatcatcctcagggtgcccatccatgacatcgccgccgtctcctatgttcgggatgacgctgcacacctggtggtcctgaagacagcccaggacccagggatctcccccagccagagtctgtgtgcggaaagttccagaggcctcagtgcaggctccctgtcggagagtgcagttgggcccgtggaggcatgctgcctggtcatcctggctgcagagagcaaggtcgctgcggaggagctttgctgtctgctaggccaggtcttccaggttgtttacacggagtccaccatcgactttctggacagagcgatatttgatggggcctctaccccgacccaccacctgtccctgcacagcgatgactcttctacaaaagtggacattaaggagacctacgaggtggaagccagcactttctgcttccctgaatctgtggatgtgggtggtgcatcaccccacagcaagaccatcagtgagagcgagctgagcgccagcgccactgagctgctgcaggactacatgctgacgctgcgcaccaagctgtcatcacaggagatccagcagtttgcagcactgctgcacgagtaccgcaatggggcctctatccacgagttctgcatcaacctgcggcagctctacggggacagccgcaagttcctgctgcttggtctgaggcccttcatccctgagaaggacagccagcacttcgagaacttcctggagaccattggcgtgaaggatggccgcggcatcatcactgacagctttggcaggcaccggcgggccctgagcaccacatccagttccaccaccaatgggaacagggccacgggcagctctgatgaccggtcggcaccctcagagggggatgagtgggaccgcatgatctcggacatcagcagcgacattgaggcgctgggctgcagcatggaccaggactcagcatgatggacagtggatgggggggcacccacaccttccgcgcagtcgtcataggccttcccagaaggagctgcccagacctgcgtgtcagcccttggtggtggccagggagaggcgcccggtgcagatggccccgggcggcccaggtcctctactgtgaaggagcagggagctgccgagggacacgagcctcagtgcggggtggaaggctctttgccttgtccaccagggctcagccaagccctgcagtgtgtccccgctcggggagggcccggccgagcgggcagggagagccagtcctgtcggctgggcccttggacggctgtcagttttgcacatgatgttcctattgtaactctcagagaccttaaaaagaagtttactgcaatgtgaataatttaatctctggttgccaagcaaaaaaaagat

SEQ ID NO: 16996 - DNA, 1817 bp, Homo sapiens
ttcgggcccggctggcgggcggcgccgggagcgcgggggcggcgggcccgggtcgagcatgtagcggctgctggcggcggggctcccggggcgggccgggcgggccgcgggagccgcacgcggcgatatggaagaggagggcaagaagggcaagaaggataatttcactggatacagaatcaaatagttccctcctctctcttcttgcttggatggttcctgaagagaaatccagtgtcattcttgttcttgccattttatagtatttaggtcagttaacgtccataccaggatacctgaatccctccagtaggactgaaatcctgcatttcatagacaatgcaaagagagcccaccagcttccgggacacttgactcaggagcacgatgctgtgctcagcctgtctgcgtacaacgtcaagctggcctggagggacggggaggatatcatcctcagggtgcccatccatgacatcgccgccgtctcctatgttcgggatgacgctgcacacctggtggtcctgaagacagcccaggacccagggatctcccccagccagagtctgtgtgcggaaagttccagaggcctcagtgcaggctccctgtcggagagtgcagttgggcccgtggaggcatgctgcctggtcatcctggctgcagagagcaaggtcgctgcggaggagctttgctgtctgctaggccaggtcttccaggttgtttacacggagtccaccatcgactttctggacagagcgatatttgatggggcctctaccccgacccaccacctgtccctgcacagcgatgactcttctacaaaagtggacattaaggagacctacgaggtggaagccagcactttctgcttccctgaatctgtggatgtgggtggtgcatcaccccacagcaagaccatcagtgagagcgagctgagcgccagcgccactgagctgctgcaggactacatgctgacgctgcgcaccaagctgtcatcacaggagatccagcagtttgcagcactgctgcacgagtaccgcaatggggcctctatccacgagttctgcatcaacctgcggcagctctacggggacagccgcaagttcctgctgcttggtctgaggcccttcatccctgagaaggacagccagcacttcgagaacttcctggagaccattggcgtgaaggatggccgcggcatcatcactgacagctttggcaggcaccggcgggccctgagcaccacatccagttccaccaccaatgggaacagggccacgggcagctctgatgaccggtcggcaccctcagagggggatgagtgggaccgcatgatctcggacatcagcagcgacattgaggcgctgggctgcagcatggaccaggactcagcatgatggacagtggatgggggggcacccacaccttccgcgcagtcgtcataggccttcccagaaggagctgcccagacctgcgtgtcagcccttggtggtggccagggagaggcgcccggtgcagatggccccgggcggcccaggtcctctactgtgaaggagcagggagctgccgagggacacgagcctcagtgcggggtggaaggctctttgccttgtccaccagggctcagccaagccctgcagtgtgtccccgctcggggagggcccggccgagcgggcagggagagccagtcctgtcggctgggcccttggacggctgtcagttttgcacatgatgttcctattgtaactctcagagaccttaaaaagaagtttactgcaatgtgaataatttaatctctggttgccaagcaaaaaaaagat

SEQ ID NO: 16997 - DNA, 1617 bp, Homo sapiens
ttcgggcccggctggcgggcggcgccgggagcgcgggggcggcgggcccgggtcgagcatgtagcggctgctggcggcggggctcccggggcgggccgggcgggccgcgggagccgcacgcggcgatatggaagaggagggcaagaagggcaagaagcctggaattgtctcgccatttaaacgagtattcctaaaaggtgaaaagagtagagataagaaagcccatgagaaggtgacagagaggcgccctctgcacactgtggtgttgtcattgcctgagcgcgtcgagccagacagactgctgagcgactatattgagaaggaggtaaagcccaggacccagggatctcccccagccagagtctgtgtgcggaaagttccagaggcctcagtgcaggctccctgtcggagagtgcagttgggcccgtggaggcatgctgcctggtcatcctggctgcagagagcaaggtcgctgcggaggagctttgctgtctgctaggccaggtcttccaggttgtttacacggagtccaccatcgactttctggacagagcgatatttgatggggcctctaccccgacccaccacctgtccctgcacagcgatgactcttctacaaaagtggacattaaggagacctacgaggtggaagccagcactttctgcttccctgaatctgtggatgtgggtggtgcatcaccccacagcaagaccatcagtgagagcgagctgagcgccagcgccactgagctgctgcaggactacatgctgacgctgcgcaccaagctgtcatcacaggagatccagcagtttgcagcactgctgcacgagtaccgcaatggggcctctatccacgagttctgcatcaacctgcggcagctctacggggacagccgcaagttcctgctgcttggtctgaggcccttcatccctgagaaggacagccagcacttcgagaacttcctggagaccattggcgtgaaggatggccgcggcatcatcactgacagctttggcaggcaccggcgggccctgagcaccacatccagttccaccaccaatgggaacagggccacgggcagctctgatgaccggtcggcaccctcagagggggatgagtgggaccgcatgatctcggacatcagcagcgacattgaggcgctgggctgcagcatggaccaggactcagcatgatggacagtggatgggggggcacccacaccttccgcgcagtcgtcataggccttcccagaaggagctgcccagacctgcgtgtcagcccttggtggtggccagggagaggcgcccggtgcagatggccccgggcggcccaggtcctctactgtgaaggagcagggagctgccgagggacacgagcctcagtgcggggtggaaggctctttgccttgtccaccagggctcagccaagccctgcagtgtgtccccgctcggggagggcccggccgagcgggcagggagagccagtcctgtcggctgggcccttggacggctgtcagttttgcacatgatgttcctattgtaactctcagagaccttaaaaagaagtttactgcaatgtgaataatttaatctctggttgccaagcaaaaaaaagat

SEQ ID NO: 16998 - DNA, 1574 bp, Homo sapiens
ttcgggcccggctggcgggcggcgccgggagcgcgggggcggcgggcccgggtcgagcatgtagcggctgctggcggcggggctcccggggcgggccgggcgggccgcgggagccgcacgcggcgatatggaagaggagggcaagaagggcaagaagtatttaggtcagttaacgtccataccaggatacctgaatccctccagtaggactgaaatcctgcatttcatagacaatgcaaagagagcccaccagcttccgggacacttgactcaggagcacgatgctgtgctcagcctgtctgcgtacaacgtcaagctggcctggagggacggggaggatatcatcctcagggtgcccatccatgacatcgccgccgtctcctatgttcgggatgacgctgcacacctggtggtcctgaagacaggtcgctgcggaggagctttgctgtctgctaggccaggtcttccaggttgtttacacggagtccaccatcgactttctggacagagcgatatttgatggggcctctaccccgacccaccacctgtccctgcacagcgatgactcttctacaaaagtggacattaaggagacctacgaggtggaagccagcactttctgcttccctgaatctgtggatgtgggtggtgcatcaccccacagcaagaccatcagtgagagcgagctgagcgccagcgccactgagctgctgcaggactacatgctgacgctgcgcaccaagctgtcatcacaggagatccagcagtttgcagcactgctgcacgagtaccgcaatggggcctctatccacgagttctgcatcaacctgcggcagctctacggggacagccgcaagttcctgctgcttggtctgaggcccttcatccctgagaaggacagccagcacttcgagaacttcctggagaccattggcgtgaaggatggccgcggcatcatcactgacagctttggcaggcaccggcgggccctgagcaccacatccagttccaccaccaatgggaacagggccacgggcagctctgatgaccggtcggcaccctcagagggggatgagtgggaccgcatgatctcggacatcagcagcgacattgaggcgctgggctgcagcatggaccaggactcagcatgatggacagtggatgggggggcacccacaccttccgcgcagtcgtcataggccttcccagaaggagctgcccagacctgcgtgtcagcccttggtggtggccagggagaggcgcccggtgcagatggccccgggcggcccaggtcctctactgtgaaggagcagggagctgccgagggacacgagcctcagtgcggggtggaaggctctttgccttgtccaccagggctcagccaagccctgcagtgtgtccccgctcggggagggcccggccgagcgggcagggagagccagtcctgtcggctgggcccttggacggctgtcagttttgcacatgatgttcctattgtaactctcagagaccttaaaaagaagtttactgcaatgtgaataatttaatctctggttgccaagcaaaaaaaagat

SEQ ID NO: 16999 - DNA, 1480 bp, Homo sapiens
ttcgggcccggctggcgggcggcgccgggagcgcgggggcggcgggcccgggtcgagcatgtagcggctgctggcggcggggctcccggggcgggccgggcgggccgcgggagccgcacgcggcgatatggaagaggagggcaagaagggcaagaagcctggaattgtctcgccatttaaacgagtattcctaaaaggtgaaaagagtagagataagaaagcccatgagaaggtgacagagaggcgccctctgcacactgtggtgttgtcattgcctgagcgcgtcgagccagacagactgctgagcgactatattgagaaggaggtaaaggtcgctgcggaggagctttgctgtctgctaggccaggtcttccaggttgtttacacggagtccaccatcgactttctggacagagcgatatttgatggggcctctaccccgacccaccacctgtccctgcacagcgatgactcttctacaaaagtggacattaaggagacctacgaggtggaagccagcactttctgcttccctgaatctgtggatgtgggtggtgcatcaccccacagcaagaccatcagtgagagcgagctgagcgccagcgccactgagctgctgcaggactacatgctgacgctgcgcaccaagctgtcatcacaggagatccagcagtttgcagcactgctgcacgagtaccgcaatggggcctctatccacgagttctgcatcaacctgcggcagctctacggggacagccgcaagttcctgctgcttggtctgaggcccttcatccctgagaaggacagccagcacttcgagaacttcctggagaccattggcgtgaaggatggccgcggcatcatcactgacagctttggcaggcaccggcgggccctgagcaccacatccagttccaccaccaatgggaacagggccacgggcagctctgatgaccggtcggcaccctcagagggggatgagtgggaccgcatgatctcggacatcagcagcgacattgaggcgctgggctgcagcatggaccaggactcagcatgatggacagtggatgggggggcacccacaccttccgcgcagtcgtcataggccttcccagaaggagctgcccagacctgcgtgtcagcccttggtggtggccagggagaggcgcccggtgcagatggccccgggcggcccaggtcctctactgtgaaggagcagggagctgccgagggacacgagcctcagtgcggggtggaaggctctttgccttgtccaccagggctcagccaagccctgcagtgtgtccccgctcggggagggcccggccgagcgggcagggagagccagtcctgtcggctgggcccttggacggctgtcagttttgcacatgatgttcctattgtaactctcagagaccttaaaaagaagtttactgcaatgtgaataatttaatctctggttgccaagcaaaaaaaagat

SEQ ID NO: 17000 - DNA, 1612 bp, Homo sapiens
ttcgggcccggctggcgggcggcgccgggagcgcgggggcggcgggcccgggtcgagcatgtagcggctgctggcggcggggctcccggggcgggccgggcgggccgcgggagccgcacgcggcgatatggaagaggagggcaagaagggcaagaagcctggaattgtctcgccatttaaacgagtattcctaaaaggtgaaaagagtagagataagaaagcccatgagaaggtgacagagaggcgccctctgcacactgtggtgttgtcattgcctgagcgcgtcgagccagacagactgctgagcgactatattgagaaggaggtaaagtatttaggtcagttaacgtccataccaggatacctgaatccctccagtaggactgaaatcctgcatttcatagacaatgcaaagagagcccaccagcttccgggacacttgactcaggagcacgatgctgtgctcagcctgtctgcgtacaacgtcaagctggcctggagggacggggaggatatcatcctcagggtgcccatccatgacatcgccgccgtctcctatgttcgggatgacgctgcacacctggtggtcctgaagacagatgactcttctacaaaagtggacattaaggagacctacgaggtggaagccagcactttctgcttccctgaatctgtggatgtgggtggtgcatcaccccacagcaagaccatcagtgagagcgagctgagcgccagcgccactgagctgctgcaggactacatgctgacgctgcgcaccaagctgtcatcacaggagatccagcagtttgcagcactgctgcacgagtaccgcaatggggcctctatccacgagttctgcatcaacctgcggcagctctacggggacagccgcaagttcctgctgcttggtctgaggcccttcatccctgagaaggacagccagcacttcgagaacttcctggagaccattggcgtgaaggatggccgcggcatcatcactgacagctttggcaggcaccggcgggccctgagcaccacatccagttccaccaccaatgggaacagggccacgggcagctctgatgaccggtcggcaccctcagagggggatgagtgggaccgcatgatctcggacatcagcagcgacattgaggcgctgggctgcagcatggaccaggactcagcatgatggacagtggatgggggggcacccacaccttccgcgcagtcgtcataggccttcccagaaggagctgcccagacctgcgtgtcagcccttggtggtggccagggagaggcgcccggtgcagatggccccgggcggcccaggtcctctactgtgaaggagcagggagctgccgagggacacgagcctcagtgcggggtggaaggctctttgccttgtccaccagggctcagccaagccctgcagtgtgtccccgctcggggagggcccggccgagcgggcagggagagccagtcctgtcggctgggcccttggacggctgtcagttttgcacatgatgttcctattgtaactctcagagaccttaaaaagaagtttactgcaatgtgaataatttaatctctggttgccaagcaaaaaaaagat

SEQ ID NO: 17001 - DNA, 2687 bp, Homo sapiens
ttcgggcccggctggcgggcggcgccgggagcgcgggggcggcgggcccgggtcgagcatgtagcggctgctggcggcggggctcccggggcgggccgggcgggccgcgggagccgcacgcggcgatatggaagaggagggcaagaagggcaagaagtatttaggtcagttaacgtccataccaggatacctgaatccctccagtaggactgaaatcctgcatttcatagacaatgcaaagagagcccaccagcttccgggacacttgactcaggagcacgatgctgtgctcagcctgtctgcgtacaacgtcaagctggcctggagggacggggaggatatcatcctcagggtgcccatccatgacatcgccgccgtctcctatgttcgggatgacgctgcacacctggtggtcctgaagacagcccaggacccagggatctcccccagccagagtctgtgtgcggaaagttccagaggcctcagtgcaggctccctgtcggagagtgcagttgggcccgtggaggcatgctgcctggtcatcctggctgcagagagcaaggtcgctgcggaggagctttgctgtctgctaggccaggtcttccaggttgtttacacggagtccaccatcgactttctggacagagcgatatttgatggggcctctaccccgacccaccacctgtccctgcacagcgccagccacgtgacctcttccacagtcacatcttcctttgactgtcagcttcctctgcatttcaggactcttgcaatcacattgagcccacccaaattctccagggtcatctccctatttcaaggtcagctgattagcatcctttactcccctttgaaattggtaacatattcaccaattccagggattaggatgtggacgtctttggggggtcattattctgccctccatacttaccttgttcctagtgccagaaatgtcccttttatctctcagcctctccctctgcttcatttaaaatcttaccctctctgcaacactcacctgcctcgctcacaaagctttcactcactgtctgtgctggggtgaaatgtgccttcctcaggtttgaaatagcaaattacagtctgtgtcacacggacctaatgtcatttgttgaatgtagctgctcagtgccagaccctttgctggtctgagggtcttgggaatcctgtggcttcactgggttcagatggggagtcagactgcccggctctgactgtggtttctgctgtgtgacctgggccaagttgtgtaactctctgacttacttcctaatctacaagtgaagacaggggtgatatatgcctgggttaaaggagacaaagccccagtaaccctgcctggcacatgagtgatacctcaaagacagcttttgctggctctggccatgggtgaatgtggacttcagaccagcgtgcagcaggatttgcatttgccaggatccccaggaggggtgtatgtgggctcaagtctgggaagccctgccctgaggcacacagcacattccagagtgcgggcagcttgatgaaggacagcagggtccctgaagaccagggctgccgctgtctcctgtaaatacagcagtgggctggactcaaaatgcctccccactatgtccctgaaagtcatcttagttttctgcatcttccttacagatgactcttctacaaaagtggacattaaggagacctacgaggtggaagccagcactttctgcttccctgaatctgtggatgtgggtggtgcatcaccccacagcaagaccatcagtgagagcgagctgagcgccagcgccactgagctgctgcaggactacatgctgacgctgcgcaccaagctgtcatcacaggagatccagcagtttgcagcactgctgcacgagtaccgcaatggggcctctatccacgagttctgcatcaacctgcggcagctctacggggacagccgcaagttcctgctgcttggtctgaggcccttcatccctgagaaggacagccagcacttcgagaacttcctggagaccattggcgtgaaggatggccgcggcatcatcactgacagctttggcaggcaccggcgggccctgagcaccacatccagttccaccaccaatgggaacagggccacgggcagctctgatgaccggtcggcaccctcagagggggatgagtgggaccgcatgatctcggacatcagcagcgacattgaggcgctgggctgcagcatggaccaggactcagcatgatggacagtggatgggggggcacccacaccttccgcgcagtcgtcataggccttcccagaaggagctgcccagacctgcgtgtcagcccttggtggtggccagggagaggcgcccggtgcagatggccccgggcggcccaggtcctctactgtgaaggagcagggagctgccgagggacacgagcctcagtgcggggtggaaggctctttgccttgtccaccagggctcagccaagccctgcagtgtgtccccgctcggggagggcccggccgagcgggcagggagagccagtcctgtcggctgggcccttggacggctgtcagttttgcacatgatgttcctattgtaactctcagagaccttaaaaagaagtttactgcaatgtgaataatttaatctctggttgccaagcaaaaaaaagat

SEQ ID NO: 17002 - DNA, 2447 bp, Homo sapiens
taataattttttttttactgagaagtacacaagtcatacatgtacagttgaatgaattttcataaagtaaacacatcatgtaacaccactactgggggttgctgaagtgggcttcttcccctgccagcctttcccaagacctccccgtgggatccacacacagatgtgcacacgttacgcacatgcatgcattctctgcttatttctgccttggagttttgcttgctgtgttctctctactacagctatgccaaaacatagcagcataaacagcagaaatatattctcttataattctatacgttaagagtccattgtgggtcccactgggctaaagttgaggtgtccacagggctggttccttctggaggctccagagaagaagccatttccttgtctttccagctcctaaaggcggctgcatgccttggctcatggcccttcctctgtcttcacagccagccacgtgacctcttccacagtcacatcttcctttgactgtcagcttcctctgcatttcaggactcttgcaatcacattgagcccacccaaattctccagggtcatctccctatttcaaggtcagctgattagcatcctttactcccctttgaaattggtaacatattcaccaattccagggattaggatgtggacgtctttggggggtcattattctgccctccatacttaccttgttcctagtgccagaaatgtcccttttatctctcagcctctccctctgcttcatttaaaatcttaccctctctgcaacactcacctgcctcgctcacaaagctttcactcactgtctgtgctggggtgaaatgtgccttcctcaggtttgaaatagcaaattacagtctgtgtcacacggacctaatgtcatttgttgaatgtagctgctcagtgccagaccctttgctggtctgagggtcttgggaatcctgtggcttcactgggttcagatggggagtcagactgcccggctctgactgtggtttctgctgtgtgacctgggccaagttgtgtaactctctgacttacttcctaatctacaagtgaagacaggggtgatatatgcctgggttaaaggagacaaagccccagtaaccctgcctggcacatgagtgatacctcaaagacagcttttgctggctctggccatgggtgaatgtggacttcagaccagcgtgcagcaggatttgcatttgccaggatccccaggaggggtgtatgtgggctcaagtctgggaagccctgccctgaggcacacagcacattccagagtgcgggcagcttgatgaaggacagcagggtccctgaagaccagggctgccgctgtctcctgtaaatacagcagtgggctggactcaaaatgcctccccactatgtccctgaaagtcatcttagttttctgcatcttccttacagatgactcttctacaaaagtggacattaaggagacctacgaggtggaagccagcactttctgcttccctgaatctgtggatgtgggtggtgcatcaccccacagcaagaccatcagtgagagcgagctgagcgccagcgccactgagctgctgcaggactacatgctgacgctgcgcaccaagctgtcatcacaggagatccagcagtttgcagcactgctgcacgagtaccgcaatggggcctctatccacgagttctgcatcaacctgcggcagctctacggggacagccgcaagttcctgctgcttggtctgaggcccttcatccctgagaaggacagccagcacttcgagaacttcctggagaccattggcgtgaaggatggccgcggcatcatcactgacagctttggcaggcaccggcgggccctgagcaccacatccagttccaccaccaatgggaacagggccacgggcagctctgatgaccggtcggcaccctcagagggggatgagtgggaccgcatgatctcggacatcagcagcgacattgaggcgctgggctgcagcatggaccaggactcagcatgatggacagtggatgggggggcacccacaccttccgcgcagtcgtcataggccttcccagaaggagctgcccagacctgcgtgtcagcccttggtggtggccagggagaggcgcccggtgcagatggccccgggcggcccaggtcctctactgtgaaggagcagggagctgccgagggacacgagcctcagtgcggggtggaaggctctttgccttgtccaccagggctcagccaagccctgcagtgtgtccccgctcggggagggcccggccgagcgggcagggagagccagtcctgtcggctgggcccttggacggctgtcagttttgcacatgatgttcctattgtaactctcagagaccttaaaaagaagtttactgcaatgtgaataatttaatctctggttgccaagcaaaaaaaagat

SEQ ID NO: 17003 - DNA, 1480 bp, Homo sapiens
ttcgggcccggctggcgggcggcgccgggagcgcgggggcggcgggcccgggtcgagcatgtagcggctgctggcggcggggctcccggggcgggccgggcgggccgcgggagccgcacgcggcgatatggaagaggagggcaagaagggcaagaagcctggaattgtctcgccatttaaacgagtattcctaaaaggtgaaaagagtagagataagaaagcccatgagaaggtgacagagaggcgccctctgcacactgtggtgttgtcattgcctgagcgcgtcgagccagacagactgctgagcgactatattgagaaggaggtaaagtatttaggtcagttaacgtccataccaggatacctgaatccctccagtaggactgaaatcctgcatttcatagacaatgcaaagagagcccaccagcttccgggacacttgactcaggagcacgatgctgtgctcagcctgtctgcgtacaacgtcaagctggcctggagggacggggaggatatcatcctcagggtgcccatccatgacatcgccgccgtctcctatgttcgggatgacgctgcacacctggtggtcctgaagacagcccaggacccagggatctcccccagccagagtctgtgtgcggaaagttccagaggcctcagtgcaggctccctgtcggagagtgcagttgggcccgtggaggcatgctgcctggtcatcctggctgcagagagcaaggtcgctgcggaggagctttgctgtctgctaggccaggtcttccaggttgtttacacggagtccaccatcgactttctggacagagcgatatttgatggggcctctaccccgacccaccacctgtccctgcacagcgatgactcttctacaaaagtggacattaaggagacctacgaggtggaagccagcactttctgcttccctgaatctgtggatgtgggtggtgcatcaccccacagcaagaccatcagtgagagcgagctgagcgccagcgccactgagctgctgcaggactacatgctgacgctgcgcaccaagctgtcatcacaggagatccagcagtttgcagcactgctgcacgagtaccgcaatggggcctctatccacgagttctgcatcaacctgcggcagctctacggggacagccgcaagttcctgctgcttggtctgaggcccttcatccctgagaaggacagccagcacttcgagaacttcctggagaccattggcgtgaaggatggccgcggcatcatcactgacagctttggcagccaagccctgcagtgtgtccccgctcggggagggcccggccgagcgggcagggagagccagtcctgtcggctgggcccttggacggctgtcagttttgcacatgatgttcctattgtaactctcagagaccttaaaaagaagtttactgcaatgtgaataatttaatctctggttgccaagcaaaaaaaagat

SEQ ID NO: 17004 - DNA, 1390 bp, Homo sapiens
ttcgggcccggctggcgggcggcgccgggagcgcgggggcggcgggcccgggtcgagcatgtagcggctgctggcggcggggctcccggggcgggccgggcgggccgcgggagccgcacgcggcgatatggaagaggagggcaagaagggcaagaagcctggaattgtctcgccatttaaacgagtattcctaaaaggtgaaaagagtagagataagaaagcccatgagaaggtgacagagaggcgccctctgcacactgtggtgttgtcattgcctgagcgcgtcgagccagacagactgctgagcgactatattgagaaggaggtaaagtatttaggtcagttaacgtccataccaggatacctgaatccctccagtaggactgaaatcctgcatttcatagacaatgcaaagagagcccaccagcttccgggacacttgactcaggagcacgatgctgtgctcagcctgtctgcgtacaacgtcaagctggcctggagggacggggaggatatcatcctcagggtgcccatccatgacatcgccgccgtctcctatgttcgggatgacgctgcacacctggtggtcctgaagacagcccaggacccagggatctcccccagccagagtctgtgtgcggaaagttccagaggcctcagtgcaggctccctgtcggagagtgcagttgggcccgtggaggcatgctgcctggtcatcctggctgcagagagcaaggtcgctgcggaggagctttgctgtctgctaggccaggtcttccaggttgtttacacggagtccaccatcgactttctggacagagcgatatttgatggggcctctaccccgacccaccacctgtccctgcacagcgatgactcttctacaaaagtggacattaaggagacctacgaggtggaagccagcactttctgcttccctgaatctgtggatgtgggtggtgcatcaccccacatggatgggggggcacccacaccttccgcgcagtcgtcataggccttcccagaaggagctgcccagacctgcgtgtcagcccttggtggtggccagggagaggcgcccggtgcagatggccccgggcggcccaggtcctctactgtgaaggagcagggagctgccgagggacacgagcctcagtgcggggtggaaggctctttgccttgtccaccagggctcagccaagccctgcagtgtgtccccgctcggggagggcccggccgagcgggcagggagagccagtcctgtcggctgggcccttggacggctgtcagttttgcacatgatgttcctattgtaactctcagagaccttaaaaagaagtttactgcaatgtgaataatttaatctctggttgccaagcaaaaaaaagat

SEQ ID NO: 17005 - DNA, 1772 bp, Homo sapiens
tttgaaattaatgtccttctgttgactgcagaatttctgctggaaatgcagggaggctgcttgtggggttcgcgtgctgtgggaagtagggaaaatgagctggtttactttgtgtctttttgtgcatgcagactgtttggattttgccaacagtttctgggtgctgcctgctttttaaacttttaaaaaattgtaaacagcttcagtggctttgcagaaggaagctgtggtttctggtcttcctgttcagtcatgtttttttcagagggagggctaacatctggccatatttttcaacaaattcagaagtgagtagagaatgcatagtagctgtcggcagaggaggaaccagaatctctccaaagaaattcctcaaacagaatttcacacagggtattccatggagaatgagtatttaggtcagttaacgtccataccaggatacctgaatccctccagtaggactgaaatcctgcatttcatagacaatgcaaagagagcccaccagcttccgggacacttgactcaggagcacgatgctgtgctcagcctgtctgcgtacaacgtcaagctggcctggagggacggggaggatatcatcctcagggtgcccatccatgacatcgccgccgtctcctatgttcgggatgacgctgcacacctggtggtcctgaagacagcccaggacccagggatctcccccagccagagtctgtgtgcggaaagttccagaggcctcagtgcaggctccctgtcggagagtgcagttgggcccgtggaggcatgctgcctggtcatcctggctgcagagagcaagctgcttccctgaatctgtggatgtgggtggtgcatcaccccacagcaagaccatcagtgagagcgagctgagcgccagcgccactgagctgctgcaggactacatgctgacgctgcgcaccaagctgtcatcacaggagatccagcagtttgcagcactgctgcacgagtaccgcaatggggcctctatccacgagttctgcatcaacctgcggcagctctacggggacagccgcaagttcctgctgcttggtctgaggcccttcatccctgagaaggacagccagcacttcgagaacttcctggagaccattggcgtgaaggatggccgcggcatcatcactgacagctttggcaggcaccggcgggccctgagcaccacatccagttccaccaccaatgggaacagggccacgggcagctctgatgaccggtcggcaccctcagagggggatgagtgggaccgcatgatctcggacatcagcagcgacattgaggcgctgggctgcagcatggaccaggactcagcatgatggacagtggatgggggggcacccacaccttccgcgcagtcgtcataggccttcccagaaggagctgcccagacctgcgtgtcagcccttggtggtggccagggagaggcgcccggtgcagatggccccgggcggcccaggtcctctactgtgaaggagcagggagctgccgagggacacgagcctcagtgcggggtggaaggctctttgccttgtccaccagggctcagccaagccctgcagtgtgtccccgctcggggagggcccggccgagcgggcagggagagccagtcctgtcggctgggcccttggacggctgtcagttttgcacatgatgttcctattgtaactctcagagaccttaaaaagaagtttactgcaatgtgaataatttaatctctggttgccaagcaaaaaaaagat

SEQ ID NO: 17006 - DNA, 1638 bp, Homo sapiens
aaactcatgagtcctggaggcaggtagaggcacttgtaggctgaggacccgtagagcccggtgtgccctgcccaagccccacctgggaatggagttatctctgtaaagatcttgctgcctttgagcaagcactgcaaatgggtatttaggtcagttaacgtccataccaggatacctgaatccctccagtaggactgaaatcctgcatttcatagacaatgcaaagagagcccaccagcttccgggacacttgactcaggagcacgatgctgtgctcagcctgtctgcgtacaacgtcaagctggcctggagggacggggaggatatcatcctcagggtgcccatccatgacatcgccgccgtctcctatgttcgggatgacgctgcacacctggtggtcctgaagacagcccaggacccagggatctcccccagccagagtctgtgtgcggaaagttccagaggcctcagtgcaggctccctgtcggagagtgcagttgggcccgtggaggcatgctgcctggtcatcctggctgcagagagcaaggtcgctgcggaggagctttgctgtctgctaggccaggtcttccaggttgtttacacggagtccaccatcgactttctggacagagcgatatttgatggggcctctaccccgacccaccacctgtccctgcacagcgctgcttccctgaatctgtggatgtgggtggtgcatcaccccacagcaagaccatcagtgagagcgagctgagcgccagcgccactgagctgctgcaggactacatgctgacgctgcgcaccaagctgtcatcacaggagatccagcagtttgcagcactgctgcacgagtaccgcaatggggcctctatccacgagttctgcatcaacctgcggcagctctacggggacagccgcaagttcctgctgcttggtctgaggcccttcatccctgagaaggacagccagcacttcgagaacttcctggagaccattggcgtgaaggatggccgcggcatcatcactgacagctttggcaggcaccggcgggccctgagcaccacatccagttccaccaccaatgggaacagggccacgggcagctctgatgaccggtcggcaccctcagagggggatgagtgggaccgcatgatctcggacatcagcagcgacattgaggcgctgggctgcagcatggaccaggactcagcatgatggacagtggatgggggggcacccacaccttccgcgcagtcgtcataggccttcccagaaggagctgcccagacctgcgtgtcagcccttggtggtggccagggagaggcgcccggtgcagatggccccgggcggcccaggtcctctactgtgaaggagcagggagctgccgagggacacgagcctcagtgcggggtggaaggctctttgccttgtccaccagggctcagccaagccctgcagtgtgtccccgctcggggagggcccggccgagcgggcagggagagccagtcctgtcggctgggcccttggacggctgtcagttttgcacatgatgttcctattgtaactctcagagaccttaaaaagaagtttactgcaatgtgaataatttaatctctggttgccaagcaaaaaaaagat

SEQ ID NO: 17007 - DNA, 1342 bp, Homo sapiens
ttcgggcccggctggcgggcggcgccgggagcgcgggggcggcgggcccgggtcgagcatgtagcggctgctggcggcggggctcccggggcgggccgggcgggccgcgggagccgcacgcggcgatatggaagaggagggcaagaagggcaagaagcctggaattgtctcgccatttaaacgagtattcctaaaaggtgaaaagagtagagataagaaagcccatgagaaggtgacagagaggcgccctctgcacactgtggtgttgtcattgcctgagcgcgtcgagccagacagactgctgagcgactatattgagaaggaggtaaagtatttaggtcagttaacgtccataccaggatacctgaatccctccagtaggactgaaatcctgcatttcatagacaatgcaaagagagcccaccagcttccgggacacttgactcaggagcacgatgctgtgctcagcctgtctgcgtacaacgtcaagctggcctggagggacggggaggatatcatcctcagggtgcccatccatgacatcgccgccgtctcctatgttcgggatgacgctgcacacctggtggtcctgaagacagcccaggacccagggatctcccccagccagagtctgtgtgcggaaagttccagaggcctcagtgcaggctccctgtcggagagtgcagttgggcccgtggaggcatgctgcctggtcatcctggctgcagagagcaaggtcgctgcggaggagctttgctgtctgctaggccaggtcttccaggttgtttacacggagtccaccatcgactttctggacagagcgatatttgatggggcctctaccccgacccaccacctgtccctgcacagcgatgactcttctacaaaagtggacattaaggagacctacgaggtggaagccagcactttgtgagtgcacatgccaccaagccctgcggtgggacacgcaccaaatgcgttgtctggtgttgtccaggctgcagccagtcagctcccccatctcagctcaccctcgctaagccatccccagacccactgtacccagcttagtgaatggctgaggcctggctcgccgccctctcctcgtagacttctagagcccttgctgtccctcttgtctctccctgcctaccttcccatggcctcccaagagtgagcttgtaataggcatgttggatggagctgttcccctgcccgagcctgccgaggcgctggccttccagcccatctctgccaccacctggggctctgtagtagttcacccactcgcgctctccattcctgccacctccccaaccctggctccttcccctgcccaaca

SEQ ID NO: 17008 - DNA, 2318 bp, Homo sapiens
ttcgggcccggctggcgggcggcgccgggagcgcgggggcggcgggcccgggtcgagcatgtagcggctgctggcggcggggctcccggggcgggccgggcgggccgcgggagccgcacgcggcgatatggaagaggagggcaagaagggcaagaagcctggaattgtctcgccatttaaacgagtattcctaaaaggtgaaaagagtagagataagaaagcccatgagaaggtgacagagaggcgccctctgcacactgtggtgttgtcattgcctgagcgcgtcgagccagacagactgctgagcgactatattgagaaggaggtaaagtatttaggtcagttaacgtccataccaggatacctgaatccctccagtaggactgaaatcctgcatttcatagacaatgcaaagagagcccaccagcttccgggacacttgactcaggagcacgatgctgtgctcagcctgtctgcgtacaacgtcaagctggcctggagggacggggaggatatcatcctcagggtgcccatccatgacatcgccgccgtctcctatgttcgggatgacgctgcacacctggtggtcctgaagacagcccaggacccagggatctcccccagccagagtctgtgtgcggaaagttccagaggcctcagtgcaggctccctgtcggagagtgcagttgggcccgtggaggcatgctgcctggtcatcctggctgcagagagcaaggtcgctgcggaggagctttgctgtctgctaggccaggtcttccaggttgtttacacggagtccaccatcgactttctggacagagcgatatttgatggggcctctaccccgacccaccacctgtccctgcacagcgccagccacgtgacctcttccacagtcacatcttcctttgactgtcagcttcctctgcatttcaggactcttgcaatcacattgagcccacccaaattctccagggtcatctccctatttcaaggtcagctgattagcatcctttactcccctttgaaattggtaacatattcaccaattccagggattaggatgtggacgtctttggggggtcattattctgccctccatacttaccttgttcctagtgccagaaatgtcccttttatctctcagcctctccctctgcttcatttaaaatcttaccctctctgcaacactcacctgcctcgctcacaaagctttcactcactgtctgtgctggggtgaaatgtgccttcctcaggtttgaaatagcaaattacagtctgtgtcacacggacctaatgtcatttgttgaatgtagctgctcagtgccagaccctttgctggtctgagggtcttgggaatcctgtggcttcactgggttcagatggggagtcagactgcccggctctgactgtggtttctgctgtgtgacctgggccaagttgtgtaactctctgacttacttcctaatctacaagtgaagacaggggtgatatatgcctgggttaaaggagacaaagccccagtaaccctgcctggcacatgagtgatacctcaaagacagcttttgctggctctggccatgggtgaatgtggacttcagaccagcgtgcagcaggatttgcatttgccaggatccccaggaggggtgtatgtgggctcaagtctgggaagccctgccctgaggcacacagcacattccagagtgcgggcagcttgatgaaggacagcagggtccctgaagaccagggctgccgctgtctcctgtaaatacagcagtgggctggactcaaaatgcctccccactatgtccctgaaagtcatcttagttttctgcatcttccttacagatgactcttctacaaaagtggacattaaggagacctacgaggtggaagccagcactttgtgagtgcacatgccaccaagccctgcggtgggacacgcaccaaatgcgttgtctggtgttgtccaggctgcagccagtcagctcccccatctcagctcaccctcgctaagccatccccagacccactgtacccagcttagtgaatggctgaggcctggctcgccgccctctcctcgtagacttctagagcccttgctgtccctcttgtctctccctgcctaccttcccatggcctcccaagagtgagcttgtaataggcatgttggatggagctgttcccctgcccgagcctgccgaggcgctggccttccagcccatctctgccaccacctggggctctgtagtagttcacccactcgcgctctccattcctgccacctccccaaccctggctccttcccctgcccaaca

SEQ ID NO: 17009 - DNA, 429 bp, Homo sapiens
tatacgtatgcatttctgttgggtgtatacctaggagtgaagttgctggaatacatgtattctgccttattggtgaacaccaaataattttccaaagtagttgtgctagtttacacataacgtgtggttttaatgtgcatttcctacatttattgcattttggctactagaaattaattctctcagtgattgcagcttaatttttaaattaataagagagctgccataaggattttcctatactgcattttttgctagggaagaggacataggtcaagtgggttgccctgacaactgtaattcttggggacttatttacaaaggggtacctgaccacaaggcctcttggccatggtcaggcaaaccaaaggctaggtcatctaaaagtgaatttactttacataaatatatttaacccaatggtgtttt

SEQ ID NO: 17010 - DNA, 387 bp, Homo sapiens
gtaagctggatatttaaagggattgcagtctttgctgatgagactaagcatatgacgacaggaatgagtgtgagagagaacctcaagaaactgaaaggccagactctcagagggtgaatattgaagtcaccaagaattatgacagaagtgtgagtgcctgggtttgaatcctgatactatgtacttaccaggtatatgtccttgggcaagttatataaccttagtttcctcatcagttaaaatgaggataatgatagtatagttctctgaattatcaggagtaaacaatttaatacttatgaaactcttagtatgtggtatatggcaaatgacatataaatgtttataatattatcagaatcataataaccattattatttgtatga

SEQ ID NO: 17011 - DNA, 435 bp, Homo sapiens
gtttaaaaaccaggatgggcatggtggctcacacctgtaatctcagcactttggcaggctgaggtgggcggatcacctgaggtcaggagttccagaccagtctgggcagcatggtaaaatcccatctctactaaaaatacaaaaattagctgggcgtggtggcggacctctgtaatctgagctactcgggagactgaggcaggagaatcttttgaactcgggaggcggaggttgcagtgagctgagatcgcgccactgcactccagcctgggcaacagagtgagacttcatctcaaacaaacaaacaaacaaacatgacttcaagtaataatagcactttctgtgttccttcctagcactttgattaaatgtgtcgtttaatctgtacaacatccctgcaagtagcaatttttttttttttttgtagttggcaca

SEQ ID NO: 17012 - DNA, 401 bp, Homo sapiens
accgggtttggagtctataaagtgcaacctcctgcttcctcatagattcagtcttctcactgtaaccctacgcggtggaagggcctcttttataaaggcactgaatctcattcatgagggctccgccctggtggtctaatcacctctactttaaatactatcacctcaggggtgaggatttcaacattggaattttgggggtcgtaacattcagaccgttatcagggctgtgacagagctgatgacacggcttggtgagctacgtatggatttattaagaagacagtgaagctgaaggttcagggcccctcacttgctggagcccctccccaggccctaggagggaccctagcaatatggtcacatggtcataggttttgataaaatttgcaaatgttaca

SEQ ID NO: 17013 - DNA, 473 bp, Homo sapiens
ggatatctgggccaaaattgggttcaggagcattaatgtaaagcaaaacttaaatgtttggtatcatttcacttgggtggagctcttaagggccattgggacaaggtttcagttcctctaatgagaagtacagcagcaagtctgatttgtttataagagtcttgaattcaatgtaagagaaacaaaaatctctaggcaaacttaacagagaggcaaattatgtaagtaagtaaatccaatgttcagaatagtattcaactgatactttcccttcacacaacaaactcccaaatgatggatattgggagaaggcgaagaagctagtaggaattactcaccattaagagtaaggtaggctgggtgcagtggttcacgcctgtaatccccgcactttgggaggccgaggcgggtggatcacctgaggtccggagttcgagaccagcctggccaacatggtaaaaccctgtctctac

SEQ ID NO: 17014 - DNA, 515 bp, Homo sapiens
ggtcctgctagccccgcggctccgaactcggtggtcctggaagctccgcaggatgggggagaagatggcggaagaggagaggttccccaatacaactcatgagggtttcaatgtcaccctccacaccaccctggttgtcacgacgaaactggtgctcccgacccctggcaagcccatcctccccgtgcagacaggggagcaggcccagcaagaggagcagtccagcggcatgaccattttcttcagcctccttgtcctaggtgaatatggacactgtcatccccatcatctgccatcccgtgtctgtgtgctcggtctgtgtgtttaaccctgtcactcctcttgactgtcaagtcttcctcccatttggttttcatatcaaacactgagggaacatgatcagtttataacatcattaacaggaaactctcttctttataaaatcatggtgcttagcaagttctgaagagctgttgatgtaatatcttggcctttgaaagaaggattaaaaaaat

SEQ ID NO: 17015 - DNA, 390 bp, Homo sapiens
ggtcctgctagccccgcggctccgaactcggtggtcctggaagctccgcaggatgggggagaagatggcggaagaggagaggttccccaatacaactcatgagggtttcaatgtcaccctccacaccaccctggttgtcacgacgaaactggtgctcccgacccctggcaagcccatcctccccgtgcagacaggggagcaggcccagcaagaggagcagtccagcggcatgaccattttcttcagcctccttgtcctagctatctgcatcatattggtgcatttactgatccgatacagattacatttcttgccagagagtgttgctgttgtttctttaggtaagtgtgtattggtgattccataataaaagcagtaacaataactacc

SEQ ID NO: 17016 - DNA, 975 bp, Homo sapiens
aataatgtgccctcactcctgatacagtggagagcaaagtaaaaacagctaaactattcaaaagaaacaataagaaaacattataaggcatgaaaacccaatcaaacagttgtatttcaacatgagagaaacagtttgcagcagattttcagtttaaatacatgtttaatttcatgtttaaatgcaagccaaatctcagatttaggacaggggatcttcattatccagatgaatattcctgcataaggaagtagggaaaaaggcctgtagaaacctctgtcatggtaggttatatgcagaatccaatgccagcagctggctatatgtgtctgggctggcatggttgactctttcccaaggatggtcatctagtgggttcctcttcctgacatcgcaggtacaattggccatgatgccctctgcatggtcaaactatatgtttcctaagagaccttgggcccacttctgtcaccttacatggatctgttaacattacactggataggttaagcaatgacctgtattatgatagccagttcatgatgtctatatagtaatctcttaggacatggtaaatgattatgatcatcattagttttgccccatgtgtcaggttcttcatttaaattggaagcttattcttatacttactacgtgctaggcacagtgcgaagagagataatatttattttcatctggaattaatgtcattctaactccaaaagaaatgactagagaagattagggaagcccagacaacttgtcacgtagcagtctcaatcaaaattcattaaaaagaaaagacgattataaatgaggaagaaagcaatatataaatatttcctgttttatcattatgtattattttatttgctactgtctctgaaccatggtattttgataggagttttataagttcctagaatgatattgtactcaattgtgcatatattaaaactttttaaaagaaacctc

SEQ ID NO: 17017 - DNA, 352 bp, Homo sapiens
ataaaactttatattattagattaagttttatgtaatatataagtagaagtatgagaaaatgatttcctagaatgaggatggcaaatttaagttcccattctgtctttagctgttcagcatgtccataacagatatactaatgaattacaacttttgttttgaaatttgcacatggccttaaaagctttcttagcctagggcttcaggcagtattttggagtgtgtaggtaacaggaaactatttgcatttcttagagcaggggtgtccaatcttttggcttcccccacattgaaagaagaattgtcttgggccacacataaactatgctaacacgatagccgatgagagaa

SEQ ID NO: 17018 - DNA, 351 bp, Homo sapiens
aagggagggacccactgcttcagaaaggtccgctgtgcacaggccatgggggcagcatgggccgcttccgaccttcagcttcataatgttgatttctcctgggaaataaagataataatcaggaagctgcccggcactggagtgctgagtcggcaggagccgctgccgggacttgggagagtgtggtgctcactggagtctccgggccagaagcagcgacgccgccgtctccaggcttcggcttttctgattgatgttttccttttagaacagcgtccttgagcttcctgcacaaaacttgcttttctcttcctccaactctaaataaaaacgctcttctgcttctgagga

SEQ ID NO: 17019 - DNA, 603 bp, Homo sapiens
agtatttcactcaatagatgcagaaaaagtatttcacaaaatcaatcatccattcaccataaaaactcacagcaaactaggaatagaggggaatatcctcaactggataaagaatatttgcaaaaaacctataaccaacatcataattaatggtgagaaactatatgctttccccctcggatcagaaacaagaatgtctcctctcactacttctagtcaacattgcaggaggttctagctaatacaatatgacaagaaaagaaaaggcatccagattgggaaggacgaaataaaactgtctttgttcacagatgacataattatttatataaagaaatcccaaagaaccaacaaaaagtgatcataagaaggttgcagagacagcatctcacagtgttgcccagactggagagcagtgcactgcaacctctaactcctgggctcaagtgatccttctgcctcagcctccggagtagctgggactacaggtgcatgccaccatgcttggcaataatctatatatctgataattatataattatatagccacctcatctctatttttgttactatttgcataaagtatcttttccattaaattac

SEQ ID NO: 17020 - DNA, 699 bp, Homo sapiens
agtatttcactcaatagatgcagaaaaagtatttcacaaaatcaatcatccattcaccataaaaactcacagcaaactaggaatagaggggaatatcctcaactggataaagaatatttgcaaaaaacctataaccaacatcataattaatggtgagaaactatatgctttccccctcggatcagaaacaagaatgtctcctctcactacttctagtcaacattgcaggaggttctagctaatacaatatgacaagaaaagaaaaggcatccagattgggaaggacgaaataaaactgtctttgttcacagatgacataattatttatataaagaaatcccaaagaaccaacaaaaagtgatcataagaaggttgcagagatggtcataaagaaattccctgacctatctggcttgacagtaggtcataagacccccattccaggatcctgttccatacctgagaggaagaaatgctacaacagagacaccaagaagaacctcaacagacaggtcttgctgggcttcctcctctcggtctactacattagatcacaccctttgccacagttgtacatgactgtccactcttcattgcatcgaagcatacaaatggacagtttttcctatatctctgggtcttcattttgaaggctcccatgtcatgtaaaaccatgattaaataaacttgttacacttt

SEQ ID NO: 17021 - DNA, 986 bp, Homo sapiens
agtccattacactgaacagtaggaaattaccacttttgtaaggctcaaaaatgatcaactattaacagtttcttatggttcagtctaattacaaatttttaaaaagtttatcagtgtatcatttcagattcatctgtatcttctgtaatattatttccagtactgaggtaaggtacacaaaaattcccctggaaaaactatattctagttttgtaagatgatttcccacagtccatttgcttatttcttcctttgataattcaaaaagatgctttaggtaatggtacagaattagaagctgctattttagctctattaactttttctctatggtttcaattttatccaaccagagagggctggcctagttggtatctttaaggcccttccagtagtaatttgagtctagtcacatgtcagaccctgagcaacacctaaccaaatgcccaagtattctcataaggagtatgctgaatttaagtggtgtttgttttacatatgtatccatcccagacattttcaactatgctgaatgcaatctataagatattccaaacaaggacaaagtaatttttcacaagtcttacagccccactattaagtatgctacttattagcttcttgaatttctttgtatttcagtgattgggatgttctttttttttgggaaagtttttttacccctttgtaccctcttaattggattaactgtaaaatgtacatattaattttctagttttagagaccattttcattaaaaatattttccaatagtttttctaggataaacaatttatacttaattgttgcttggttgcttacatttcaacctctaggcttcctttttcagctaacttggctgtcttcaggttgtaaagaaaaatgtaaacatatatttgaaatttcattaactgaaactgctgtaaggtgttagcaaatgttaaccataacagattatcccatatcattggactgttctattattg

SEQ ID NO: 17022 - DNA, 928 bp, Homo sapiens
agtccattacactgaacagtaggaaattaccacttttgtaaggctcaaaaatgatcaactattaacagtttcttatggttcagtctaattacaaatttttaaaaagtttatcagtgtatcatttcagattcatctgtatcttctgtaatattatttccagtactgaggtaaggtacacaaaaattcccctggaaaaactatattctagttttgtaagatgatttcccacagtccatttgcttatttcttcctttgataattcaaaaagatgctttaggtaatggtacagaattagaagctgctattttagctctattaactttttctctatggtttcaattttatccaaccagagagggctggcctagttggtatctttaaggcccttccagtagtaatttgagtctagtcacatgtcagaccctgagcaacacctaaccaaatgcccaagtattctcataaggagtatgctgaatttaagtggtgtttgttttacatatgtatccatcccagacattttcaactatgctgaatgcaatctataagatattccaaacaaggacaaagtaatttttcacaagtcttacagccccactattaagtatgtgggaaagtttttttacccctttgtaccctcttaattggattaactgtaaaatgtacatattaattttctagttttagagaccattttcattaaaaatattttccaatagtttttctaggataaacaatttatacttaattgttgcttggttgcttacatttcaacctctaggcttcctttttcagctaacttggctgtcttcaggttgtaaagaaaaatgtaaacatatatttgaaatttcattaactgaaactgctgtaaggtgttagcaaatgttaaccataacagattatcccatatcattggactgttctattattg

SEQ ID NO: 17023 - DNA, 291 bp, Homo sapiens
acaatagctctacagagcgttaggctcaaaagataccttacaaataattcagtccagtgtttttttccatcaggagccaatagaaatcaagaaagtgatggtcaggccagatggctttagagcctcccatcccattcaagcatcatcagatatttgttaatagcccattttgtagccaggtgtggtggctcacacctgtaatcccagctactcagcagggtgaggtgagaggatcacttgaggccaagagtttcagaccagcctgggcaacatagccagacctcgtctcta

SEQ ID NO: 17024 - DNA, 360 bp, Homo sapiens
gctcaggtcctcaaggtggcctgctctaacaccctcctcaataacattgtcttgtatgtggccacggcactgctgggtgtgtttcctgtagctgggatcctcttctcctactctcagattgtctcctccttaatgggaatgtcctccaccaagggcaagtacaaagccttttccacctgtggatctcacctctgtgtggtctccttgttctatggaacaggacttggggtctatctgagttctgctgtgacccattcttcccagagcagctccaccgcctcagtgatgtacgccatggtcacccccatgctgaaccccttcatctacagcctgaggaacaaggatgtgaagggggccctg

SEQ ID NO: 17025 - DNA, 610 bp, Homo sapiens
gctccccctgaagccggagaccgtgtatagggatctgggggaccggagggcaacgccagagaacaagtggaggaggtggctatcaatcctcagagtttgtcatccactatgaagaaagctggccaggttttgttctgataacatcacatagatattttatactttttaaaagatgatcagagtgacatctgtgtggttaaaaagccaaataacacagaaggcttttaataaaaaataacagccctgcctgggtcctgtccttccttggtcccactttccagaggaaacacctttgaaccctcccagctttgttgaaagttctttgggtggctaccttcatatctttaaataatatatggtagtaccatttgtactagttttctagggctgctgtgacaaaataccgtaaactgggtggcttaaaacaatagaaatttattatctcatagttctgagggctggaagtctgtaatcaaggtgccagcatggccacacttgttctgaaggctcagggggatccaccccccacctcttccagctcctggaagtgccatcggtccttagcttgccctctgtgtccctgtgtgtccctcctcacatggcattttcc

SEQ ID NO: 17026 - DNA, 367 bp, Homo sapiens
ccccaagagacagcactgaagagcagaaaagacagtgactaacttctatgttagcagttgacaacagctcagtagagaaaacctgtccacaagcaatgagaatatcacggccgggtgcagtggctcacacctgtaatcctagcattctgggaggccaaggcgggctgattgcttgagtccaggagtatgagacaaacctaggcagcatggcaaaaactcatctctacaaaaattagccgcacctgtagtcccagatacttgaggagctgaggtggaagaatcgctagagcctggcagtttgaggctgtagtgagctgagactgtgccactgcactccagcctggacaacagagcaagactctgtctc

SEQ ID NO: 17027 - DNA, 948 bp, Homo sapiens
acgttgacacttcagcctgggtgacagcgaaactgtctcaaatagataaataataaataataaatatagtgctttcattgagttctgtgagttattctagcaaatttttaaacctgaggaggctataggaaacctgaaatttatagctggtctgtcagaaatggaagttgtccctgagaattggggctggcatcggaagtggaggcagtcttgggaagaactttgcctgtggggttctgcgctaaggtgggtagtgtcagaactgaattgaaatgtaggacacctatttggtgtcagagaattgctgtcggggaataacaacctgacaagttttgacatacatacacagcattgaaaccatcacttcaattaaagtgaacttatcaccctcataagtttcctccttttgctttttagtcctctctgctccccatttgcgccttgcttctgtcaggttccttttatcgcgaattagaagtcttttgtatgggtataccacaatggatttatccatttaccttttgaaggacagttggttattttcagttttgtgatatgctgaataaagctgttaggaacacgtacttgtatttgtgtgaaatgttttcagtaaattcttaagaatggaatttttggcttaaatgttaaatgcatctttaaattttatgaagaactgccatacagttatctgaagtggttgtaccattttatatatctacctccagtgtatgtttctcttgttaagtctgttcagatcttttcctcatttttatgttgagttggatgattcacatactacctgatttcaaaactttttaataaagctacagtaatcaaagctatgtggtattggtaaaagggcacagaaaataggaacacaacagagtccagaaataggcctacatggtatagcagtttttttcaacaaagatgccaaaacaatcctgt

SEQ ID NO: 17028 - DNA, 483 bp, Homo sapiens
  misc_feature (26)..(26): n is a, c, g, or t
tcactccttctagatctgctttcttntctcttcctgtctcttaggatagcttatcctgtggtgcagatggcctcccaaagggctgggattacaggtgtgagccaccgtgtctggccccacataaagtttaggttggatttttctgtttcttcaaaaaatattgtgatcttgatatagattgcactgaatctgtagactgcattgggtagtattggcatctttacaatattgtcttcccatccatgaatatgaagtatctttccatttactggcatctgtaagttctttcagcagtgttttgtagtcttcattgtacaagtcttttgctcctgtggttaagattattctgctaggctgctcacggtggctgatgtctgtaatcctagcactttgggaggtggaggttgctgtgagcccgattgcgccattatagtccagcctgggcaacaagagcgaaactcaaaacaagaacgtctcaattaa

SEQ ID NO: 17029 - DNA, 161 bp, Homo sapiens
ggtccctggggattacagcacgattatttttattgcaagagtttcccaatgcgggaactcacagccccaaagagtttgcatctgagcttcctgtagcatcctggggcacggacaggcggaaccgggccatcagccgtccctgcgcacagaggcgcacagat

SEQ ID NO: 17030 - DNA, 658 bp, Homo sapiens
gtttatggagagttgtgaactcataacatacttgggtgccaagatgaccagaaaatacaaggaacctcagttcagagccattgactttgatcataagttaaagacctttctctctctcagaaatatagacccaattaatgggtagtttacttaggtgatagcagcctgaatctcaagagttatctgaaagtgatagagggaaactgagagaagtagattgaaaatctgggcctcttggaagtacttttgcctcctgagcaaggtaccatggctgccagacttcaggtgaactcaaaggtctgccagccaggaaggagcactcttatggaaacaagttttaatacaattttaaaatgtattgctctttgcctgaactttgatgctttaacaaaataaacattctatttataattccatatagaaaagttaagtgacttatttaataaatgtattattttcctttttaacattttcagtagaaaagtcagtctctgttaaaattactcattaaatgttagaaagctttaagacatttaacattgttataaatgaaaccaaaatatgggttatacattttacatacaaaactgtttgtgaactttgtgaacataagatactatcattttcccaataaaataaatggattttgcaacaactt

SEQ ID NO: 17031 - DNA, 171 bp, Homo sapiens
ccatgctcccaggctcagtactagactcctggtcaccccaacatctttatttttgcctccctgctctgggggttgtagcttcttccttcaccaactctgttacttcagtatcccttttgcactttcagccctcaaaccccaagtaaatacgctttcacttccctttcttga

SEQ ID NO: 17032 - DNA, 400 bp, Homo sapiens
aaatgcttccgtccattccagagaaccatattttactcaaatatcaaagtccgtaggttacagaaaagggagcaaatgacaaaagcattttatgagcagtagacttctctagcccttgaattatggtagataactagccttgagttcctgccaccagaaattccctcctctaaaccctgtggtggttgaggagccctttcctgagctgtggtattctctgggaagacacaggttggaactagagtcagtttccatcagtagatagtattttgcagaacaatttacttggagaagaaagaggacagaatttctgtcacgtcgatcagtggtttattctctcactgccattgtctagccatatgtccctaaaaataagccacattgaatggatgtaatgatc

SEQ ID NO: 17033 - DNA, 626 bp, Homo sapiens
ccagcaaagcagcatcaaaaggaagtgatcctgggttatagttcacagctctaggggttggagcaggaggggtagggaagtaactgcctttagttagtgtccacctgttttcctgagtgatttgcaaagacaggacttttatgccaaaacctctgttttagaaaaaagtagaggacaatattttttaactttgaggtatagaagcaagacaaaatacaaaagtttcaaagaaaaagatttgataaattcaactaaaaatttctaaaaattaaatttctatatgacagtgggcagcataaacaaagttaaaataatgacagactaggaagatagatttacaacatttacaccaaataaggaatatccagaatacataacaatttccataagtaaaaagaaaaagaaaatgggaaaaggttctaagttaagtatttcacggaagagaaaaaatatgaatggctagtaaacagctcaccagtgatgtgggaagtgtgagttaaaatagtgaaatcccatattttgttcattaaactggcagatattttaaagattgaaaatatctggtattggtgaatgtatagggaaatggacatgtaatggtacaggctgaacatctgaaattggaa

SEQ ID NO: 17034 - DNA, 373 bp, Homo sapiens
tcatctccctcagggcccatcatccccaggatactctactctttctgctgccctgtaggggagatggcagtggtcagaaggccaggggtaagaggtaccccaggtatattgtggaacactgctattcaaaatgtggttcacagaccagcagtgctggtatcacactttgggagcatgttagaaatgcaggttctcaagtccggccccagacctgctgaatcaaaaactctgggagggctgggcacactctcgtggctgtaatcccagcattttgggaggccgaggagggaggatcaatggagcccaggagttcaataccagcctgagaaacacattgggaccccgtatgcacaaaaaatttgaaagttaacga

SEQ ID NO: 17035 - DNA, 451 bp, Homo sapiens
acaatcatttcaactaactcctttaaatattgcaatgaaattcctcacaaatcttcagtgactctttcagaaatgattcttcaaggaagaatatttttctcttaggtctttgaaattaatatttttaaatgatctaagatattaatactaggctactttttaggctctcaataatacatagggttggcatagttaagatgagctaatttgtgtatgttcaaggatgctagccaagctatacatttagtaatattaaaatagtttagtaggaaaaagtattaatatttttaaatgatcttagataatgcattttacattctttttccctctccccaaagagatttggaaatgtttcatatttgtcaaatatatctcaatataaaaaagcatggctgctctaattagatacatttgttttaaggcaatttttctttattagtatagttaatac

SEQ ID NO: 17036 - DNA, 496 bp, Homo sapiens
gacatccaagtatttatgttacatatgcaagtccgaagctctgaggaaaagttggggctgtgcatataaaaatgtgggaatcatcacaaaagaaatgggtattgaataccagtgaacagatgtgattacctagggagaaaactgaagtaagccaagaaggggctcaaaagttgagtcctcaaaagcaacatttcagagtttaaaaaaatttcctcagccagatgcagtggctcacgcctgtattcccagcactttaggaggccgaggcaggcagatcacgaagtcaggagatgtagaccatcctggctaacacggtgaaaccctgtctctagtaaaaatacaaaaagactagccaggtgtggtggcgggcacctgtagtcccaggtacttgggaggctgaggcaggagaatggcgtgaacctgggaggtggagctttcagtgagcctagatcttgccactgcactccagcctgggcgacagagcaagactccgtct

SEQ ID NO: 17037 - DNA, 471 bp, Homo sapiens
ttcattcaaacttatttactaattatataaatttggccagattacttaatctcattttacctcagctttactatatgttaggtagacaaaataatagtttctacgtcacaaggttattttgagaattaaatgagttaatatgcataaaacactcagatcactgccaggcacataagatgtgggtcgagcgcagcagctcatacctgttatcccagtgctttgggaggctgaagtgggaggattgctagaggctgggaatacacaactagcctgggcaacataaagagaccttgtctctacaaaaatttttaaaaaaattagctgagcatggtggcgcgtgcctgtagtcccagctactcaggaagctgcagagggagcaccatttgagcccaggagtttgatgctgcagtgagctatgattgtgtcactacactccagtctgggtgacagagctagatcttgtctctatta

SEQ ID NO: 17038 - DNA, 563 bp, Homo sapiens
ttttagacaattgcattaaaatgttatttatattgactatggggacttttggggcccccttaaattttgcacttgaaatgggatccccacttgtgtcaccccatagtccagccctggttttaggatggggatggaggcaaaggcatcaggcaagtaatgaagcaaaggtttattttttggtgtccagattatccatagctcagtcatgaaaatctatgtctttctatttttctcctttctgcaatgtccctgcctcggctcatcagccaattagctcctagaaagctggggtcatctcgtattcccagcaagtacccagcacagtgccggttcagagcaggtgctccacacacattcctggaatgagacagcacagaaatggctctcgggagcctcggatgctgctgggagtaagtgatccaggaccttaccgctaagaggagaaactttttttcaaagcatttataaatactccctccacccctcactccacaaatggggtgatcaacacttactgcttgctcttgttctgctaatgattaaaacaagtttatttaatttca

SEQ ID NO: 17039 - DNA, 298 bp, Homo sapiens
aaaaagtactgtgtgatatgaaaaatgacattttgttttaggcttggataattgttgctgccccctctccttcatgaatagacactgtaagtcatggagaccttggatcagtttattttgtagcatgtgctgtgcatttgtgcattgcaggatatccaccattcctgtagctcacccattaagtgctagtggcatcctcccattttttttttttaaattacagtctaaacacattttcagaatgcccccattgagcatttctaggttagaggaaagaaggcacagagcaatatgtcga

SEQ ID NO: 17040 - DNA, 396 bp, Homo sapiens
aagaaactgcccctgcaggaggaaggagagatagatatcacaccacagccaaaaagtcattctccactttatttggtgtttggtcaggagctgactgtacttctgggtctagttagaggcagcatgatttagaggaatgtggagatattggacccagtccagagaatagaataaaaatgcaataacacaatcagaaggttggagggagataatctaccagaaaaagtccaaatattcatagaaaaaacactttttgtattttcctggggatgtttccaaatagaagaaaactgtaacatgggaaaattaataaaataaccttggcattccttttcataattagtaagaccatagtaatgaagtagcctgcaaaacactaattggctcatggttttt

SEQ ID NO: 17041 - DNA, 425 bp, Homo sapiens
acctgcttgaatgatacttagacctgggacaactgaaaggagttgcacttatacaattcggtgcagtggagtcccctgggaggagccccagtcacacgggaagagacagtcacagctgtaataaatgatggctagcatgtatcaagcactggccgagtcctcagcatacattacattacagaattcagtgtgcacctcaacactctgggggtgtattttataggagaactgtggcacaaagagggtaagtgtcttactaacagtgtggctcatctgccaagcaggggtaatctgaccccatgaggttgccacaagtattcaattagttttattttacagttagaacagtggctggctgaagaagtaaaatatacaagtatttgttatgcaaaaacaaataagtcataaatctccatcttataggt

SEQ ID NO: 17042 - DNA, 265 bp, Homo sapiens
ctgtgccgctggctccaccctcaggtctccccactcctctcattagccaccggccttctcagccttctcttattcttgtgactcttgcctgaccctgcctcagctctgtgtcctcccagactgctgactgtgaggctttgcccagcggattttccatcgccaaattagagcttttctttcctcgcctgactgctccctgtcactgtcttctgtatcttcctgttcctgattttggctggctatcaagagaagaagatctacaatc

SEQ ID NO: 17043 - DNA, 451 bp, Homo sapiens
ggaatttaaaggttgttaactgctgttttagttttaggacaaattacctgccttctaactgccatgcaaacaaataccgctcaggtgtgaccaaaatttaagcatcttaagtctccgctctcttcagttaggaattttcattaaaacagcttgcctttcactttcaaccctcaaacctaaggacttcaaatactagatttggtaactctggatatccaaagtcactttgggggaaaaaggagcgtaggaaagattgcaaatatttagcagggctatttttgaatctcttgatttaggctagaagtccaatgcgctatccattgcaccacagagcctgcttgcaagcagggctatttttaagtgaaaaagctaataacaaaatagtttgcagaatgataccttatcttgataaataaataaaaatcacccttatcgtcccattccatgtgtt

SEQ ID NO: 17044 - DNA, 385 bp, Homo sapiens
ccccattagggcattgcgtaaagttggaataaacctttcaacataaaatcccaaattgcatcatttatttctttgttcaagtctaatagtttagctattgatgatgatgatgatgatcacagcagcagatcctgctccagctcccatcacaggaaaggatgctcgatgacagttggtttcactttattgctcagaagagacatattctgatgagctcccacccttcattcattatgctgcaatcatattgctaggagacaaagatgaatgctgtgtacttatctgattaaactgcctgttgttttaaatctattttcacagagaatttttcctctgatagacatccagtgacataacacattaaaaattatatctgtatcagtgg

SEQ ID NO: 17045 - DNA, 474 bp, Homo sapiens
tgatgctaatcccacagtcagaaggttttctttaggctatcaatctagcaactcccttcaccatccttccagtgtagggctataaactacacagtgccatgcacaatatccttagaagactaatacacaacaagatgtctaacaacatacaacacattttggtaaatccaaccccaagttggattcatagtacccaaggatccatttaccttactgtgggaaaattccccacacgtactgcagtgactgtccctggacccttgaacaatacactcaccttaggcattaaggtaaacacaggaccacaaaatgtcagtgaccccttagtgagaattcaactcttgacctgctgcttcagtccacctacaacgcaaatcctacataacaagatctacatcttttctaccatgcctggcccactgcagttgccacaggccctcagcagcccaagagctctcaggtggggtggggata

SEQ ID NO: 17046 - DNA, 592 bp, Homo sapiens
cttttcctactttgggggatatatctgaggggagtgtcctgtggtatggggacacaattacccatctgtgaagagaggacagagtaaggatttttttttccctcaaaggaatcccagtgattcaggaggcatttgagagaaatacagactgaagatgattggttactcaactagaaagaggggaacaagtcatccctagttccttttttctcccagggaataaccgggttatgtgagggagagagagaagagctgtcctcacatccctgagtccctgtaaccttgggatggtgcagaccatgggtgccaatgtggcttttcacccttgttaacagggggcctaggaggtgggaattatccgcatttacccacatgctgcctttcctctgctgtcagtaacctttgagttccctagaccttgtctgtgccatggatgctagcatgacctctatccatgaaatgggaggggtcctaactggcaggaattagtcatgctaaggtaaatctgtggtgctgagtcctcctcaaacaagggagagtaaagggtgtcttgtgagttggggtcctggcttaataagatgttttccaaaag

SEQ ID NO: 17047 - DNA, 414 bp, Homo sapiens
aaaaacgtcttcaataaaaccatgttgattgattggttgatgattgattatttgacctgccatcctagttggttgtcagaaatcctctccttatttttcttggtggacacaagtttagtgatacttgtagaggccaactttgcctttcaactttgaacttccattgatttttccactgtgtgtgccaaagccttaaattggttccagttgcttaaaagagatgtatatttttcttctacacattttatggaaaaaaaaaaacctggagcgtattttccctagactccaccaaaaccagatagtttttccagaaatgtatgaatgaacaacaaagtggttactttggaagccgacataccgttatattggatttcagaaaagtcaagtaatcccatatttcatgtgattccaggt

SEQ ID NO: 17048 - DNA, 295 bp, Homo sapiens
cagaggatgaaaaagtaccaggatagtccatctataagctggagaatgatagaagcatggcttttagagaagttggtagcatggctcctagggcaggcagtggcatgacttggtccaattctgaaagcctcaaaactagagaagctgacaatgtaggccagaggcctgagagcccctgagaggccactggtgcaagtcccagagtccgaaggccaaagaccctggagtctgatgtgcaaaggcaggaagaggaaagggtacactgctacaaaagagagaaagagagtgtgagcaa

SEQ ID NO: 17049 - DNA, 399 bp, Homo sapiens
cagttacgtattctgttaccttgctcaattctttcactgtttgagctagcttcatcactgattttatagggatgcactgtccaatagaaatgtaatttgagctatgtacataattaaaatttttgtagtacattttaaaaagaaaggctgggcgtggtggctcatgcttgtaatcccaacactttgggaggccaaggcgggcagatcacaaggtcaggagatcgagaccatcctggccaatgtggtgaaaccctatctctactaaaaatacagaaattagctgggcgtggcggtgggtacctgtaatcccaactactcaggaggctgaggcaggagaatcgcttgaacccaggaggcagaggttgcagtgagccgagttcacgccactgcactccagcc

SEQ ID NO: 17050 - DNA, 431 bp, Homo sapiens
ggccaggagttcgagaccagcctggccaacagagtgaagccctgtctctactgaaaatacaaaaattagccaggtgtggtggtgcatgcctgtaataccagctactagggtggctgaggcagatgaattgcttgaatcctggaggtagtggttgcagtgagctgagatcgtgccactacactccaacagtgtgagactctgtgtcaaaaaaaaaaaaaaatcaatttatgaaagttatttttaaatttgaagatattgaagatactaaatttgtgtttaaaaagcatttattttgatcaactccgctgtatagaatattttgtcttaagtcactgtaaagtttccatgccctcaaatgaaatacagtgccaggtttaacattcgttttcatggattgttttcaaaagttattgagttgtctgatttgctgt

SEQ ID NO: 17051 - DNA, 2822 bp, Homo sapiens
tttctgtgattattgagcataactgatgagagaatgacagtattggtgactagcttttttgtttttaaataacacactttaaaatgccacagtgttatttgaaagcttaaaggcattttctcatcttcagtatttgctttttatcagttgtagaaaagaaccttagtgttttcttctctacctatgtatgcttatgaaaccgctctacctacatatgaaacttctctacctatgtatgtttacgaaaagagatgtatttgccaagaaaatcttgattatataaaagacaaaaagattataaaagacagtttctgtttaagtaaaactgtctttgaaacttaagaaagcttaagttttaaaaaaatctcagttaaacatcattggtttatttgacttactgttaactcttgcttctctttgactccatggtgtttttagataaccatgtatgaactttatgttaatggtttgtgggatactaaaatagcttgaagatgacttgatgactgtgcattttatatagttttattctcctaaaatctcaggagggcagcaagtgctgtcaacgattatatagtgatgagatttttatgggaatgatttcttcttggtgcgttttacacatttgtactgatagcaaaactaaagtttaaagcagcaaagtttaagttctccttaaatcctacagaaaccaaccttttaaggacataatttcatctaaaacatgacgatatttagcacaccttttaatgtgggtatatatcaagtgtttaaggactggctagtatgtgatagagcaagacctgagactttataagtatttgctcgtgtctgttgacagacctctttctttcaaacttgttagaagagtggtaagacatatccaattggaaaataagatgcagtgttgtatagcacatacatttaaagtgcttgcgttaaaattagtttctcaataagataaaattattttaaaaatttggttcactttattacaatagtggcaatttagcttttcagtattacaggaatttaaaaattggtttcttgtaggggacatctcaactttgggaatatcttcacttaatttttaaaaaatattttcatgctttattgtccagctatacaatatatcgcaaaatcctgacaagttcattgtattaaggtattaactattacatggaaagcaattctgttcatcttttgatgtttgtgttgaaaatgcttatctttgtgttttgatcttccaacagctgagagcttgaactgatttaaacatttgtcaatatacttaagaatgctttaagtaaagaaggggaaaattttaagtaagttttttcccttctaggaagaaaaactatgatgatgttaagaaaatgtcattatagagcttgctcaataatatgttctttaaatccacctccatttgtacattataggtatcattctgtttttgcttaaaataatctgcaaccatttcagatagttttacagcaaattgatctaaaagccactaataaattctagggtttgagtctagaagccaagcaaactgtcaccaatgtcagttgtaaattagaatgcaacatgaggcttcagactcatgacaatgatatacatgaaaacaaaaatataattgtgtctaccttcctactttcccttttgacatatgtagttggaattttacatagtcttaaaatccatatttagaatcttacctgtttctataataattagtaaaatgccaaagtagtgatagaatattgtggcattgaagtagccgaaaaattgttagttttagcatcaaaaaagtaaatagatgttgaaatgaatttttgtatgtgccaggttgaagagagtgtgccagtgacaggaagtagtctaaaaaattaacagttatggttttaataggatctgaaagacaatctttaaagaaatgggagaaattgggggtatcagtgaacctataccaacctctctttgtacataaatatggtgatgtagctagatataaaaatcagtgtcttactggcaccatttacagtttagaaaacaatctttttcttaaaaatgcccatctgatttctatttttaggagctacttggatttgtatgtattttttctacgtgaaaatatatgtactcttcacttttgttccagtactataattgctcatgcactctttctcccctttgagaacattcagtgaaatacaacttcatcaaagatttgctcaaaggagaagaatcgcatgagtgtgaaaagtagatgctcgtagccagaacagaaaaggttacacatgatcatggcacagaagataggaggtttgacttggtgggccataatgtttattatcctttttgaaataacagggaccagcagcagttttctcaggataaatgctctaccccacttctctatgaacaggtgtggggaggcttactttccattttcatatttatacacctctctacaaaagcaatttttaatgaaggttagtggaattgttaaaaatctgagaggaatgatgactggaggtgtttggggtttttttctgtattcattttttaatgagaaaagttttaaatgtagtacaggttagacccaactactaccttactattataggacgattctatgtttctgttaaagtattcaagtagctttctctgggggaaaaagtaccacttggacacttaaaggaattgggatttttgtctactttggataaggcagttgacttcttaagtaaaagcaatagtgtaaaatgtcattttgtttggaatgttaagtgagcaaataaaaaacatgttgaaattgt

SEQ ID NO: 17052 - DNA, 2920 bp, Homo sapiens
  misc_feature (2823)..(2823): n is a, c, g, or t
tttctgtgattattgagcataactgatgagagaatgacagtattggtgactagcttttttgtttttaaataacacactttaaaatgccacagtgttatttgaaagcttaaaggcattttctcatcttcagtatttgctttttatcagttgtagaaaagaaccttagtgttttcttctctacctatgtatgcttatgaaaccgctctacctacatatgaaacttctctacctatgtatgtttacgaaaagagatgtatttgccaagaaaatcttgattatataaaagacaaaaagattataaaagacagtttctgtttaagtaaaactgtctttgaaacttaagaaagcttaagttttaaaaaaatctcagttaaacatcattggtttatttgacttactgttaactcttgcttctctttgactccatggtgtttttagataaccatgtatgaactttatgttaatggtttgtgggatactaaaatagcttgaagatgacttgatgactgtgcattttatatagttttattctcctaaaatctcaggagggcagcaagtgctgtcaacgattatatagtgatgagatttttatgggaatgatttcttcttggtgcgttttacacatttgtactgatagcaaaactaaagtttaaagcagcaaagtttaagttctccttaaatcctacagaaaccaaccttttaaggacataatttcatctaaaacatgacgatatttagcacaccttttaatgtgggtatatatcaagtgtttaaggactggctagtatgtgatagagcaagacctgagactttataagtatttgctcgtgtctgttgacagacctctttctttcaaacttgttagaagagtggtaagacatatccaattggaaaataagatgcagtgttgtatagcacatacatttaaagtgcttgcgttaaaattagtttctcaataagataaaattattttaaaaatttggttcactttattacaatagtggcaatttagcttttcagtattacaggaatttaaaaattggtttcttgtaggggacatctcaactttgggaatatcttcacttaatttttaaaaaatattttcatgctttattgtccagctatacaatatatcgcaaaatcctgacaagttcattgtattaaggtattaactattacatggaaagcaattctgttcatcttttgatgtttgtgttgaaaatgcttatctttgtgttttgatcttccaacagctgagagcttgaactgatttaaacatttgtcaatatacttaagaatgctttaagtaaagaaggggaaaattttaagtaagttttttcccttctaggaagaaaaactatgatgatgttaagaaaatgtcattatagagcttgctcaataatatgttctttaaatccacctccatttgtacattataggtatcattctgtttttgcttaaaataatctgcaaccatttcagatagttttacagcaaattgatctaaaagccactaataaattctagggtttgagtctagaagccaagcaaactgtcaccaatgtcagttgtaaattagaatgcaacatgaggcttcagactcatgacaatgatatacatgaaaacaaaaatataattgtgtctaccttcctactttcccttttgacatatgtagttggaattttacatagtcttaaaatccatatttagaatcttacctgtttctataataattagtaaaatgccaaagtagtgatagaatattgtggcattgaagtagccgaaaaattgttagttttagcatcaaaaaagtaaatagatgttgaaatgaatttttgtatgtgccaggttgaagagagtgtgccagtgacaggaagtagtctaaaaaattaacagttatggttttaataggatctgaaagacaatctttaaagaaatgggagaaattgggggtatcagtgaacctataccaacctctctttgtacataaatatggtgatgtagctagatataaaaatcagtgtcttactggcaccatttacagtttagaaaacaatctttttcttaaaaatgcccatctgatttctatttttaggagctacttggatttgtatgtattttttctacgtgaaaatatatgtactcttcacttttgttccagtactataattgctcatgcactctttctcccctttgagaacattcagtgaaatacaacttcatcaaagatttgctcaaaggagaagaatcgcatgagtgtgaaaagtagatgctcgtagccagaacagaaaaggttacacatgatcatggcacagaagataggaggtttgacttggtgggccataatgtttattatcctttttgaaataacagggaccagcagcagttttctcaggataaatgctctaccccacttctctatgaacaggtgtggggaggcttactttccattttcatatttatacacctctctacaaaagcaatttttaatgaaggttagtggaattgttaaaaatctgagaggaatgatgactggaggtgtttggggtttttttctgtattcattttttaatgagaaaagttttaaatgtagtacaggttagacccaactactaccttactattataggacgattctatgtttctgttaaagtattcaagtagctttctctgggggaaaaagtaccacttggacacttaaaggaattgggatttttgtctactttggataaggcagttgacttcttaagtaaaagcaatagtgtaaaatgtcattttgtttggaatgttaagtgagcaaataaaaaacatgttgaaattgtncaccaaaccaacaacaaaaaaaccggggctttttttcggggcggaaaggttaaagccactggcaatttcccgcccttttttcaggggaaacgggcca

SEQ ID NO: 17053 - DNA, 1013 bp, Homo sapiens
acctaaataatctgaaagaacctgactctggcagaattaggaattcctaattttacagtgttttggttttgcgctgtttcctggatgccttttcacctttcttccttgaaaagtggatagaggctggaccatgcccctaactccccattcctatcagagagactgccatcttctcttgccccttttgtaaaccttatgtcaacttctaatattttaagttttccagcttaaacgttagtgctttcttaaactgaccttaagtatacatgttaactagtggggtatgtacatttattgtaatcgttgtttagttgggttttttgtttttgcttcttgtttgtttgggttgggtggggagaaagactttcctagcatctgaaattgttttacttaaatatctacctacatcttttcttgtaaaacctatctttattctcttatactgggctctgctctttattgtacagctcatagtcacttcctgcttcagcctccaaactgagccttctaaatttgaggacatacctgcccaggggatgccaacccattttggtcagtttctacagcagcataaattagggttctcggagccattcagaaattgagccctcatctggcaaatacaatcctcccagggaaactcagaaacaaaaataatatgcacagaagaaaaatatgtaaaatattttttaaacatacatttggacaaggattggaagatatatgtaaaattaaaatatcaagatggtggagttatggatgtacttctttttgaaaatgtggatattatatttttaaggttaaaaaaatgaaacatgttaagaaatgttaataacttttaacaagaatatcctgaaaggataaattttgattatgaagtagagatgcctcaactttgctcactacttccaacttgctagaattccctaccagatctctaatggcaagaaataaatgatatgacagtagagtttttcatattaataacaaatttaaatttccaactatgatat

SEQ ID NO: 17054 - DNA, 87 bp, Homo sapiens
ggatgctgtcactttttgaaatccagtaaaaaggtttctgtcttttttacctcattggtgagtgattggggagtgggacccatgggc

SEQ ID NO: 17055 - DNA, 343 bp, Homo sapiens
atgtaactgaataaatatttattgaatgaggatatatagttattaagttagaaatgaacagaattatggatctaacatctcaagaataatcaaaatattcagctacattacacagtgaaatatctgaactttccctaaaccaaacattttccaggacatgtgtaactttatgtctccagtttaaagttcagctataagctgggcatggtggcacatgcctgtaatcccagctacttgggaggctgaggcacaagaattgcttgaacctgggaggtggaggttgcaggagctgagatcgagccactgccccccagcctgggcaacaaaacaagaccctgtctct

SEQ ID NO: 17056 - DNA, 196 bp, Homo sapiens
acacctgtcacgtaactcagaacaaaaaggcggaggacagagattcaaacagctcatttaaccaacatgacacacgtcatgtcggcatatatcatgagacttacatatatacacaaatatataaaatcagtatatccacttcaccaaccgctagcagagtgtctgttattttcaggtacacgtggaacatttacca

SEQ ID NO: 17057 - DNA, 377 bp, Homo sapiens
ttttctctttgtgtccattttggtaggctatgtttttctagggatttctcagtttcaccacaattttaaatgacataattattgattatattccttattaatctattcgatatctatataacttgatggatgtttcatttttcttcctaatagtgaaaatttgtgtctttgcttctatttatgatgtcatgctaaagggcctatcaattttattgttcttttcaaataatacactttgggttttgtttattttttctagtgaacatctgttttatatttttctgctcctatattcattctacattttaatccccataagacattaaattattgacatatatggtgaatatttacttacatttaccctcatatcatct

SEQ ID NO: 17058 - DNA, 452 bp, Homo sapiens
ttttttctcatctactgcttccaagcagattataccaccctcctggctccaactgccaaccctgccaacacaggttaggataaatagtagcacctttccccaagtgtgttcaccaaatgtgttctcacccaggtactttcaaacacctcatgaggctggccagagatgacaccactgccccggatgcaagggggcagccttgctttggaccccgttctgaatctcaggcttcatctattaggcacactgagcagaaacactcctccctgccacttccgagttgcagcaaaaagggtctaactatgatttaaaacaaataattttaaacttcaaattttcattactgtcatacttatgaggaccaaataatgtaatgactaagacatcaaattacatgtaatatgaataaaaccagtaagaaaatgatagttacttataattggatcaacata

SEQ ID NO: 17059 - DNA, 402 bp, Homo sapiens
aatactctgagaagctatttatatagagagattttatcattcaatcatgcttttggtgaaataattattaaagattattaaggattaataaggattaatatgtaaaaacataaggctttaatttgttgattttttaattctgtaatttaattatgatgttcaaagaaaggaatagaaccatctagtctcaaaagtgggaggagcctatcatgacttccctatctccttttcttctcaccctctctaactcagtgacttatccagttttacttcatgtctgttgtcagtatcttgagcaaataaaaaatagagggaataaaaatcaagaatgtgtgccttaggagaggacaaggtaccatacaatctcatattgaaaattaaataaaaatatatcaagttata

SEQ ID NO: 17060 - DNA, 691 bp, Homo sapiens
ccacgcccggctaatttttgtatttttagtagagacagggtttcactatgttgatcaaaatggtctccatctcctgacctctaggaggcaggcccgatccgcccgcctcaacctcccaaagtgctgggattacaggcatgagccactgcgcccggcccagttgtacttttttgacatatgtatgtcttctcttattttccccattgctctattgccattctttgtttttctgctgctcacttgctggatataaacatcctgagagcaagaactgctttggcacatttcagtttctagcacagtgcatagcacatagtagaccctcaatacatgtgtggaagtgagccctccaatattccagacggcgtctcactctgtcaccaggttgaagtgcagtggcgtggtcttggctcactgcaacctctgcctccggctacacaacccgcttctgaccttcagagcttgctggactgcttgccttccttctcacttccactgccaccaccagcagctagctttcttttgggggccatttttacacagaaaagcaaggatggcactaaagggaaagtgctgaatcacacactggctcttaacacatccacctgtgagtgacacctatcacttctgccagcatctcatggccaagacttgtctcacggccacaccttactttgaagggaacagggaa

SEQ ID NO: 17061 - DNA, 350 bp, Homo sapiens
acatggagttctcaggtgagggctttgacctcagagagctgttggtctcattctcgcctgtgaaattccaagggtttggaaacgtacatgaaagagctctgcttccctcccagccatcacctcccctgactctaccctccactgggatccgtgtccttgcctcagacccagcatgcagcatgaggcccactaagggacggggactttttctctccagcagcagctccagctgcagaagatgcaaaccgaagtgccagcaaagtctatctctgtcctgtgtgagctggccggctggcggcagaatgacacaatctcttcccacctctctcgtcacctggccatcagctggg

SEQ ID NO: 17062 - DNA, 279 bp, Homo sapiens
aaaaggttatatgctatatgattccatttatataacattcctgaaatgacagaattatagagatggagaatagactcgtgattccccaagggttggactggggaggggagaagcgcagggacaagagggagatgagtatggctatgaaagcgtggcatgagaggttcttgaagcaatgggaccattctctatttcaactgtgctgctagttacacgaatgtacacatgtaaaattgcatagcattaaatacacacaaatgaacgcacataaaactggta

SEQ ID NO: 17063 - DNA, 189 bp, Homo sapiens
agaacctgaaagatttcaagacccataagtgaggatagctggaggaaaagtattccagccagaaaaacagcaagtgcaaagactttgattgaggaccaaagtcaaggaacagaactgaagctgctgtcactgaggcctaatgaactagacagaaagtaggaggacataaagtcagagaagaaacaggaa

SEQ ID NO: 17064 - DNA, 1963 bp, Homo sapiens
  misc_feature (185)..(185): n is a, c, g, or t
  misc_feature (1958)..(1958): n is a, c, g, or t
aataaaaaccttcaataaattaggtatagaaggaacatatctcaaaataataaaggccgtatgtgacaaactcacatctaaatcatcctgaatgggggaaagctgaaagctttttctctaagaactggaagaagacaaggatgcctgctttgaccactcctgctcagatagtgctggaagtagtnctagccagagcagtcaggcaagagaatgcaataaagggcatccaaactggaaaagaggaagttaaattgttcctcttttcagatgacatgatcttctatatagaaaaacctaaagacgtcaccaaaaaacacatttagaactgatgaataaattcattaaagtgacaggatacaaaatcaacatacaaaaatcagtagtgtttctatacaccagtaacaaactagctttaaaaaatcaagaaaaagccgggtgtgatgcttcatgcctgtaatcccagcactttaggaggatgaggtgggtgcattgcttgagcttaggagttttgagaccagcctgggcaacatggtgaaaccctatctctgcaaaaaaaaaaaaaaaaaaaaaaaaaaaattaaccaggtgtggtagcacatgcctgtagtccccagctagtagggaggctgaggtgaaaagatcgcttgagcataggaggctgcagtgagctgtgattacgctactgcactccagcctgggtgacagagaaagaccctgtctcagaaaaaaaaagaaaaattgagaaagcaatcccttttacgatagctaccccccaaaaaactaaaaaacccaggaataaatctaaccaaggaggtgaaagagctctgcaatgaaaacttataaaacagtgataaaagaaattgaaggggacaattaaaaatggaaagacatcacatgctcatgattggaagaattaatgcagttaaaatgatcatactaccaagagcaatctacagattcgatgcaatctctttcaaaatactaatgacattcctcatagaaacagaaaaaagcaatcctaaaattcatatggaaacacaaaagacttcaaatagccaaagtaatactaagccaaaagaaaaaagctggagtcattacactacttgacttcaaaatatactacaaagctatagtaaccagaacagctttgtattggtgtaaaaacaaatgcatagaccagtggaacagaacatagaacccagaaataaatccacatatttatagccaactgatttttgataagggtgcaaagaacatacattggggaaaggatccttctttaatttgctgagaaagctgggtatctctcaactcaagatgaattaaagacttaaacataatacccgaaactataaaactactagaagagagcataagggaaacacttcaggacattagtctgggcaaaaattgtatgtgtagcacatcaaaagcacaggcaacaaaaaaatagacaaagcagacgatatcaaactaaaaagcttctgcacagcaaaagaaacaatcagagcaaagagacaacctgttgaatgcagaaactatctgcaagctattcatcttacaagggacttgtatatccggaatatacaaggaactcaattcagcagcaaaataataatgataatgtgattttaaaatgggcaaaggatctgaacagacatttctcaaaagaagaagtagaggccgggtgtggtggttcatgcctgtaatcccagcacgttgggaggccgaggtgggtagattgcctgaggtcagggcttcgagaccagcctggccaacatggtgaaaccccatctctactaaaaatacaaaattagctgggtgtggtagcatacacctgtaatcccagctactcgggaggctgaggcaggagaatcacccgaacctgggaggcggaggttgcagtgagccgagaacacaccattgcactccagcctgggcaacaagagtgaaactcngtctc

SEQ ID NO: 17065 - DNA, 681 bp, Homo sapiens
  misc_feature (676)..(676): n is a, c, g, or t
tgaagtgtttccgttatgctctcttctagtagttttatagtttcgggtattacgtttaagtctttaattcatcttgagttgagagatacccagctttctcagcaaattaaagaaggatcctttccccaatgtatgtgtagcacatcaaaagcacaggcaacaaaaaaatagacaaagcagacgatatcaaactaaaaagcttctgcacagcaaaagaaacaatcagagcaaagagacaacctgttgaatgcagaaactatctgcaagctattcatcttacaagggacttgtatatccggaatatacaaggaactcaattcagcagcaaaataataatgataatgtgattttaaaatgggcaaaggatctgaacagacatttctcaaaagaagaagtagaggccgggtgtggtggttcatgcctgtaatcccagcacgttgggaggccgaggtgggtagattgcctgaggtcagggcttcgagaccagcctggccaacatggtgaaaccccatctctactaaaaatacaaaattagctgggtgtggtagcatacacctgtaatcccagctactcgggaggctgaggcaggagaatcacccgaacctgggaggcggaggttgcagtgagccgagaacacaccattgcactccagcctgggcaacaagagtgaaactcngtctc

SEQ ID NO: 17066 - DNA, 320 bp, Homo sapiens
ttcttttttttcatagtgcttagcatactttataagtatatacttacgtgtttaagttttgtctcctatactagactgtaggctccacaagagtacagggattgtgtctcttctgttcatcattacatatccagtgcttagcataggatatgccctgggtaattactgagtggttgaaagaattctgaagctgcccaggtgtggtagctcatgcctgtaatcccagcactttgggaggctgcggtgggaggcttgcttgagctcaggagtttaagaccagcctgggcaacatggtagtgagaccctgtctctctttaaaa

SEQ ID NO: 17067 - DNA, 310 bp, Homo sapiens
gggcttggcgacccttctgtgtccttgcagcgccctactttgccctgggcttcctggctttgggggctcaagttcgtgttcctgggaatccctgcttcttgaccacaaagaatccaggagcctcccagtgagtgtgtaccaaggtggggacagagaatggtggttggctccttccagggcaagggtctgtctggaaggtcaacacccaggagacattttcaatcagctgctgggtgccaagttggaagccaaagattacttgaaataggatttggtgtgtgttttgaataaaagtcgacccgcgagttta

SEQ ID NO: 17068 - DNA, 771 bp, Homo sapiens
tccagttacatgtatgttaagtatcaaaccatttcatgtcgtctcttaggtttcacatgactctacccactccttctcctcccagccctttatagtatagtttggataatttctgttaacctaacttcaacttcactgattatttactatgctaatctgctgataagtcctttgaaagagttcttggcctggggtgatagctcacacctataaacccagcactttgggaggctgaggtgagtggatcacttgaggtcaggagttcaagaccagcctggccaacatggtgaaaccctgtctctactaaaaatacaaaaaattagctgggtgtggtggtgggcacctataatcccagctacttggaaggctgaggcaggagaatcccttgaactcaagaggcagaggttgcagtgagctgagatcatgccattctagcctgggcagcaagagcgaaactccgtctcagaaaaaaaaaaaaaaaaaaaaaaaagaatttcttcctttttttataagagagaaagagttttttttatctcttatactcattttttgattttttaaaaaatttctagcacttacatatacatgcacacccctacacatatactctgtctgtacccaaattccctatctctttgtatacatgatctaccttttgcactacgtgctttaacgtacttttcatggttattttaaaatccctacctaatgattcttacattctgtttgtgcgactgttttcttgaaggcttccttataacaataagttcc

SEQ ID NO: 17069 - DNA, 661 bp, Homo sapiens
aggttaggtcgaaaattatcaatgatgtgtatctttttataatttgctttatggcaaagcaaaaaaactaaacttttaattcccctcattatgacatagttgtaaacaagtgagggatctgtacctctgagcaagcagagattcttaacttttttatgccttggaaccattgttcagtctgaagcccatggtctgcttttcagaataattttttttttattttatttatttatttatttatttatttatttttttgagacagtctcactctcttgaccaggctggagtgcagaggttgcagtgagctgagatcatgccattctagcctgggcagcaagagcgaaactccgtctcagaaaaaaaaaaaaaaaaaaaaaaaagaatttcttcctttttttataagagagaaagagttttttttatctcttatactcattttttgattttttaaaaaatttctagcacttacatatacatgcacacccctacacatatactctgtctgtacccaaattccctatctctttgtatacatgatctaccttttgcactacgtgctttaacgtacttttcatggttattttaaaatccctacctaatgattcttacattctgtttgtgcgactgttttcttgaaggcttccttataacaataagttcc

SEQ ID NO: 17070 - DNA, 395 bp, Homo sapiens
tctcctaaattcctaaattcttggctcaagacccagatcaaaaactgaggacttctgggccaggtgcagtacctcatgcctgtaatcccggtactttgcgaggccgaggcaggaggatcacttttgctcaggagttcgagaccaacctgggcaacatagtgagacccccatctctactaagtaaagaccctgtttttacttttttctactaaaaagtttaaaaatatatatatcagccaggcatggtgtgtgcacctgtagtcctagctacttgggaggctgaggcgggagaatggcttgagtcggggaaatcgagactgcagtgagctttgatcacaccactgcactccagcctgagtgacagagcaagaacctgtcttaaaaacaaaaaaact

SEQ ID NO: 17071 - DNA, 580 bp, Homo sapiens
agctcccggtgacactggagggtcccgcttctcatcactgctgtccccggggttcgatggagctctgcacaagattcctgccctggtggtgggaccacgatgttggggcagtgatgtgggaagatgagaacagggactagagatcagagaggcaggacatctttaaagagcccctcctgcctcactcaggtcttcaggggtctttggcagtatgtgtaatggtagagaccagtgacttgagggccatatgtcccagattcaaatcctggctcctccactaactcagcgtctatacctcacttttcccatctgcaacatgggcatactagcacataccttacagtattgtcatgagttggcccacatagagcacttaggatggcacctgggtcggaggaatcccttgctaactggtggctgtcctgtgctagtaaagaactgtggggatttcattactgaagccggggagaaagcatgaggaagaagcaagcctcccttgcccgtggtaggggtcgcggttccctgccctcatttcttagtagcccttggccgccaccctgagctcatgttttgttagcct

SEQ ID NO: 17072 - DNA, 360 bp, Homo sapiens
tctagtaccactgctttgtgagctatatcgtggctgacatagagctcaagtagggtagaagtgtcggctcggcagattcttgtttatcattgctgttcacttgtgcttgttcaattagtgttatcttctatccacagttcctttggtgggatcttttaaagccaattgtccattttgtgaggattagtttagttaaaaattagattatataatctctaaatccacttaatagggcatgtatgaactgcaattcaggaaaggcgagtgagccccaaagggtgccactgttgaccccttcgtgttagccatgaagctcctatgcctccctcaaaatacttgaggcctatgtgatgtatgagc

SEQ ID NO: 17073 - DNA, 961 bp, Homo sapiens
ggttgccccttaattttcactgagtctcttaaagattattcctgaaatatctctcaaatttgtcttttctgattacaaccttactgacgctgcagtaagttagaaactcaacatctgtagtctaaaccgttaaaatagctgcttgacttttccggtctctgtgtagctctattctctccattttcattaagtttctttgcaaaacacagacatgatactgccaaagtttcgaacaaatacctttagtggcactgagttatctactgttaaatctccagacacctcaagagagcattcaaggttcatgatcttgaaccaatttacttttgggcattctccaaaagaattcccttggtagtaaatagtatccattgctgaggctcttggcaacatttggtgggacaaaggatgggcaatgggcaacaggaagggcattctaaaccttctctccccaccccccctccacttttttagggatggtagatttagagttgggatagagaaagaaaagagagaaaactagccattgaaatttgatctctctctgtgccttgtaaaggaagcctggtccccaggcaaaaaggggtttatttcaagaaggagcagttaccatcttagtttcaaattaaactataaactaaatttctcctaaagtgagttcagcctgtgcccaggaataaacaaggatagtctggaggttagaggcaagatggggtgggttagatcagatctctttcactcccataattttgtcactgttatagtttttgcaaaggtgttttcacaaagcctgcgaggtggttgagaaacagaaagaaggccaatgggcatctgaactgcatagaatagtcagttttattgcttaaaatgtatttgcaagagtaagtctgactatagtaatataaatgactttgcttttttagtttttcaatacttaataataaaatatatcttaatttta

SEQ ID NO: 17074 - DNA, 255 bp, Homo sapiens
tactgggggagtccagcttccttctctgtctcttgagcttactcttttgcctttcaccaagggacaatcctttgcatgtggtgccttctgccctgttatgacacagtaaaaaaatccctcaccagatgtggcccttgatcttggacttcacagccttcagaattattagccaaataaatctcttttctttatagattacctagtctgtggtattctattacagcagcagaaaacagactaagacatttgtattct

SEQ ID NO: 17075 - DNA, 367 bp, Homo sapiens
tgatacctttggggatagaagtatgactccttcttcttcttcctcttcttttttgtttaacttgttatatgttgtatctagttgtgctgaaatagaggatttaatttgcagattaatatgtaaggatgtacattataatgaatttgcattattgtagaagacaatggaggcaatatagagtgtttgtggttcatagtgtggcttctgaggccataccgtcagggtttggctacctgctctaccaactaatagccatagtgtcttggctaagtcacagaacttctaaaatccttagttttcttatctaaaatatcagaataataagggtacctaacttatttttttaatatgcattaaatgagaaaaa

SEQ ID NO: 17076 - DNA, 699 bp, Homo sapiens
gaaaaggccgagacctggacgctgcccggtggcctcggcgggggccctgtccttggccgctgcctctctgaatcccaggtgagaagaataaaacgtcctgacgctgtccggcttccggttcttggagaggacgggccgtctctgccgagagaactgtgcggaatcaggaagcgctggtgctccttcgctttcacgggactaagcgaaatccggctttaaacgaagtaaagccggctgcctcctggagtatttttgtcatagtatttttattttgggtcagggtattctgctgcggaccctgagtcttaggaaggaggcttataacagcggaaagccatttttttttaagaattgctgagttttccggattgtactttcaaagactttccctgaaactttgcgtggcatgggggttgcagaaactggtgtctacacattacaaaagtgtactgtttacacctatttgtgatgcacccatcgtgtttttctccatggaccacctattaagcttcctgctggagcgctcttggcccccttcctgctttctgggccacatcctgttgtaaatcggtgctacttgtggggttttgtttgtgaattggggatatttaaggaacaatttattgaaacaactgaagagtttgtttcctcctttgggttttacttttaaaataaattcggttaggaaaaagtaaaaaa

SEQ ID NO: 17077 - DNA, 4037 bp, Homo sapiens
ggtgtgacgtaggaggaaggagacgccattagagggaggcagagagggatcgttcttcgcttttcctccggtgcctgacgtggtgggctggggcccttcattctcggactttccctcagcccttccaggcctcgcccgaggagggcgtggggacagcgcccgggtcggcggggccggggcggtgggggctgagccggccgtggctgtgaaggcgctgccgcggctgtcgggagggcggcgcgacactcgggctcgggcggccgggaagcgacgggatggctgcggccggcggcggcggcggcggggcggcggcggcgggccgagcctactcgttcaaggtggtgctgctgggggaaggctgcgtggggaagacgtcgctggtgctgcgctactgcgagaacaagtttaacgacaagcacatcaccactctgcaggcatcattcttaacaaagaagttaaatattggtgggaaaagagtaaaccttgccatatgggatacggcaggtcaagagagattccatgcattgggtccaatttactacagagattcaaatggagcgattttagtttatgacataacagatgaagattcttttcagaaggtaaaaaactgggtcaaagaattacggaaaatgttgggaaatgaaatctgtttatgtatagttggtaataaaatagacttggaaaaggagagacatgtttccattcaagaagcagagtcgtatgcagaatctgtgggagcaaaacattatcatacttcagccaaacagaacaaaggaattgaggaactctttcttgacctttgtaaaaggatgatagaaacagcacaagtggatgagagagcaaaaggcaatggctctagtcagccgggaactgcaaggcgaggtgtacagattattgatgatgaacctcaagcccagaccagtggtggagggtgctgttcttctggataactgttcacgcctaagaaattaaaagacagaacaaaactgtggatcattgccctcaacatgaagactgccatattccaagtcacattattttaccaatggaattatagaattaacagtattttaaattacgtttataacactgcagagaccttaagtgctaaacttagtggagtttgtgaccagagaattggcattttctacaaatgtttttttttgttttttttttgtttttttttgttttttttttgagacggagtctcgctctgtcacccaggctggagtgcactggcttgatctcggctcactgcaagctccacctcccaggttcacgccattctcctgcctcagcctcccgagtagctgggactataggcgcccaccacgacgcccggctaattttttgtatttttagtagagacggggtttcaccaggttagccaggatggtctcgatctcctgaccttgtgatccgcccgcctcggcctcccaaagtgctgggattacaggcgtgagccaccgtgcccggcctacaaatgttaacaaagcaattaccaatggcctttttacatattttttctttaatgaggaataatatgcatgtagaaaagacctacttaaagtcttcatttatattctttcaaatcaaatctttatttaataacttatatatgttgttggaatggttacatttttgcagccctttgtattttgtggtagttgaaattgtatcacttctaaacagcaaactgtttttgtttttaattagcagatatctgaagtactatttttgcagggtttgcacaggcccgtaactgtctactactttgatataatctgtatacatcctgtatgctgagctggtaaaatacattgtaaattacatattaaatattttatctgcttttacaagcgcaaggtgcaaaaatatatacaatagtctcattgatgactgtaaagtgaattaacatttggtgattatgcctagcttttttgactaatataaagatcatagctccccttcacttctgtcttaacttgaacatggcgtgtttaaattttcatacatactttacttgaattattgctgttgtcacatatttttgcctctgtgagttcatctgatgattgagcagtagcatttgccttttgggttttttgtttgttattatagaagagatgacttctgctgattttgctttagaatggttaccttagaagaatttgggtggctcatgttgaatttcacttctgcaatagctttcattttctcataggctttataagagatgggttcagtggtatgagcagaggaagagatcccagatagtagccagttaaccaagactcattcatatagcacgtagtttatgttcctgaggcagcacttttagatcctttgtgagcaagttctatttgttcattgcttgccagagatgaacacagaatgttctgtttcattttacaagaactatcctgagtttctgtggatggaaacattacatgtaatgcagatatagtgaacactggaaagatttattaaagaattatatttgtgtatactttataaattagtccctcattagatttttttttcttaagcataagactgaacttaaatgtgttaattttagtagaatcaggcactgctcgcagaaggaacacagattgtagagattaacataaattgttcttgttctaatatatatattttttcatttctgtcgtgcttggaaaactagtaaatattatgtctaagataaaatggaatggcccctggatttacttcttataagaagcagtagtatgtaataaagctattagcatgagcaattaagaggctataaagagattatagttacaaaagaaatactgccatatttttaagttaataacttaaaccttctcaaatgggttaaaagttgaatgaattgacaccctgatgttatgatgttggaattttaacttaaactgggaggcattctgtgagccttcactttaccttctttaattattgtccttgctaaactcaacacagacttttctgttatgtgtttttgaggaagttggggtgggaagagtcagggagataagctaaaattgtcttcttttatggggtaattgtactctgtagtctcttggtttcctgtgaagttagtatttatgtgggggtgggggaaggtagcaagaatcatgggtatcacggtactttgtttttgacctcctggctctttcagacagagtgaagaaagcttttccattcttactgttgtagaagtagataggaaataagcttttctcattacagtgaaatatgttttaaaaactagagtagctgggcacagaggcatgcatttgtagggccagctacttgggagagtgaggcaggaggatcacttgaggccaggatttcaaatccagcctaggtaacactgagacctccatctcgtaaaagacacaaaaactagttagagatgaaattgagctttattttaaaaaaacgttctaaagcctgataattggagagctatacttcagcttttcatcctactttaatgaaacagctagataggaacctctgctccagaattgccagataattattggtgggtcataactattcttcatattttttttttcttttttctcctttggtttctgtgttatctttcttaacctcacgtatttctttatcctttttagtgggggcctgtaattgaggctaattcaatagcaacaatagacaacatgatatggctgctgtcactttgaaacccaaaaggtctttgggtaggaatagagtaatgaaagaggaccagtcaacttcagtatatatacaaaggaaagacaaagagatgataaaccaaggctgaggaaatttttctgatgctttcttcatttctctaatataccttttgcattctttttctgataattgtgctattaggcagaagacacaagttaccacgttgtgtattaaaagcagtaggtaggttgtgccagtattttttcagccagtaagcatatacagttaacttatataattaaaaattggtttaagatagtgattaaaaatacctgaatatt

SEQ ID NO: 17078 - DNA, 967 bp, Homo sapiens
ccacgcgtccgcggacgcgtggggcaaaattttcctagttgtaatattttaatagtgttatgtattggaaaaaatttagaaatactcctaagagttttcaatttcaagcagaaatgcttctcttctaaataaataccacttaattgatagacctttagcagttcttgtgctatctaggatttatacatttttgcttttctggaaaactgctttggcgcattaacctttctactgcaacattttctcttcagtagatatatgagtaaacatgatgagttaatgttacacagcatacccagttaggtctcttattcttaaagcatctttctttagaagtctgcacatattttcaaatgcatcatattaaaggcacaagttaagaggaggtggagttgcctacttcagtggcctttattcccactataccagttctcagtcttgattttgatactttctggcaactgtatcatctcttcactatcaagtattttaagaaaaagctaaggtgatttctttacatttgaacatgtgtagatcaatgagagaatggtgagggatagcaaggataaagtataatgttgaaaagtagaaagaagtggtatctgctaaactctagctttagtagcaagctattttaaggaaatcattgtatgtggtacttcctagaaatatgaaagttcctcattttgtatttaattatgtaagaaaatgttctaggaaaagaataaaaaacatatattgtcaaagtgccctttggtagtgctcccaaatggtagtaactattggtctctagtatatactcctcaaatatctttttgctatgtattaatatatctatatgtttacatatagaaatacatagtgttgtgggttttaaattttcccataaattgtgtcttacccatgtgttttgccatttgccttttctcttgccaacgtgtctaggagctctttggtaaatacagac

SEQ ID NO: 17079 - DNA, 6104 bp, Homo sapiens
ggtgtgacgtaggaggaaggagacgccattagagggaggcagagagggatcgttcttcgcttttcctccggtgcctgacgtggtgggctggggcccttcattctcggactttccctcagcccttccaggcctcgcccgaggagggcgtggggacagcgcccgggtcggcggggccggggcggtgggggctgagccggccgtggctgtgaaggcgctgccgcggctgtcgggagggcggcgcgacactcgggctcgggcggccgggaagcgacgggatggctgcggccggcggcggcggcggcggggcggcggcggcgggccgagcctactcgttcaaggtggtgctgctgggggaaggctgcgtggggaagacgtcgctggtgctgcgctactgcgagaacaagtttaacgacaagcacatcaccactctgcaggcatcattcttaacaaagaagttaaatattggtgggaaaagagtaaaccttgccatatgggatacggcaggtcaagagagattccatgcattgggtccaatttactacagagattcaaatggagcgattttagtttatgacataacagatgaagattcttttcagaaggtaaaaaactgggtcaaagaattacggaaaatgttgggaaatgaaatctgtttatgtatagttggtaataaaatagacttggaaaaggagagacatgtttccattcaagaagcagagtcgtatgcagaatctgtgggagcaaaacattatcatacttcagccaaacagaacaaaggaattgaggaactctttcttgacctttgtaaaaggatgatagaaacagcacaagtggatgagagagcaaaaggcaatggctctagtcagccgggaactgcaaggcgaggtgtacagattattgatgatgaacctcaagcccagaccagtggtggagggtgctgttcttctggataactgttcacgcctaagaaattaaaagacagaacaaaactgtggatcattgccctcaacatgaagactgccatattccaagtcacattattttaccaatggaattatagaattaacagtattttaaattacgtttataacactgcagagaccttaagtgctaaacttagtggagtttgtgaccagagaattggcattttctacaaatgtttttttttgttttttttttgtttttttttgttttttttttgagacggagtctcgctctgtcacccaggctggagtgcactggcttgatctcggctcactgcaagctccacctcccaggttcacgccattctcctgcctcagcctcccgagtagctgggactataggcgcccaccacgacgcccggctaattttttgtatttttagtagagacggggtttcaccaggttagccaggatggtctcgatctcctgaccttgtgatccgcccgcctcggcctcccaaagtgctgggattacaggcgtgagccaccgtgcccggcctacaaatgttaacaaagcaattaccaatggcctttttacatattttttctttaatgaggaataatatgcatgtagaaaagacctacttaaagtcttcatttatattctttcaaatcaaatctttatttaataacttatatatgttgttggaatggttacatttttgcagccctttgtattttgtggtagttgaaattgtatcacttctaaacagcaaactgtttttgtttttaattagcagatatctgaagtactatttttgcagggtttgcacaggcccgtaactgtctactactttgatataatctgtatacatcctgtatgctgagctggtaaaatacattgtaaattacatattaaatattttatctgcttttacaagcgcaaggtgcaaaaatatatacaatagtctcattgatgactgtaaagtgaattaacatttggtgattatgcctagcttttttgactaatataaagatcatagctccccttcacttctgtcttaacttgaacatggcgtgtttaaattttcatacatactttacttgaattattgctgttgtcacatatttttgcctctgtgagttcatctgatgattgagcagtagcatttgccttttgggttttttgtttgttattatagaagagatgacttctgctgattttgctttagaatggttaccttagaagaatttgggtggctcatgttgaatttcacttctgcaatagctttcattttctcataggctttataagagatgggttcagtggtatgagcagaggaagagatcccagatagtagccagttaaccaagactcattcatatagcacgtagtttatgttcctgaggcagcacttttagatcctttgtgagcaagttctatttgttcattgcttgccagagatgaacacagaatgttctgtttcattttacaagaactatcctgagtttctgtggatggaaacattacatgtaatgcagatatagtgaacactggaaagatttattaaagaattatatttgtgtatactttataaattagtccctcattagatttttttttcttaagcataagactgaacttaaatgtgttaattttagtagaatcaggcactgctcgcagaaggaacacagattgtagagattaacataaattgttcttgttctaatatatatattttttcatttctgtcgtgcttggaaaactagtaaatattatgtctaagataaaatggaatggcccctggatttacttcttataagaagcagtagtatgtaataaagctattagcatgagcaattaagaggctataaagagattatagttacaaaagaaatactgccatatttttaagttaataacttaaaccttctcaaatgggttaaaagttgaatgaattgacaccctgatgttatgatgttggaattttaacttaaactgggaggcattctgtgagccttcactttaccttctttaattattgtccttgctaaactcaacacagacttttctgttatgtgtttttgaggaagttggggtgggaagagtcagggagataagctaaaattgtcttcttttatggggtaattgtactctgtagtctcttggtttcctgtgaagttagtatttatgtgggggtgggggaaggtagcaagaatcatgggtatcacggtactttgtttttgacctcctggctctttcagacagagtgaagaaagcttttccattcttactgttgtagaagtagataggaaataagcttttctcattacagtgaaatatgttttaaaaactagagtagctgggcacagaggcatgcatttgtagggccagctacttgggagagtgaggcaggaggatcacttgaggccaggatttcaaatccagcctaggtaacactgagacctccatctcgtaaaagacacaaaaactagttagagatgaaattgagctttattttaaaaaaacgttctaaagcctgataattggagagctatacttcagcttttcatcctactttaatgaaacagctagataggaacctctgctccagaattgccagataattattggtgggtcataactattcttcatattttttttttcttttttctcctttggtttctgtgttatctttcttaacctcacgtatttctttatcctttttagtgggggcctgtaattgaggctaattcaatagcaacaatagacaacatgatatggctgctgtcactttgaaacccaaaaggtctttgggtaggaatagagtaatgaaagaggaccagtcaacttcagtatatatacaaaggaaagacaaagagatgataaaccaaggctgaggaaatttttctgatgctttcttcatttctctaatataccttttgcattctttttctgataattgtgctattaggcagaagacacaagttaccacgttgtgtattaaaagcagtaggtaggttgtgccagtattttttcagccagtaagcatatacagttaacttatataattaaaaattggtttaagatagtgattaaaaatacctgaatattatgttaaaagtatacaatcattgtttctgtaatgatgatgggtattctgcttcttgtttttcattgtaattacaggggaagattgtttttgaaaatgtatattgccatgcttttggggtaagcagtaatgtgaaaagaaaaaagcattatgttattgtatgaaatataagtgttcagatttgttttgtctggggtgttgcctaagaataccctaaagctatggctgttactgcattgaaatcttttttttttttaatagtagccatatgttattagtggagtactttatatttgacattaaagtgaagaagaagagtagtacttcacttttaggtttttagtagtgaaagataaaattggaaaaatagggaaagagcatagggaggaatagaatggaagtcaagtaaataaaaaactacaacctgacagttttttaaatcactttgaaaagtacattacttttatcaaagagtttctaattaaggcaaactatgcattatgccaaatattaagaacattttaaaaatggattgtgatactgtttatttctttaattatataatttgcaattttctgtattataagtgctaccaggattctagatagttgatcttacatattcagatagtatagtttactcttataattacccgttacgttatctctaaaagtagtttgatctgtgcctttaacttttagaattcatcttttgacttgtttgccactgtagagttttcagttttctctgtagattcagtgtgacaaagagggaatacataatttgtgaccatttaagatgctgatattttctggaaaaggatatagatagtagtagtgacccgcaggagcctcacaataatgtctaaagatataaactgagtagatccctaagtactcttctctaaattataaaatgcattacctaggctttaatagttaaaagctggaatttattgaaccgcatctacttgatttcataatatgcattgattttagtatgttgctgttctgttatctgtaatcaactataacagagtaatatatttggtgttctggaccaaaattcgtgctacacatatgtctgatggcctttaccttttcaagaaaacagttgcaattttgagcaaaattttcctagttgtaatattttaatagtgttatgtattggaaaaaatttagaaatactcctaagagttttcaatttcaagcagaaatgcttctcttctaaataaataccacttaattgatagacctttagcagttcttgtgctatctaggatttatacatttttgcttttctggaaaactgctttggcgcattaacctttctactgcaacattttctcttcagtagatatatgagtaaacatgatgagttaatgttacacagcatacccagttaggtctcttattcttaaagcatctttctttagaagtctgcacatattttcaaatgcatcatattaaaggcacaagttaagaggaggtggagttgcctacttcagtggcctttattcccactataccagttctcagtcttgattttgatactttctggcaactgtatcatctcttcactatcaagtattttaagaaaaagctaaggtgatttctttacatttgaacatgtgtagatcaatgagagaatggtgagggatagcaaggataaagtataatgttgaaaagtagaaagaagtggtatctgctaaactctagctttagtagcaagctattttaaggaaatcattgtatgtggtacttcctagaaatatgaaagttcctcattttgtatttaattatgtaagaaaatgttctaggaaaagaataaaaaacatatattgtcaaagtgccctttggtagtgctcccaaatggtagtaactattggtctctagtatatactcctcaaatatctttttgctatgtattaatatatctatatgtttacatatagaaatacatagtgttgtgggttttaaattttcccataaattgtgtcttacccatgtgttttgccatttgccttttctcttgccaacgtgtctaggagctctttggtaaatacagac

SEQ ID NO: 17080 - DNA, 5093 bp, Homo sapiens
ggtgtgacgtaggaggaaggagacgccattagagggaggcagagagggatcgttcttcgcttttcctccggtgcctgacgtggtgggctggggcccttcattctcggactttccctcagcccttccaggcctcgcccgaggagggcgtggggacagcgcccgggtcggcggggccggggcggtgggggctgagccggccgtggctgtgaaggcgctgccgcggctgtcgggagggcggcgcgacactcgggctcgggcggccgggaagcgacgggatggctgcggccggcggcggcggcggcggggcggcggcggcgggccgagcctactcgttcaaggtggtgctgctgggggaaggctgcgtggggaagacgtcgctggtgctgcgctactgcgagaacaagtttaacgacaagcacatcaccactctgcaggcatcattcttaacaaagaagttaaatattggtgggaaaagagtaaaccttgccatatgggatacggcaggtcaagagagattccatgcattgggtccaatttactacagagattcaaatggagcgattttagtttatgacataacagatgaagattcttttcagaaggtaaaaaactgggtcaaagaattacggaaaatgttgggaaatgaaatctgtttatgtatagttggtaataaaatagacttggaaaaggagagacatgtttccattcaagaagcagagtcgtatgcagaatctgtgggagcaaaacattatcatacttcagccaaacagaacaaaggaattgaggaactctttcttgacctttgtaaaaggatgatagaaacagcacaagtggatgagagagcaaaaggcaatggctctagtcagccgggaactgcaaggcgaggtgtacagattattgatgatgaacctcaagcccagaccagtggtggagggtgctgttcttctggataactgttcacgcctaagaaattaaaagacagaacaaaactgtggatcattgccctcaacatgaagactgccatattccaagtcacattattttaccaatggaattatagaattaacagtattttaaattacgtttataacactgcagagaccttaagtgctaaacttagtggagtttgtgaccagagaattggcattttctacaaatgtttttttttgttttttttttgtttttttttgttttttttttgagacggagtctcgctctgtcacccaggctggagtgcactggcttgatctcggctcactgcaagctccacctcccaggttcacgccattctcctgcctcagcctcccgagtagctgggactataggcgcccaccacgacgcccggctaattttttgtatttttagtagagacggggtttcaccaggttagccaggatggtctcgatctcctgaccttgtgatccgcccgcctcggcctcccaaagtgctgggattacaggcgtgagccaccgtgcccggcctacaaatgttaacaaagcaattaccaatggcctttttacatattttttctttaatgaggaataatatgcatgtagaaaagacctacttaaagtcttcatttatattctttcaaatcaaatctttatttaataacttatatatgttgttggaatggttacatttttgcagccctttgtattttgtggtagttgaaattgtatcacttctaaacagcaaactgtttttgtttttaattagcagatatctgaagtactatttttgcagggtttgcacaggcccgtaactgtctactactttgatataatctgtatacatcctgtatgctgagctggtaaaatacattgtaaattacatattaaatattttatctgcttttacaagcgcaaggtgcaaaaatatatacaatagtctcattgatgactgtaaagtgaattaacatttggtgattatgcctagcttttttgactaatataaagatcatagctccccttcacttctgtcttaacttgaacatggcgtgtttaaattttcatacatactttacttgaattattgctgttgtcacatatttttgcctctgtgagttcatctgatgattgagcagtagcatttgccttttgggttttttgtttgttattatagaagagatgacttctgctgattttgctttagaatggttaccttagaagaatttgggtggctcatgttgaatttcacttctgcaatagctttcattttctcataggctttataagagatgggttcagtggtatgagcagaggaagagatcccagatagtagccagttaaccaagactcattcatatagcacgtagtttatgttcctgaggcagcacttttagatcctttgtgagcaagttctatttgttcattgcttgccagagatgaacacagaatgttctgtttcattttacaagaactatcctgagtttctgtggatggaaacattacatgtaatgcagatatagtgaacactggaaagatttattaaagaattatatttgtgtatactttataaattagtccctcattagatttttttttcttaagcataagactgaacttaaatgtgttaattttagtagaatcaggcactgctcgcagaaggaacacagattgtagagattaacataaattgttcttgttctaatatatatattttttcatttctgtcgtgcttggaaaactagtaaatattatgtctaagataaaatggaatggcccctggatttacttcttataagaagcagtagtatgtaataaagctattagcatgagcaattaagaggctataaagagattatagttacaaaagaaatactgccatatttttaagttaataacttaaaccttctcaaatgggttaaaagttgaatgaattgacaccctgatgttatgatgttggaattttaacttaaactgggaggcattctgtgagccttcactttaccttctttaattattgtccttgctaaactcaacacagacttttctgttatgtgtttttgaggaagttggggtgggaagagtcagggagataagctaaaattgtcttcttttatggggtaattgtactctgtagtctcttggtttcctgtgaagttagtatttatgtgggggtgggggaaggtagcaagaatcatgggtatcacggtactttgtttttgacctcctggctctttcagacagagtgaagaaagcttttccattcttactgttgtagaagtagataggaaataagcttttctcattacagtgaaatatgttttaaaaactagagtagctgggcacagaggcatgcatttgtagggccagctacttgggagagtgaggcaggaggatcacttgaggccaggatttcaaatccagcctaggtaacactgagacctccatctcgtaaaagacacaaaaactagttagagatgaaattgagctttattttaaaaaaacgttctaaagcctgataattggagagctatacttcagcttttcatcctactttaatgaaacagctagataggaacctctgctccagaattgccagataattattggtgggtcataactattcttcatattttttttttcttttttctcctttggtttctgtgttatctttcttaacctcacgtatttctttatcctttttagtgggggcctgtaattgaggctaattcaatagcaacaatagacaacatgatatggctgctgtcactttgaaacccaaaaggtctttgggtaggaatagagtaatgaaagaggaccagtcaacttcagtatatatacaaaggaaagacaaagagatgataaaccaaggctgaggaaatttttctgatgctttcttcatttctctaatataccttttgcattctttttctgataattgtgctattaggcagaagacacaagttaccacgttgtgtattaaaagcagtaggtaggttgtgccagtattttttcagccagtaagcatatacagttaacttatataattaaaaattggtttaagatagtgattaaaaatacctgaatattatgttaaaagtatacaatcattgtttctgtaatgatgatgggtattctgcttcttgtttttcattgtaattacaggggaagattgtttttgaaaatgtatattgccatgcttttggggtaagcagtaatgtgaaaagaaaaaagcattatgttattgtatgaaatataagtgttcagatttgttttgtctggggtgttgcctaagaataccctaaagctatggctgttactgcattgaaatcttttttttttttaatagtagccatatgttattagtggagtactttatatttgacattaaagtgaagaagaagagtagtacttcacttttaggtttttagtagtgaaagataaaattggaaaaatagggaaagagcatagggaggaatagaatggaagtcaagtaaataaaaaactacaacctgacagttttttaaatcactttgaaaagtacattacttttatcaaagagtttctaattaaggcaaactatgcattatgccaaatattaagaacattttaaaaatggattgtgatactgtttatttctttaattatataatttgcaattttctgtattataagtgctaccaggattctagatagttgatcttacatattcagatagtatagtttactcttataattacccgttacgttatctctaaaagtagtttgatctgtgcctttaacttttagaattcatcttttgacttgtttgccactgtagagttttcagttttctctgtagattcagtgtgacaaagagggaatacataatttgtgaccatttaagatgctgatattttctggaaaaggatatagatagtagtagtgacccgcaggagcctcacaataatgtctaaagatataaactgagtagatccctaagtactcttctctaaattataaaatgcattacctaggctttaatagttaaaagctggaatttattgaaccgcatctacttgatttcataatatgcattgattttagtatgttgctgttctgttatctgtaatcaactataacagagtaatatatttggtgttctgg

SEQ ID NO: 17081 - DNA, 2712 bp, Homo sapiens
ggtgtgacgtaggaggaaggagacgccattagagggaggcagagagggatcgttcttcgcttttcctccggtgcctgacgtggtgggctggggcccttcattctcggactttccctcagcccttccaggcctcgcccgaggagggcgtggggacagcgcccgggtcggcggggccggggcggtgggggctgagccggccgtggctgtgaaggcgctgccgcggctgtcgggagggcggcgcgacactcgggctcgggcggccgggaagcgacgggatggctgcggccggcggcggcggcggcggggcggcggcggcgggccgagcctactcgttcaaggtggtgctgctgggggaaggctgcgtggggaagacgtcgctggtgctgcgctactgcgagaacaagtttaacgacaagcacatcaccactctgcaggcatcattcttaacaaagaagttaaatattggtgggaaaagagtaaaccttgccatatgggatacggcaggtcaagagagattccatgcattgggtccaatttactacagagattcaaatggagcgattttagtttatgacataacagatgaagattcttttcagaaggtaaaaaactgggtcaaagaattacggaaaatgttgggaaatgaaatctgtttatgtatagttggtaataaaatagacttggaaaaggagagacatgtttccattcaagaagcagagtcgtatgcagaatctgtgggagcaaaacattatcatacttcagccaaacagaacaaaggaattgaggaactctttcttgacctttgtaaaaggatgatagaaacagcacaagtggatgagagagcaaaaggcaatggctctagtcagccgggaactgcaaggcgaggtgtacagattattgatgatgaacctcaagcccagaccagtggtggagggtgctgttcttctggataactgttcacgcctaagaaattaaaagacagaacaaaactgtggatcattgccctcaacatgaagactgccatattccaagtcacattattttaccaatggaattatagaattaacagtattttaaattacgtttataacactgcagagaccttaagtgctaaacttagtggagtttgtgaccagagaattggcattttctacaaatgtttttttttgttttttttttgtttttttttgttttttttttgagacggagtctcgctctgtcacccaggctggagtgcactggcttgatctcggctcactgcaagctccacctcccaggttcacgccattctcctgcctcagcctcccgagtagctgggactataggcgcccaccacgacgcccggctaattttttgtatttttagtagagacggggtttcaccaggttagccaggatggtctcgatctcctgaccttgtgatccgcccgcctcggcctcccaaagtgctgggattacaggcgtgagccaccgtgcccggcctacaaatgttaacaaagcaattaccaatggcctttttacatattttttctttaatgaggaataatatgcatgtagaaaagacctacttaaagtcttcatttatattctttcaaatcaaatctttatttaataacttatatatgttgttggaatggttacatttttgcagccctttgtattttgtggtagttgaaattgtatcacttctaaacagcaaactgtttttgtttttaattagcagatatctgaagtactatttttgcagggtttgcacaggcccgtaactgtctactactttgatataatctgtatacatcctgtatgctgagctggtaaaatacattgtaaattacatattaaatattttatctgcttttacaagcgcaaggtgcaaaaatatatacaatagtctcattgatgactgtaaagtgaattaacatttggtgattatgcctagcttttttgactaatataaagatcatagctccccttcacttctgtcttaacttgaacatggcgtgtttaaattttcatacatactttacttgaattattgctgttgtcacatatttttgcctctgtgagttcatctgatgattgagcagtagcatttgccttttgggttttttgtttgttattatagaagagatgacttctgctgattttgctttagaatggttaccttagaagaatttgggtggctcatgttgaatttcacttctgcaatagctttcattttctcataggctttataagagatgggttcagtggtatgagcagaggaagagatcccagatagtagccagttaaccaagactcattcatatagcacgtagtttatgttcctgaggcagcacttttagatcctttgtgagcaagttctatttgttcattgcttgccagagatgaacacagaatgttctgtttcattttacaagaactatcctgagtttctgtggatggaaacattacatgtaatgcagatatagtgaacactggaaagatttattaaagaattatatttgtgtatactttataaattagtccctcattagatttttttttcttaagcataagactgaacttaaatgtgttaattttagtagaatcaggcactgctcgcagaaggaacacagattgtagagattaacataaattgttcttgttctaatatatatattttttcatttctgtcgtgcttggaaaactagtaaatattatgtctaagata

SEQ ID NO: 17082 - DNA, 6111 bp, Homo sapiens
ggtgtgacgtaggaggaaggagacgccattagagggaggcagagagggatcgttcttcgcttttcctccggtgcctgacgtggtgggctggggcccttcattctcggactttccctcagcccttccaggcctcgcccgaggagggcgtggggacagcgcccgggtcggcggggccggggcggtgggggctgagccggccgtggctgtgaaggcgctgccgcggctgtcgggagggcggcgcgacactcgggctcgggcggccgggaagcgacgggatggctgcggccggcggcggcggcggcggggcggcggcggcgggccgagcctactcgttcaaggtggtgctgctgggggaaggctgcgtggggaagacgtcgctggtgctgcgctactgcgagaacaagtttaacgacaagcacatcaccactctgcaggcatcattcttaacaaagaagttaaatattggtgggaaaagagtaaaccttgccatatgggatacggcaggtcaagagagattccatgcattgggtccaatttactacagagattcaaatggagcgattttagtttatgacataacagatgaagattcttttcagaaggtaaaaaactgggtcaaagaattacggaaaatgttgggaaatgaaatctgtttatgtatagttggtaataaaatagacttggaaaaggagagacatgtttccattcaagaagcagagtcgtatgcagaatctgtgggagcaaaacattatcatacttcagccaaacagaacaaaggaattgaggaactctttcttgacctttgtaaaaggatgatagaaacagcacaagtggatgagagagcaaaaggcaatggctctagtcagccgggaactgcaaggcgaggtgtacagattattgatgatgaacctcaagcccagaccagtggtggagggtgctgttcttctggataactgttcacgcctaagaaattaaaagacagaacaaaactgtggatcattgccctcaacatgaagactgccatattccaagtcacattattttaccaatggaattatagaattaacagtattttaaattacgtttataacactgcagagaccttaagtgctaaacttagtggagtttgtgaccagagaattggcattttctacaaatgttcacaatggtaaaactaacagcgtgaatcacatgcggtacacttttggaaacggagtctcgctctgtcacccaggctggagtgcactggcttgatctcggctcactgcaagctccacctcccaggttcacgccattctcctgcctcagcctcccgagtagctgggactataggcgcccaccacgacgcccggctaattttttgtatttttagtagagacggggtttcaccaggttagccaggatggtctcgatctcctgaccttgtgatccgcccgcctcggcctcccaaagtgctgggattacaggcgtgagccaccgtgcccggcctacaaatgttaacaaagcaattaccaatggcctttttacatattttttctttaatgaggaataatatgcatgtagaaaagacctacttaaagtcttcatttatattctttcaaatcaaatctttatttaataacttatatatgttgttggaatggttacatttttgcagccctttgtattttgtggtagttgaaattgtatcacttctaaacagcaaactgtttttgtttttaattagcagatatctgaagtactatttttgcagggtttgcacaggcccgtaactgtctactactttgatataatctgtatacatcctgtatgctgagctggtaaaatacattgtaaattacatattaaatattttatctgcttttacaagcgcaaggtgcaaaaatatatacaatagtctcattgatgactgtaaagtgaattaacatttggtgattatgcctagcttttttgactaatataaagatcatagctccccttcacttctgtcttaacttgaacatggcgtgtttaaattttcatacatactttacttgaattattgctgttgtcacatatttttgcctctgtgagttcatctgatgattgagcagtagcatttgccttttgggttttttgtttgttattatagaagagatgacttctgctgattttgctttagaatggttaccttagaagaatttgggtggctcatgttgaatttcacttctgcaatagctttcattttctcataggctttataagagatgggttcagtggtatgagcagaggaagagatcccagatagtagccagttaaccaagactcattcatatagcacgtagtttatgttcctgaggcagcacttttagatcctttgtgagcaagttctatttgttcattgcttgccagagatgaacacagaatgttctgtttcattttacaagaactatcctgagtttctgtggatggaaacattacatgtaatgcagatatagtgaacactggaaagatttattaaagaattatatttgtgtatactttataaattagtccctcattagatttttttttcttaagcataagactgaacttaaatgtgttaattttagtagaatcaggcactgctcgcagaaggaacacagattgtagagattaacataaattgttcttgttctaatatatatattttttcatttctgtcgtgcttggaaaactagtaaatattatgtctaagataaaatggaatggcccctggatttacttcttataagaagcagtagtatgtaataaagctattagcatgagcaattaagaggctataaagagattatagttacaaaagaaatactgccatatttttaagttaataacttaaaccttctcaaatgggttaaaagttgaatgaattgacaccctgatgttatgatgttggaattttaacttaaactgggaggcattctgtgagccttcactttaccttctttaattattgtccttgctaaactcaacacagacttttctgttatgtgtttttgaggaagttggggtgggaagagtcagggagataagctaaaattgtcttcttttatggggtaattgtactctgtagtctcttggtttcctgtgaagttagtatttatgtgggggtgggggaaggtagcaagaatcatgggtatcacggtactttgtttttgacctcctggctctttcagacagagtgaagaaagcttttccattcttactgttgtagaagtagataggaaataagcttttctcattacagtgaaatatgttttaaaaactagagtagctgggcacagaggcatgcatttgtagggccagctacttgggagagtgaggcaggaggatcacttgaggccaggatttcaaatccagcctaggtaacactgagacctccatctcgtaaaagacacaaaaactagttagagatgaaattgagctttattttaaaaaaacgttctaaagcctgataattggagagctatacttcagcttttcatcctactttaatgaaacagctagataggaacctctgctccagaattgccagataattattggtgggtcataactattcttcatattttttttttcttttttctcctttggtttctgtgttatctttcttaacctcacgtatttctttatcctttttagtgggggcctgtaattgaggctaattcaatagcaacaatagacaacatgatatggctgctgtcactttgaaacccaaaaggtctttgggtaggaatagagtaatgaaagaggaccagtcaacttcagtatatatacaaaggaaagacaaagagatgataaaccaaggctgaggaaatttttctgatgctttcttcatttctctaatataccttttgcattctttttctgataattgtgctattaggcagaagacacaagttaccacgttgtgtattaaaagcagtaggtaggttgtgccagtattttttcagccagtaagcatatacagttaacttatataattaaaaattggtttaagatagtgattaaaaatacctgaatattatgttaaaagtatacaatcattgtttctgtaatgatgatgggtattctgcttcttgtttttcattgtaattacaggggaagattgtttttgaaaatgtatattgccatgcttttggggtaagcagtaatgtgaaaagaaaaaagcattatgttattgtatgaaatataagtgttcagatttgttttgtctggggtgttgcctaagaataccctaaagctatggctgttactgcattgaaatcttttttttttttaatagtagccatatgttattagtggagtactttatatttgacattaaagtgaagaagaagagtagtacttcacttttaggtttttagtagtgaaagataaaattggaaaaatagggaaagagcatagggaggaatagaatggaagtcaagtaaataaaaaactacaacctgacagttttttaaatcactttgaaaagtacattacttttatcaaagagtttctaattaaggcaaactatgcattatgccaaatattaagaacattttaaaaatggattgtgatactgtttatttctttaattatataatttgcaattttctgtattataagtgctaccaggattctagatagttgatcttacatattcagatagtatagtttactcttataattacccgttacgttatctctaaaagtagtttgatctgtgcctttaacttttagaattcatcttttgacttgtttgccactgtagagttttcagttttctctgtagattcagtgtgacaaagagggaatacataatttgtgaccatttaagatgctgatattttctggaaaaggatatagatagtagtagtgacccgcaggagcctcacaataatgtctaaagatataaactgagtagatccctaagtactcttctctaaattataaaatgcattacctaggctttaatagttaaaagctggaatttattgaaccgcatctacttgatttcataatatgcattgattttagtatgttgctgttctgttatctgtaatcaactataacagagtaatatatttggtgttctggaccaaaattcgtgctacacatatgtctgatggcctttaccttttcaagaaaacagttgcaattttgagcaaaattttcctagttgtaatattttaatagtgttatgtattggaaaaaatttagaaatactcctaagagttttcaatttcaagcagaaatgcttctcttctaaataaataccacttaattgatagacctttagcagttcttgtgctatctaggatttatacatttttgcttttctggaaaactgctttggcgcattaacctttctactgcaacattttctcttcagtagatatatgagtaaacatgatgagttaatgttacacagcatacccagttaggtctcttattcttaaagcatctttctttagaagtctgcacatattttcaaatgcatcatattaaaggcacaagttaagaggaggtggagttgcctacttcagtggcctttattcccactataccagttctcagtcttgattttgatactttctggcaactgtatcatctcttcactatcaagtattttaagaaaaagctaaggtgatttctttacatttgaacatgtgtagatcaatgagagaatggtgagggatagcaaggataaagtataatgttgaaaagtagaaagaagtggtatctgctaaactctagctttagtagcaagctattttaaggaaatcattgtatgtggtacttcctagaaatatgaaagttcctcattttgtatttaattatgtaagaaaatgttctaggaaaagaataaaaaacatatattgtcaaagtgccctttggtagtgctcccaaatggtagtaactattggtctctagtatatactcctcaaatatctttttgctatgtattaatatatctatatgtttacatatagaaatacatagtgttgtgggttttaaattttcccataaattgtgtcttacccatgtgttttgccatttgccttttctcttgccaacgtgtctaggagctctttggtaaatacagac

SEQ ID NO: 17083 - DNA, 6040 bp, Homo sapiens
ggtgtgacgtaggaggaaggagacgccattagagggaggcagagagggatcgttcttcgcttttcctccggtgcctgacgtggtgggctggggcccttcattctcggactttccctcagcccttccaggcctcgcccgaggagggcgtggggacagcgcccgggtcggcggggccggggcggtgggggctgagccggccgtggctgtgaaggcgctgccgcggctgtcgggagggcggcgcgacactcgggctcgggcggccgggaagcgacgggatggctgcggccggcggcggcggcggcggggcggcggcggcgggccgagcctactcgttcaaggtggtgctgctgggggaaggctgcgtggggaagacgtcgctggtgctgcgctactgcgagaacaagtttaacgacaagcacatcaccactctgcaggcatcattcttaacaaagaagttaaatattggtgggaaaagagtaaaccttgccatatgggatacggcaggtcaagagagattccatgcattgggtccaatttactacagagattcaaatggagcgattttagtttatgacataacagatgaagattcttttcagaaggtaataaaatagacttggaaaaggagagacatgtttccattcaagaagcagagtcgtatgcagaatctgtgggagcaaaacattatcatacttcagccaaacagaacaaaggaattgaggaactctttcttgacctttgtaaaaggatgatagaaacagcacaagtggatgagagagcaaaaggcaatggctctagtcagccgggaactgcaaggcgaggtgtacagattattgatgatgaacctcaagcccagaccagtggtggagggtgctgttcttctggataactgttcacgcctaagaaattaaaagacagaacaaaactgtggatcattgccctcaacatgaagactgccatattccaagtcacattattttaccaatggaattatagaattaacagtattttaaattacgtttataacactgcagagaccttaagtgctaaacttagtggagtttgtgaccagagaattggcattttctacaaatgtttttttttgttttttttttgtttttttttgttttttttttgagacggagtctcgctctgtcacccaggctggagtgcactggcttgatctcggctcactgcaagctccacctcccaggttcacgccattctcctgcctcagcctcccgagtagctgggactataggcgcccaccacgacgcccggctaattttttgtatttttagtagagacggggtttcaccaggttagccaggatggtctcgatctcctgaccttgtgatccgcccgcctcggcctcccaaagtgctgggattacaggcgtgagccaccgtgcccggcctacaaatgttaacaaagcaattaccaatggcctttttacatattttttctttaatgaggaataatatgcatgtagaaaagacctacttaaagtcttcatttatattctttcaaatcaaatctttatttaataacttatatatgttgttggaatggttacatttttgcagccctttgtattttgtggtagttgaaattgtatcacttctaaacagcaaactgtttttgtttttaattagcagatatctgaagtactatttttgcagggtttgcacaggcccgtaactgtctactactttgatataatctgtatacatcctgtatgctgagctggtaaaatacattgtaaattacatattaaatattttatctgcttttacaagcgcaaggtgcaaaaatatatacaatagtctcattgatgactgtaaagtgaattaacatttggtgattatgcctagcttttttgactaatataaagatcatagctccccttcacttctgtcttaacttgaacatggcgtgtttaaattttcatacatactttacttgaattattgctgttgtcacatatttttgcctctgtgagttcatctgatgattgagcagtagcatttgccttttgggttttttgtttgttattatagaagagatgacttctgctgattttgctttagaatggttaccttagaagaatttgggtggctcatgttgaatttcacttctgcaatagctttcattttctcataggctttataagagatgggttcagtggtatgagcagaggaagagatcccagatagtagccagttaaccaagactcattcatatagcacgtagtttatgttcctgaggcagcacttttagatcctttgtgagcaagttctatttgttcattgcttgccagagatgaacacagaatgttctgtttcattttacaagaactatcctgagtttctgtggatggaaacattacatgtaatgcagatatagtgaacactggaaagatttattaaagaattatatttgtgtatactttataaattagtccctcattagatttttttttcttaagcataagactgaacttaaatgtgttaattttagtagaatcaggcactgctcgcagaaggaacacagattgtagagattaacataaattgttcttgttctaatatatatattttttcatttctgtcgtgcttggaaaactagtaaatattatgtctaagataaaatggaatggcccctggatttacttcttataagaagcagtagtatgtaataaagctattagcatgagcaattaagaggctataaagagattatagttacaaaagaaatactgccatatttttaagttaataacttaaaccttctcaaatgggttaaaagttgaatgaattgacaccctgatgttatgatgttggaattttaacttaaactgggaggcattctgtgagccttcactttaccttctttaattattgtccttgctaaactcaacacagacttttctgttatgtgtttttgaggaagttggggtgggaagagtcagggagataagctaaaattgtcttcttttatggggtaattgtactctgtagtctcttggtttcctgtgaagttagtatttatgtgggggtgggggaaggtagcaagaatcatgggtatcacggtactttgtttttgacctcctggctctttcagacagagtgaagaaagcttttccattcttactgttgtagaagtagataggaaataagcttttctcattacagtgaaatatgttttaaaaactagagtagctgggcacagaggcatgcatttgtagggccagctacttgggagagtgaggcaggaggatcacttgaggccaggatttcaaatccagcctaggtaacactgagacctccatctcgtaaaagacacaaaaactagttagagatgaaattgagctttattttaaaaaaacgttctaaagcctgataattggagagctatacttcagcttttcatcctactttaatgaaacagctagataggaacctctgctccagaattgccagataattattggtgggtcataactattcttcatattttttttttcttttttctcctttggtttctgtgttatctttcttaacctcacgtatttctttatcctttttagtgggggcctgtaattgaggctaattcaatagcaacaatagacaacatgatatggctgctgtcactttgaaacccaaaaggtctttgggtaggaatagagtaatgaaagaggaccagtcaacttcagtatatatacaaaggaaagacaaagagatgataaaccaaggctgaggaaatttttctgatgctttcttcatttctctaatataccttttgcattctttttctgataattgtgctattaggcagaagacacaagttaccacgttgtgtattaaaagcagtaggtaggttgtgccagtattttttcagccagtaagcatatacagttaacttatataattaaaaattggtttaagatagtgattaaaaatacctgaatattatgttaaaagtatacaatcattgtttctgtaatgatgatgggtattctgcttcttgtttttcattgtaattacaggggaagattgtttttgaaaatgtatattgccatgcttttggggtaagcagtaatgtgaaaagaaaaaagcattatgttattgtatgaaatataagtgttcagatttgttttgtctggggtgttgcctaagaataccctaaagctatggctgttactgcattgaaatcttttttttttttaatagtagccatatgttattagtggagtactttatatttgacattaaagtgaagaagaagagtagtacttcacttttaggtttttagtagtgaaagataaaattggaaaaatagggaaagagcatagggaggaatagaatggaagtcaagtaaataaaaaactacaacctgacagttttttaaatcactttgaaaagtacattacttttatcaaagagtttctaattaaggcaaactatgcattatgccaaatattaagaacattttaaaaatggattgtgatactgtttatttctttaattatataatttgcaattttctgtattataagtgctaccaggattctagatagttgatcttacatattcagatagtatagtttactcttataattacccgttacgttatctctaaaagtagtttgatctgtgcctttaacttttagaattcatcttttgacttgtttgccactgtagagttttcagttttctctgtagattcagtgtgacaaagagggaatacataatttgtgaccatttaagatgctgatattttctggaaaaggatatagatagtagtagtgacccgcaggagcctcacaataatgtctaaagatataaactgagtagatccctaagtactcttctctaaattataaaatgcattacctaggctttaatagttaaaagctggaatttattgaaccgcatctacttgatttcataatatgcattgattttagtatgttgctgttctgttatctgtaatcaactataacagagtaatatatttggtgttctggaccaaaattcgtgctacacatatgtctgatggcctttaccttttcaagaaaacagttgcaattttgagcaaaattttcctagttgtaatattttaatagtgttatgtattggaaaaaatttagaaatactcctaagagttttcaatttcaagcagaaatgcttctcttctaaataaataccacttaattgatagacctttagcagttcttgtgctatctaggatttatacatttttgcttttctggaaaactgctttggcgcattaacctttctactgcaacattttctcttcagtagatatatgagtaaacatgatgagttaatgttacacagcatacccagttaggtctcttattcttaaagcatctttctttagaagtctgcacatattttcaaatgcatcatattaaaggcacaagttaagaggaggtggagttgcctacttcagtggcctttattcccactataccagttctcagtcttgattttgatactttctggcaactgtatcatctcttcactatcaagtattttaagaaaaagctaaggtgatttctttacatttgaacatgtgtagatcaatgagagaatggtgagggatagcaaggataaagtataatgttgaaaagtagaaagaagtggtatctgctaaactctagctttagtagcaagctattttaaggaaatcattgtatgtggtacttcctagaaatatgaaagttcctcattttgtatttaattatgtaagaaaatgttctaggaaaagaataaaaaacatatattgtcaaagtgccctttggtagtgctcccaaatggtagtaactattggtctctagtatatactcctcaaatatctttttgctatgtattaatatatctatatgtttacatatagaaatacatagtgttgtgggttttaaattttcccataaattgtgtcttacccatgtgttttgccatttgccttttctcttgccaacgtgtctaggagctctttggtaaatacagac

SEQ ID NO: 17084 - DNA, 6050 bp, Homo sapiens
ggtgtgacgtaggaggaaggagacgccattagagggaggcagagagggatcgttcttcgcttttcctccggtgcctgacgtggtgggctggggcccttcattctcggactttccctcagcccttccaggcctcgcccgaggagggcgtggggacagcgcccgggtcggcggggccggggcggtgggggctgagccggccgtggctgtgaaggcgctgccgcggctgtcgggagggcggcgcgacactcgggctcgggcggccgggaagcgacgggatggctgcggccggcggcggcggcggcggggcggcggcggcgggccgagcctactcgttcaaggtggtgctgctgggggaaggctgcgtggggaagacgtcgctggtgctgcgctactgcgagaacaagtttaacgacaagcacatcaccactctgcaggcatcattcttaacaaagaagttaaatattggtgggaaaagagtaaaccttgccatatgggatacggcaggtcaagagagattccatgcattgggtccaatttactacagagattcaaatggagcgattttagtttatgacataacagatgaagattcttttcagaaggtaaaaaactgggtcaaagaattacggaaaatgttgggaaatgaaatctgtttatgtatagttggtaataaaatagacttggaaaaggagagacatgtttccattcaagaagcagagtcgtatgcagaatctgtgggagcaaaacattatcatacttcagccaaacagaacaaaggaattgaggaactctttcttgacctttgtaaaaggatgatagaaacagcacaagtggatgagagagcaaaaggcaatggctctagtcagccgggaactgcaaggcgaggtgtacagattattgatgatgaacctcaagcccagaccagtggtggagggtgctgttcttctggataactgttcacgcctaagaaattaaaagacagaacaaaactgtggatcattgccctcaacatgaagactgccatattccaagtcacattattttaccaatggaattatagaattaacagtattttaaattacgtttataacactgcagagaccttaagtgctaaacttagtggagtttgtgaccagagaattggcattttctacaaatgtttttttttgttttttttttgtttttttttgttttttttttgagacggagtctcgctctgtcacccaggctggagtgcactggcttgatctcggctcactgcaagctccacctcccaggttcacgccattctcctgcctcagcctcccgagtagctgggactataggcgcccaccacgacgcccggctaattttttgtatttttagtagagacggggtttcaccaggttagccaggatggtctcgatctcctgaccttgtgatccgcccgcctcggcctcccaaagtgctgggattacaggcgtgagccaccgtgcccggcctacaaatgttaacaaagcaattaccaatggcctttttacatattttttctttaatgaggaataatatgcatgtagataacttatatatgttgttggaatggttacatttttgcagccctttgtattttgtggtagttgaaattgtatcacttctaaacagcaaactgtttttgtttttaattagcagatatctgaagtactatttttgcagggtttgcacaggcccgtaactgtctactactttgatataatctgtatacatcctgtatgctgagctggtaaaatacattgtaaattacatattaaatattttatctgcttttacaagcgcaaggtgcaaaaatatatacaatagtctcattgatgactgtaaagtgaattaacatttggtgattatgcctagcttttttgactaatataaagatcatagctccccttcacttctgtcttaacttgaacatggcgtgtttaaattttcatacatactttacttgaattattgctgttgtcacatatttttgcctctgtgagttcatctgatgattgagcagtagcatttgccttttgggttttttgtttgttattatagaagagatgacttctgctgattttgctttagaatggttaccttagaagaatttgggtggctcatgttgaatttcacttctgcaatagctttcattttctcataggctttataagagatgggttcagtggtatgagcagaggaagagatcccagatagtagccagttaaccaagactcattcatatagcacgtagtttatgttcctgaggcagcacttttagatcctttgtgagcaagttctatttgttcattgcttgccagagatgaacacagaatgttctgtttcattttacaagaactatcctgagtttctgtggatggaaacattacatgtaatgcagatatagtgaacactggaaagatttattaaagaattatatttgtgtatactttataaattagtccctcattagatttttttttcttaagcataagactgaacttaaatgtgttaattttagtagaatcaggcactgctcgcagaaggaacacagattgtagagattaacataaattgttcttgttctaatatatatattttttcatttctgtcgtgcttggaaaactagtaaatattatgtctaagataaaatggaatggcccctggatttacttcttataagaagcagtagtatgtaataaagctattagcatgagcaattaagaggctataaagagattatagttacaaaagaaatactgccatatttttaagttaataacttaaaccttctcaaatgggttaaaagttgaatgaattgacaccctgatgttatgatgttggaattttaacttaaactgggaggcattctgtgagccttcactttaccttctttaattattgtccttgctaaactcaacacagacttttctgttatgtgtttttgaggaagttggggtgggaagagtcagggagataagctaaaattgtcttcttttatggggtaattgtactctgtagtctcttggtttcctgtgaagttagtatttatgtgggggtgggggaaggtagcaagaatcatgggtatcacggtactttgtttttgacctcctggctctttcagacagagtgaagaaagcttttccattcttactgttgtagaagtagataggaaataagcttttctcattacagtgaaatatgttttaaaaactagagtagctgggcacagaggcatgcatttgtagggccagctacttgggagagtgaggcaggaggatcacttgaggccaggatttcaaatccagcctaggtaacactgagacctccatctcgtaaaagacacaaaaactagttagagatgaaattgagctttattttaaaaaaacgttctaaagcctgataattggagagctatacttcagcttttcatcctactttaatgaaacagctagataggaacctctgctccagaattgccagataattattggtgggtcataactattcttcatattttttttttcttttttctcctttggtttctgtgttatctttcttaacctcacgtatttctttatcctttttagtgggggcctgtaattgaggctaattcaatagcaacaatagacaacatgatatggctgctgtcactttgaaacccaaaaggtctttgggtaggaatagagtaatgaaagaggaccagtcaacttcagtatatatacaaaggaaagacaaagagatgataaaccaaggctgaggaaatttttctgatgctttcttcatttctctaatataccttttgcattctttttctgataattgtgctattaggcagaagacacaagttaccacgttgtgtattaaaagcagtaggtaggttgtgccagtattttttcagccagtaagcatatacagttaacttatataattaaaaattggtttaagatagtgattaaaaatacctgaatattatgttaaaagtatacaatcattgtttctgtaatgatgatgggtattctgcttcttgtttttcattgtaattacaggggaagattgtttttgaaaatgtatattgccatgcttttggggtaagcagtaatgtgaaaagaaaaaagcattatgttattgtatgaaatataagtgttcagatttgttttgtctggggtgttgcctaagaataccctaaagctatggctgttactgcattgaaatcttttttttttttaatagtagccatatgttattagtggagtactttatatttgacattaaagtgaagaagaagagtagtacttcacttttaggtttttagtagtgaaagataaaattggaaaaatagggaaagagcatagggaggaatagaatggaagtcaagtaaataaaaaactacaacctgacagttttttaaatcactttgaaaagtacattacttttatcaaagagtttctaattaaggcaaactatgcattatgccaaatattaagaacattttaaaaatggattgtgatactgtttatttctttaattatataatttgcaattttctgtattataagtgctaccaggattctagatagttgatcttacatattcagatagtatagtttactcttataattacccgttacgttatctctaaaagtagtttgatctgtgcctttaacttttagaattcatcttttgacttgtttgccactgtagagttttcagttttctctgtagattcagtgtgacaaagagggaatacataatttgtgaccatttaagatgctgatattttctggaaaaggatatagatagtagtagtgacccgcaggagcctcacaataatgtctaaagatataaactgagtagatccctaagtactcttctctaaattataaaatgcattacctaggctttaatagttaaaagctggaatttattgaaccgcatctacttgatttcataatatgcattgattttagtatgttgctgttctgttatctgtaatcaactataacagagtaatatatttggtgttctggaccaaaattcgtgctacacatatgtctgatggcctttaccttttcaagaaaacagttgcaattttgagcaaaattttcctagttgtaatattttaatagtgttatgtattggaaaaaatttagaaatactcctaagagttttcaatttcaagcagaaatgcttctcttctaaataaataccacttaattgatagacctttagcagttcttgtgctatctaggatttatacatttttgcttttctggaaaactgctttggcgcattaacctttctactgcaacattttctcttcagtagatatatgagtaaacatgatgagttaatgttacacagcatacccagttaggtctcttattcttaaagcatctttctttagaagtctgcacatattttcaaatgcatcatattaaaggcacaagttaagaggaggtggagttgcctacttcagtggcctttattcccactataccagttctcagtcttgattttgatactttctggcaactgtatcatctcttcactatcaagtattttaagaaaaagctaaggtgatttctttacatttgaacatgtgtagatcaatgagagaatggtgagggatagcaaggataaagtataatgttgaaaagtagaaagaagtggtatctgctaaactctagctttagtagcaagctattttaaggaaatcattgtatgtggtacttcctagaaatatgaaagttcctcattttgtatttaattatgtaagaaaatgttctaggaaaagaataaaaaacatatattgtcaaagtgccctttggtagtgctcccaaatggtagtaactattggtctctagtatatactcctcaaatatctttttgctatgtattaatatatctatatgtttacatatagaaatacatagtgttgtgggttttaaattttcccataaattgtgtcttacccatgtgttttgccatttgccttttctcttgccaacgtgtctaggagctctttggtaaatacagac

SEQ ID NO: 17085 - DNA, 4263 bp, Homo sapiens
acgcgtccgcccacgcgtccggcgcaaggtgcaaaaatatatacaatagtctcattgatgactgtaaagtgaattaacatttggtgattatgcctagcttttttgactaatataaagatcatagctccccttcacttctgtcttaacttgaacatggcgtgtttaaattttcatacatactttacttgaattattgctgttgtcacatatttttgcctctgtgagttcatctgatgattgagcagtagcatttgccttttgggttttttgtttgttattatagaagagatgacttctgctgattttgctttagaatggttaccttagaagaatttgggtggctcatgttgaatttcacttctgcaatagctttcattttctcataggctttataagagatgggttcagtggtatgagcagaggaagagatcccagatagtagccagttaaccaagactcattcatatagcacgtagtttatgttcctgaggcagcacttttagatcctttgtgagcaagttctatttgttcattgcttgccagagatgaacacagaatgttctgtttcattttacaagaactatcctgagtttctgtggatggaaacattacatgtaatgcagatatagtgaacactggaaagatttattaaagaattatatttgtgtatactttataaattagtccctcattagatttttttttcttaagcataagactgaacttaaatgtgttaattttagtagaatcaggcactgctcgcagaaggaacacagattgtagagattaacataaattgttcttgttctaatatatatattttttcatttctgtcgtgcttggaaaactagtaaatattatgtctaagataaaatggaatggcccctggatttacttcttataagaagcagtagtatgtaataaagctattagcatgagcaattaagaggctataaagagattatagttacaaaagaaatactgccatatttttaagttaataacttaaaccttctcaaatgggttaaaagttgaatgaattgacaccctgatgttatgatgttggaattttaacttaaactgggaggcattctgtgagccttcactttaccttctttaattattgtccttgctaaactcaacacagacttttctgttatgtgtttttgaggaagttggggtgggaagagtcagggagataagctaaaattgtcttcttttatggggtaattgtactctgtagtctcttggtttcctgtgaagttagtatttatgtgggggtgggggaaggtagcaagaatcatgggtatcacggtactttgtttttgacctcctggctctttcagacagagtgaagaaagcttttccattcttactgttgtagaagtagataggaaataagcttttctcattacagtgaaatatgttttaaaaactagagtagctgggcacagaggcatgcatttgtagggccagctacttgggagagtgaggcaggaggatcacttgaggccaggatttcaaatccagcctaggtaacactgagacctccatctcgtaaaagacacaaaaactagttagagatgaaattgagctttattttaaaaaaacgttctaaagcctgataattggagagctatacttcagcttttcatcctactttaatgaaacagctagataggaacctctgctccagaattgccagataattattggtgggtcataactattcttcatattttttttttcttttttctcctttggtttctgtgttatctttcttaacctcacgtatttctttatcctttttagtgggggcctgtaattgaggctaattcaatagcaacaatagacaacatgatatggctgctgtcactttgaaacccaaaaggtctttgggtaggaatagagtaatgaaagaggaccagtcaacttcagtatatatacaaaggaaagacaaagagatgataaaccaaggctgaggaaatttttctgatgctttcttcatttctctaatataccttttgcattctttttctgataattgtgctattaggcagaagacacaagttaccacgttgtgtattaaaagcagtaggtaggttgtgccagtattttttcagccagtaagcatatacagttaacttatataattaaaaattggtttaagatagtgattaaaaatacctgaatattatgttaaaagtatacaatcattgtttctgtaatgatgatgggtattctgcttcttgtttttcattgtaattacaggggaagattgtttttgaaaatgtatattgccatgcttttggggtaagcagtaatgtgaaaagaaaaaagcattatgttattgtatgaaatataagtgttcagatttgttttgtctggggtgttgcctaagaataccctaaagctatggctgttactgcattgaaatcttttttttttttaatagtagccatatgttattagtggagtactttatatttgacattaaagtgaagaagaagagtagtacttcacttttaggtttttagtagtgaaagataaaattggaaaaatagggaaagagcatagggaggaatagaatggaagtcaagtaaataaaaaactacaacctgacagttttttaaatcactttgaaaagtacattacttttatcaaagagtttctaattaaggcaaactatgcattatgccaaatattaagaacattttaaaaatggattgtgatactgtttatttctttaattatataatttgcaattttctgtattataagtgctaccaggattctagatagttgatcttacatattcagatagtatagtttactcttataattacccgttacgttatctctaaaagtagtttgatctgtgcctttaacttttagaattcatcttttgacttgtttgccactgtagagttttcagttttctctgtagattcagtgtgacaaagagggaatacataatttgtgaccatttaagatgctgatattttctggaaaaggatatagatagtagtagtgacccgcaggagcctcacaataatgtctaaagatataaactgagtagatccctaagtactcttctctaaattataaaatgcattacctaggctttaatagttaaaagctggaatttattgaaccgcatctacttgatttcataatatgcattgattttagtatgttgctgttctgttatctgtaatcaactataacagagtaatatatttggtgttctggaccaaaattcgtgctacacatatgtctgatggcctttaccttttcaagaaaacagttgcaattttgagcaaaattttcctagttgtaatattttaatagtgttatgtattggaaaaaatttagaaatactcctaagagttttcaatttcaagcagaaatgcttctcttctaaataaataccacttaattgatagacctttagcagttcttgtgctatctaggatttatacatttttgcttttctggaaaactgctttggcgcattaacctttctactgcaacattttctcttcagtagatatatgagtaaacatgatgagttaatgttacacagcatacccagttaggtctcttattcttaaagcatctttctttagaagtctgcacatattttcaaatgcatcatattaaaggcacaagttaagaggaggtggagttgcctacttcagtggcctttattcccactataccagttctcagtcttgattttgatactttctggcaactgtatcatctcttcactatcaagtattttaagaaaaagctaaggtgatttctttacatttgaacatgtgtagatcaatgagagaatggtgagggatagcaaggataaagtataatgttgaaaagtagaaagaagtggtatctgctaaactctagctttagtagcaagctattttaaggaaatcattgtatgtggtacttcctagaaatatgaaagttcctcattttgtatttaattatgtaagaaaatgttctaggaaaagaataaaaaacatatattgtcaaagtgccctttggtagtgctcccaaatggtagtaactattggtctctagtatatactcctcaaatatctttttgctatgtattaatatatctatatgtttacatatagaaatacatagtgttgtgggttttaaattttcccataaattgtgtcttacccatgtgttttgccatttgccttttctcttgccaacgtgtctaggagctctttggtaaatacagac

SEQ ID NO: 17086 - DNA, 862 bp, Homo sapiens
ggtgtgacgtaggaggaaggagacgccattagagggaggcagagagggatcgttcttcgcttttcctccggtgcctgacgtggtgggctggggcccttcattctcggactttccctcagcccttccaggcctcgcccgaggagggcgtggggacagcgcccgggtcggcggggccggggcggtgggggctgagccggccgtggctgtgaaggcgctgccgcggctgtcgggagggcggcgcgacactcgggctcgggcggccgggaagcgacgggatggctgcggccggcggcggcggcggcggggcggcggcggcgggccgagcctactcgttcaaggtggtgctgctgggggaaggctgcgtggggaagacgtcgctggtgctgcgctactgcgagaacaagtttaacgacaagcacatcaccactctgcaggcatcattcttaacaaagaagttaaatattggtgggaaaagagtaaaccttgccatatgggatacggcaggtcaagagagattccatgcattgggtccaatttactacagagattcaaatggagcgattttagtttatgacataacagatgaagattcttttcagaaggtaaaaaactgggtcaaagaattacggaaaatgttgggaaatgaaatctgtttatgtatagttggtaataaaatagacttggaaaaggagagacatgtttccattcaagaagcagagtcgtatgcagaatctgtgggagcaaaacattatcatacttcagccaaacagaacaaaggaattgaggaactctttcttgacctttgtaaaaggatgatagaaacagcctgagcaacagagccggaccctgtctcaccaaagga

SEQ ID NO: 17087 - DNA, 1239 bp, Homo sapiens
ctggcaataaatgattcttcagtgaatcatttctagtaataactaaataatatagactcttaaaattctgaggtattttgacagtgttgagttttttgggtgttgtgatagtagtaattccaacaggatttgttttaatatgtgctcttttgtatatacaggtaaaaaactgggtcaaagaattacggaaaatgttgggaaatgaaatctgtttatgtatagttggtaagcatcattacttttttctaaaaaaaaagtcctctgtttccttaatgttttattgaagacaagtaatttttgttttaaagttatatgagaaaggaagaatggcatattaatataaatattttagaataatttaggatttagcctggtgcagtggctcatgcctgtaattccagcgccttgggaggccaaagtgggtggatcacttgaggtcaggagttcaagaccagcctggtcaacatggcgaaaccctgtctctctaaaaatacaaaaaaaaaaaaaaaaaaaaaaaaaaaaaagagccgcccgaagagaggggggggtattgtgccctttgtgtcccccgcggcgcgtgtggggggagggcggagaagagggggagagaaaccgcgggggaaccgcgggagggcgcgggggggtgcagggagagccgggggtgcgcgcccccatgtgtggccccccacgccgggggcggtacaccggggagagaatctctcatcttcttcacaaaaaaacaattgcgggcgtgggcacaggggggctccagcgccctggtgtattcccccacgacactgtggggagaagtgcgagaacgggcaggggtagaaaccacatctcgtgggggacacgggaagttccaaaaacacccagggcgggtgcccaccaatctattggagtgaaaccccccggccttaattataacaagctacacaaaaatatgtacgaggcggggggtgtggggggggggaccccccttatatatatcccccagctatcattggggggaaagcgaaagaaggcgcagagggaaaaaaattccctggtaaaccacccgcggggggggtgagtcggtcttgctcggggacccccaagaaaatacccgccatttgccccctccagttgtggccacgacagagcgcgaaacggtgttctctccacaacacataacaaaaaccggggcggcacaaatattgggggggggggacacaaaggtgattgaaaggcgcaaggtgc

SEQ ID NO: 17088 - DNA, 1680 bp, Homo sapiens
ggtgtgacgtaggaggaaggagacgccattagagggaggcagagagggatcgttcttcgcttttcctccggtgcctgacgtggtgggctggggcccttcattctcggactttccctcagcccttccaggcctcgcccgaggagggcgtggggacagcgcccgggtcggcggggccggggcggtgggggctgagccggccgtggctgtgaaggcgctgccgcggctgtcgggagggcggcgcgacactcgggctcgggcggccgggaagcgacgggatggctgcggccggcggcggcggcggcggggcggcggcggcgggccgagcctactcgttcaaggtggtgctgctgggggaaggctgcgtggggaagacgtcgctggtgctgcgctactgcgagaacaagtttaacgacaagcacatcaccactctgcaggcatcattcttaacaaagaagttaaatattggtgggaaaagagtaaaccttgccatatgggatacggcaggtcaagagagattccatgcattgggtccaatttactacagagattcaaatggagcgattttagtttatgacataacagatgaagattcttttcagaaggtaaaaaactgggtcaaagaattacggaaaatgttgggaaatgaaatctgtttatgtatagttggtaagcatcattacttttttctaaaaaaaaagtcctctgtttccttaatgttttattgaagacaagtaatttttgttttaaagttatatgagaaaggaagaatggcatattaatataaatattttagaataatttaggatttagcctggtgcagtggctcatgcctgtaattccagcgccttgggaggccaaagtgggtggatcacttgaggtcaggagttcaagaccagcctggtcaacatggcgaaaccctgtctctctaaaaatacaaaaaaaaaaaaaaaaaaaaaaaaaaaaaagagccgcccgaagagaggggggggtattgtgccctttgtgtcccccgcggcgcgtgtggggggagggcggagaagagggggagagaaaccgcgggggaaccgcgggagggcgcgggggggtgcagggagagccgggggtgcgcgcccccatgtgtggccccccacgccgggggcggtacaccggggagagaatctctcatcttcttcacaaaaaaacaattgcgggcgtgggcacaggggggctccagcgccctggtgtattcccccacgacactgtggggagaagtgcgagaacgggcaggggtagaaaccacatctcgtgggggacacgggaagttccaaaaacacccagggcgggtgcccaccaatctattggagtgaaaccccccggccttaattataacaagctacacaaaaatatgtacgaggcggggggtgtggggggggggaccccccttatatatatcccccagctatcattggggggaaagcgaaagaaggcgcagagggaaaaaaattccctggtaaaccacccgcggggggggtgagtcggtcttgctcggggacccccaagaaaatacccgccatttgccccctccagttgtggccacgacagagcgcgaaacggtgttctctccacaacacataacaaaaaccggggcggcacaaatattgggggggggggacacaaaggtgattgaaaggcgcaaggtgc

SEQ ID NO: 17089 - DNA, 3436 bp, Homo sapiens
  misc_feature (2781)..(2781): n is a, c, g, or t
cgcgcggccaggccctcttagccctctgccgtttggggggcacgggtgaacctgccgccccactcccaccccgccccgccccgcccgtacagccaaatcggaagggacgagcctgccctttgaaagggttttttttcttgctcctgcggagggcgccccagccatggccctcaggagctccctagaccccgcagggactgccctccatcccggccgccggggcccgccctctgcatcccgcgggcagcctgtgtgaagcggcctcccgcagcccccggcccctcccccatggaggaggaggagggggcggtggccaaggagtggggcacgacccccgcggggcccgtctggaccgcggtgttcgactacgaggcggcgggcgacgaggagctgaccctgcggaggggcgatcgcgtccaggtgctttcccaagactgtgcggtgtccggcgacgagggctggtggaccgggcagctccccagcggccgcgtgggcgtcttccccagcaactacgtggcccccggcgcccccgctgcacccgcgggcctccagctgccccaggagatccccttccacgagctgcagctagaggagatcatcggtgtggggggctttggcaaggtctatcgggccctgtggcgtggcgaggaggtggcagtcaaggccgcccggctggaccctgagaaggacccggcagtgacagcggagcaggtgtgccaggaagcccggctctttggagccctgcagcaccccaacataattgcccttaggggcgcctgcctcaaccccccacacctctgcctagtgatggagtatgcccggggtggtgcactgagcagggtgctggcaggtcgccgggtgccacctcacgtgctggtcaactgggctgtgcaggtggcccggggcatgaactacctacacaatgatgcccctgtgcccatcatccaccgggacctcaagtccatcaacatcctgatcctggaggccatcgagaaccacaacctcgcagacacggtgctcaagatcacggacttcggcctcgcccgcgagtggcacaagaccaccaagatgagcgctgcggggacctacgcctggatggcgccggaggttatccgtctctccctcttctccaaaagcagtgatgtctggagcttcggggtgctgctgtgggagctgctgacgggggaggtcccctaccgtgagatcgacgccttggccgtggcgtatggcgtggctatgaataagctgacgctgcccattccctccacgtgccccgagccctttgcccgcctcctggaggaatgctgggacccagacccccacgggcggccagatttcggtagcatcttgaagcggcttgaagtcatcgaacagtcagccctgttccagatgccactggagtccttccactcgctgcaggaagactggaagctggagattcagcacatgtttgatgaccttcggaccaaggagaaggagcttcggagccgtgaggaggagctgctgcgggcggcacaggagcagcgcttccaggaggagcagctgcggcggcgggagcaggagctggcagaacgtgagatggacatcgtggaacgggagctgcacctgctcatgtgccagctgagccaggagaagccccgggtccgcaagcgcaagggcaacttcaagcgcagccgcctgctcaagctgcgggaaggcggcagccacatcagcctgccctctggctttgagcataagatcacagtccaggcctctccaactctggataagcggaaaggatccgatggggccagcccccctgcaagccccagcatcatcccccggctgagggccattcgcctgactcccgtggactgtggtggcagcagcagtggcagcagcagtggaggaagtgggacatggagccgcggtgggcccccaaagaaggaagaactggtcgggggcaagaagaagggacgaacgtgggggcccagctccaccctgcagaaggagcgggtgggaggagaggagaggctgaaggggctgggggaaggaagcaaacagtggtcatcaagtgcccccaacctgggcaagtcccccaaacacacacccatcgcccctggcttcgccagcctcaatgagatggaggagttcgcggaggcagaggatggaggcagcagcgtgcccccttccccctactcgaccccgtcctacctctcagtgccactgcctgccgagccctccccgggggcgcgggcgccgtgggagccgacgccgtccgcgccccccgctcggtggggacacggcgcccggcggcgctgcgacctggcgctgctaggctgcgccacgctgctgggggctgtgggcctgggcgccgacgtggccgaggcgcgcgcggccgacggtgaggagcagcggcgctggctcgacggcctcttctttccccgcgccggccgcttcccgcggggcctcagcccacccgcgcgtccccacggccgccgcgaagacgtgggccccggcctgggcctggcgccctcggccaccctcgtgtcgctgtcgtccgtgtccgactgcaactccacgcgttcactgctgcgctctgacagtgacgaggccgcaccggccgcgccctccccaccaccctccccgcccgcgcccacacccacgccctcgcccagcaccaaccccctggtggacctggagctggagagcttcaagaaggacccccgccagtcgctcacgcccacccacgtcacggctgcatgcgctgtgagccgcgggcaccggcggacgccatcgganggggcgctggggcagcgggggccgcccgagcccgcgggccatggccctggccctcgtgaccttctggacttcccccgcctgcccgacccccaggccctgttcccagcccgccgccggccccctgagttcccaggccgccccaccaccctgacctttgccccgagacctcggccggctgccagtcgcccccgcttggacccctggaaactggtctccttcggccggacactcaccatctcgcctcccagcaggccagacactccggagagccctgggccccccagcgtgcagcccacactgctggacatggacatggaggggcagaaccaagacagcacagtgcccctgtgcggggcccacggctcccactaaggcctgcccaccaccgcccgcctgggcagccatgaatgtagcgccccaggccctgccccagcccgccatgccacaaggtgggggaggccctgggcaggatgttcactctatttattggggaaggagggaggggggggacacttaacttattcctttgtaccccagggggtggagccctgtgcccaccctgcactggggggagggtgggcagggatactcagggacagggcatcatgggggatttggcacaaaatggagcattaaaggtaacccctgcccccta

SEQ ID NO: 17090 - DNA, 956 bp, Homo sapiens
cgcgcggccaggccctcttagccctctgccgtttggggggcacgggtgaacctgccgccccactcccaccccgccccgccccgcccgtacagccaaatcggaagggacgagcctgccctttgaaagggttttttttcttgctcctgcggagggcgccccagccatggccctcaggagctccctagaccccgcagggactgccctccatcccggccgccggggcccgccctctgcatcccgcgggcagcctgtgtgaagcggcctcccgcagcccccggcccctcccccatggaggaggaggagggggcggtggccaaggagtggggcacgacccccgcggggcccgtctggaccgcggtgttcgactacgaggcggcgggcgacgaggagctgaccctgcggaggggcgatcgcgtccaggtgctttcccaagactgtgcggtgtccggcgacgagggctggtggaccgggcagctccccagcggccgcgtgggcgtcttccccagcaactacgtggcccccggcgcccccgctgcacccgcgggcctccagctgccccaggagatccccttccacgagctgcagctagaggagatcatcggtgtggggggctttggcaaggtctatcgggccctgtggcgtggcgaggaggtggcagtcaaggccgcccggctggaccctgagaaggacccggcagtgacagcggagcaggtgtgccaggaagcccggctctttggagccctgcagcaccccaacataattgcccttaggggcgcctgcctcaaccccccacacctctgcctagtgatggagtatgcccggggtggtgcactgagcagggtgctggcaggtcgccgggtgccacctcacgtgctggtcaactgggctgtgcaggtggcccggggcatgaactacctacacaatgatgggtacaggggggtgcactgttctctgct

SEQ ID NO: 17091 - DNA, 3849 bp, Homo sapiens
  misc_feature (2781)..(2781): n is a, c, g, or t
cgcgcggccaggccctcttagccctctgccgtttggggggcacgggtgaacctgccgccccactcccaccccgccccgccccgcccgtacagccaaatcggaagggacgagcctgccctttgaaagggttttttttcttgctcctgcggagggcgccccagccatggccctcaggagctccctagaccccgcagggactgccctccatcccggccgccggggcccgccctctgcatcccgcgggcagcctgtgtgaagcggcctcccgcagcccccggcccctcccccatggaggaggaggagggggcggtggccaaggagtggggcacgacccccgcggggcccgtctggaccgcggtgttcgactacgaggcggcgggcgacgaggagctgaccctgcggaggggcgatcgcgtccaggtgctttcccaagactgtgcggtgtccggcgacgagggctggtggaccgggcagctccccagcggccgcgtgggcgtcttccccagcaactacgtggcccccggcgcccccgctgcacccgcgggcctccagctgccccaggagatccccttccacgagctgcagctagaggagatcatcggtgtggggggctttggcaaggtctatcgggccctgtggcgtggcgaggaggtggcagtcaaggccgcccggctggaccctgagaaggacccggcagtgacagcggagcaggtgtgccaggaagcccggctctttggagccctgcagcaccccaacataattgcccttaggggcgcctgcctcaaccccccacacctctgcctagtgatggagtatgcccggggtggtgcactgagcagggtgctggcaggtcgccgggtgccacctcacgtgctggtcaactgggctgtgcaggtggcccggggcatgaactacctacacaatgatgcccctgtgcccatcatccaccgggacctcaagtccatcaacatcctgatcctggaggccatcgagaaccacaacctcgcagacacggtgctcaagatcacggacttcggcctcgcccgcgagtggcacaagaccaccaagatgagcgctgcggggacctacgcctggatggcgccggaggttatccgtctctccctcttctccaaaagcagtgatgtctggagcttcggggtgctgctgtgggagctgctgacgggggaggtcccctaccgtgagatcgacgccttggccgtggcgtatggcgtggctatgaataagctgacgctgcccattccctccacgtgccccgagccctttgcccgcctcctggaggaatgctgggacccagacccccacgggcggccagatttcggtagcatcttgaagcggcttgaagtcatcgaacagtcagccctgttccagatgccactggagtccttccactcgctgcaggaagactggaagctggagattcagcacatgtttgatgaccttcggaccaaggagaaggagcttcggagccgtgaggaggagctgctgcgggcggcacaggagcagcgcttccaggaggagcagctgcggcggcgggagcaggagctggcagaacgtgagatggacatcgtggaacgggagctgcacctgctcatgtgccagctgagccaggagaagccccgggtccgcaagcgcaagggcaacttcaagcgcagccgcctgctcaagctgcgggaaggcggcagccacatcagcctgccctctggctttgagcataagatcacagtccaggcctctccaactctggataagcggaaaggatccgatggggccagcccccctgcaagccccagcatcatcccccggctgagggccattcgcctgactcccgtggactgtggtggcagcagcagtggcagcagcagtggaggaagtgggacatggagccgcggtgggcccccaaagaaggaagaactggtcgggggcaagaagaagggacgaacgtgggggcccagctccaccctgcagaaggagcgggtgggaggagaggagaggctgaaggggctgggggaaggaagcaaacagtggtcatcaagtgcccccaacctgggcaagtcccccaaacacacacccatcgcccctggcttcgccagcctcaatgagatggaggagttcgcggaggcagaggatggaggcagcagcgtgcccccttccccctactcgaccccgtcctacctctcagtgccactgcctgccgagccctccccgggggcgcgggcgccgtgggagccgacgccgtccgcgccccccgctcggtggggacacggcgcccggcggcgctgcgacctggcgctgctaggctgcgccacgctgctgggggctgtgggcctgggcgccgacgtggccgaggcgcgcgcggccgacggtgaggagcagcggcgctggctcgacggcctcttctttccccgcgccggccgcttcccgcggggcctcagcccacccgcgcgtccccacggccgccgcgaagacgtgggccccggcctgggcctggcgccctcggccaccctcgtgtcgctgtcgtccgtgtccgactgcaactccacgcgttcactgctgcgctctgacagtgacgaggccgcaccggccgcgccctccccaccaccctccccgcccgcgcccacacccacgccctcgcccagcaccaaccccctggtggacctggagctggagagcttcaagaaggacccccgccagtcgctcacgcccacccacgtcacggctgcatgcgctgtgagccgcgggcaccggcggacgccatcgganggggcgctggggcagcgggggccgcccgagcccgcgggccatggccctggccctcgtgaccttctggacttcccccgcctgcccgacccccaggccctgttcccagcccgccgccggccccctgagttcccaggccgccccaccaccctgacctttgccccgagacctcggccggctgccagtcgcccccgcttggacccctggaaactggtctccttcggccggacactcaccatctcgcctcccagcaggccagacactccggagagccctgggccccccagcgtgcagcccacactgctggacatggacatggaggggcagaaccaagacagcacagtgcccctgtgcggggcccacggctcccactaaggcctgcccaccaccgcccgcctgggcagccatgaatgtagcgccccaggccctgccccagcccgccatgccacaaggtgggggaggccctgggcaggatgttcactctatttattggggaaggagggaggggggggacacttaacttattcctttgtaccccagggggtggagccctgtgcccaccctgcactggggggagggtgggcagggatactcagggacagggcatcatgggggatttggcacaaaatggagcattaaaggtaacccctgccccctaaaaaaaaaaaaaaaacaaaaaaaaaaaaaaaaaaaaaaaaaaaaaaaaaaaaaaaaaagggggggggcacacaaaaaaatccccggagggggcccaccgatatgagagcgcggcaaccgggacttgtgggacaaggggtgaccacataagaggaggacacaaataaaagagcgcacgcgcgggcgcggcataaaacacgccagcactggaaaaaagcgcaacagaggaacatttggggacaggcacctcctctcgtggcggtacaccaactgtgtggaaaactactcccaagggaaataataggcgcacactgggggaaacacatacacgagaggggatatagggggttccaactggtgtaaataactgggtgtacagaatggcacacgggctgtctccaacaactttccggg

SEQ ID NO: 17092 - DNA, 3602 bp, Homo sapiens
  misc_feature (2534)..(2534): n is a, c, g, or t
cgcgcggccaggccctcttagccctctgccgtttggggggcacgggtgaacctgccgccccactcccaccccgccccgccccgcccgtacagccaaatcggaagggacgagcctgccctttgaaagggttttttttcttgctcctgcggagggcgccccagccatggccctcaggagctccctagaccccgcagggactgccctccatcccggccgccggggcccgccctctgcatcccgcgggcagcctgtgtgaagcggcctcccgcagcccccggcccctcccccatggaggaggaggagggggcggtggccaaggagtggggcacgacccccgcggggcccgtctggaccgcggtgttcgactacgaggcggcgggcgacgaggagctgaccctgcggaggggcgatcgcgtccaggtgctttcccaagactgtgcggtgtccggcgacgagggctggtggaccgggcagctccccagcggccgcgtgggcgtcttccccagcaactacgtggcccccggcgcccccgctgcacccgcgggcctccagctgccccaggagatccccttccacgagctgcagctagaggagatcatcggtgtggggggctttggcaaggtctatcgggccctgtggcgtggcgaggaggtggcagtcaaggccgcccggctggaccctgagaaggacccggcagtgacagcggagcaggtgtgccaggaagcccggctctttggagccctgcagcaccccaacataattgcccttaggggcgcctgcctcaaccccccacacctctgcctagtgatggagtatgcccggggtggtgcactgagcagggtgctggcaggtcgccgggtgccacctcacgtgctggtcaactgggctgtgcaggtggcccggggcatgaactacctacacaatgatgcccctgtgcccatcatccaccgggacctcaagtccatcaacatcctgatcctggaggccatcgagaaccacaacctcgcagacacggtgctcaagatcacggacttcggcctcgcccgcgagtggcacaagaccaccaagatgagcgctgcggggacctacgcctggatggcgccggaggttatccgtctctccctcttctccaaaagcagtgatgtctggagcttcggggtgctgctgtgggagctgctgacgggggaggtcccctaccgtgagatcgacgccttggccgtggcgtatggcgtggctatgaataagctgacgctgcccattccctccacgtgccccgagccctttgcccgcctcctggaggaatgctgggacccagacccccacgggcggccagatttcggtagcatcttgaagcggcttgaagtcatcgaacagtcagccctgttccagatgccactggagtccttccactcgctgcaggaagactggaagctggagattcagcacatgtttgatgaccttcggaccaaggagaaggctttgagcataagatcacagtccaggcctctccaactctggataagcggaaaggatccgatggggccagcccccctgcaagccccagcatcatcccccggctgagggccattcgcctgactcccgtggactgtggtggcagcagcagtggcagcagcagtggaggaagtgggacatggagccgcggtgggcccccaaagaaggaagaactggtcgggggcaagaagaagggacgaacgtgggggcccagctccaccctgcagaaggagcgggtgggaggagaggagaggctgaaggggctgggggaaggaagcaaacagtggtcatcaagtgcccccaacctgggcaagtcccccaaacacacacccatcgcccctggcttcgccagcctcaatgagatggaggagttcgcggaggcagaggatggaggcagcagcgtgcccccttccccctactcgaccccgtcctacctctcagtgccactgcctgccgagccctccccgggggcgcgggcgccgtgggagccgacgccgtccgcgccccccgctcggtggggacacggcgcccggcggcgctgcgacctggcgctgctaggctgcgccacgctgctgggggctgtgggcctgggcgccgacgtggccgaggcgcgcgcggccgacggtgaggagcagcggcgctggctcgacggcctcttctttccccgcgccggccgcttcccgcggggcctcagcccacccgcgcgtccccacggccgccgcgaagacgtgggccccggcctgggcctggcgccctcggccaccctcgtgtcgctgtcgtccgtgtccgactgcaactccacgcgttcactgctgcgctctgacagtgacgaggccgcaccggccgcgccctccccaccaccctccccgcccgcgcccacacccacgccctcgcccagcaccaaccccctggtggacctggagctggagagcttcaagaaggacccccgccagtcgctcacgcccacccacgtcacggctgcatgcgctgtgagccgcgggcaccggcggacgccatcgganggggcgctggggcagcgggggccgcccgagcccgcgggccatggccctggccctcgtgaccttctggacttcccccgcctgcccgacccccaggccctgttcccagcccgccgccggccccctgagttcccaggccgccccaccaccctgacctttgccccgagacctcggccggctgccagtcgcccccgcttggacccctggaaactggtctccttcggccggacactcaccatctcgcctcccagcaggccagacactccggagagccctgggccccccagcgtgcagcccacactgctggacatggacatggaggggcagaaccaagacagcacagtgcccctgtgcggggcccacggctcccactaaggcctgcccaccaccgcccgcctgggcagccatgaatgtagcgccccaggccctgccccagcccgccatgccacaaggtgggggaggccctgggcaggatgttcactctatttattggggaaggagggaggggggggacacttaacttattcctttgtaccccagggggtggagccctgtgcccaccctgcactggggggagggtgggcagggatactcagggacagggcatcatgggggatttggcacaaaatggagcattaaaggtaacccctgccccctaaaaaaaaaaaaaaaacaaaaaaaaaaaaaaaaaaaaaaaaaaaaaaaaaaaaaaaaaagggggggggcacacaaaaaaatccccggagggggcccaccgatatgagagcgcggcaaccgggacttgtgggacaaggggtgaccacataagaggaggacacaaataaaagagcgcacgcgcgggcgcggcataaaacacgccagcactggaaaaaagcgcaacagaggaacatttggggacaggcacctcctctcgtggcggtacaccaactgtgtggaaaactactcccaagggaaataataggcgcacactgggggaaacacatacacgagaggggatatagggggttccaactggtgtaaataactgggtgtacagaatggcacacgggctgtctccaacaactttccggg

SEQ ID NO: 17093 - DNA, 1986 bp, Homo sapiens
cgcgcggccaggccctcttagccctctgccgtttggggggcacgggtgaacctgccgccccactcccaccccgccccgccccgcccgtacagccaaatcggaagggacgagcctgccctttgaaagggttttttttcttgctcctgcggagggcgccccagccatggccctcaggagctccctagaccccgcagggactgccctccatcccggccgccggggcccgccctctgcatcccgcgggcagcctgtgtgaagcggcctcccgcagcccccggcccctcccccatggaggaggaggagggggcggtggccaaggagtggggcacgacccccgcggggcccgtctggaccgcggtgttcgactacgaggcggcgggcgacgaggagctgaccctgcggaggggcgatcgcgtccaggtgctttcccaagactgtgcggtgtccggcgacgagggctggtggaccgggcagctccccagcggccgcgtgggcgtcttccccagcaactacgtggcccccggcgcccccgctgcacccgcgggcctccagctgccccaggagatccccttccacgagctgcagctagaggagatcatcggtgtggggggctttggcaaggtctatcgggccctgtggcgtggcgaggaggtggcagtcaaggccgcccggctggaccctgagaaggacccggcagtgacagcggagcaggtgtgccaggaagcccggctctttggagccctgcagcaccccaacataattgcccttaggggcgcctgcctcaaccccccacacctctgcctagtgatggagtatgcccggggtggtgcactgagcagggtgctggcaggtcgccgggtgccacctcacgtgctggtcaactgggctgtgcaggtggcccggggcatgaactacctacacaatgatgcccctgtgcccatcatccaccgggacctcaagtccatcaacatcctgatcctggaggccatcgagaaccacaacctcgcagacacggtgctcaagatcacggacttcggcctcgcccgcgagtggcacaagaccaccaagatgagcgctgcggggacctacgcctggatggcgccggaggttatccgtctctccctcttctccaaaagcagtgatgtctggagcttcggggtgctgctgtgggagctgctgacgggggaggtcccctaccgtgagatcgacgccttggccgtggcgtatggcgtggctatgaataagctgacgctgcccattccctccacgtgccccgagccctttgcccgcctcctggaggaatgctgggacccagacccccacgggcggccagatttcggtagcatcttgaagcggcttgaagtcatcgaacagtcagccctgttccagatgccactggagtccttccactcgctgcaggaagactggaagctggagattcagcacatgtttgatgaccttcggaccaaggagaaggagcttcggagccgtgaggaggagctgctgcgggcggcacaggagcagcgcttccaggaggagcagctgcggcggcgggagcaggagctggcagaacgtgagatggacatcgtggaacgggagctgcacctgctcatgtgccagctgagccaggagaagccccgggtccgcaagcgcaagggcaacttcaagcgcagccgcctgctcaagctgcgggaaggcggcagccacatcagcctgccctctggtacccacccgtgtccccagagcgccccccaagaggctgctgggagcagccccgacctaggatttatctcttccttttctttttcaacttgtttttattgctaaatatatcgcacatagtcagtgatcagcccagtgcagtggcgagcacttgtagtcccagcctactcaggaggccaaggtgggaggatcacttgaggccagaagtttgagaccagcctgggcaacatagaccccatatttaccaataaaaacaagttgaaa

SEQ ID NO: 17094 - DNA, 3622 bp, Homo sapiens
  misc_feature (2554)..(2554): n is a, c, g, or t
cgcgcggccaggccctcttagccctctgccgtttggggggcacgggtgaacctgccgccccactcccaccccgccccgccccgcccgtacagccaaatcggaagggacgagcctgccctttgaaagggttttttttcttgctcctgcggagggcgccccagccatggccctcaggagctccctagaccccgcagggactgccctccatcccggccgccggggcccgccctctgcatcccgcgggcagcctgtgtgaagcggcctcccgcagcccccggcccctcccccatggaggaggaggagggggcggtggccaaggagtggggcacgacccccgcggggcccgtctggaccgcggtgttcgactacgaggcggcgggcgacgaggagctgaccctgcggaggggcgatcgcgtccaggtgctttcccaagactgtgcggtgtccggcgacgagggctggtggaccgggcagctccccagcggccgcgtgggcgtcttccccagcaactacgtggcccccggcgcccccgctgcacccgcgggcctccagctgccccaggagatccccttccacgagctgcagctagaggagatcatcggtgtggggggctttggcaaggtctatcgggccctgtggcgtggcgaggaggtggcagtcaaggccgcccggctggaccctgagaaggacccggcagtgacagcggagcaggtggcccggggcatgaactacctacacaatgatgcccctgtgcccatcatccaccgggacctcaagtccatcaacatcctgatcctggaggccatcgagaaccacaacctcgcagacacggtgctcaagatcacggacttcggcctcgcccgcgagtggcacaagaccaccaagatgagcgctgcggggacctacgcctggatggcgccggagcttcggggtgctgctgtgggagctgctgacgggggaggtcccctaccgtgagatcgacgccttggccgtggcgtatggcgtggctatgaataagctgacgctgcccattccctccacgtgccccgagccctttgcccgcctcctggaggaatgctgggacccagacccccacgggcggccagatttcggtagcatcttgaagcggcttgaagtcatcgaacagtcagccctgttccagatgccactggagtccttccactcgctgcaggaagactggaagctggagattcagcacatgtttgatgaccttcggaccaaggagaaggagcttcggagccgtgaggaggagctgctgcgggcggcacaggagcagcgcttccaggaggagcagctgcggcggcgggagcaggagctggcagaacgtgagatggacatcgtggaacgggagctgcacctgctcatgtgccagctgagccaggagaagccccgggtccgcaagcgcaagggcaacttcaagcgcagccgcctgctcaagctgcgggaaggcggcagccacatcagcctgccctctggctttgagcataagatcacagtccaggcctctccaactctggataagcggaaaggatccgatggggccagcccccctgcaagccccagcatcatcccccggctgagggccattcgcctgactcccgtggactgtggtggcagcagcagtggcagcagcagtggaggaagtgggacatggagccgcggtgggcccccaaagaaggaagaactggtcgggggcaagaagaagggacgaacgtgggggcccagctccaccctgcagaaggagcgggtgggaggagaggagaggctgaaggggctgggggaaggaagcaaacagtggtcatcaagtgcccccaacctgggcaagtcccccaaacacacacccatcgcccctggcttcgccagcctcaatgagatggaggagttcgcggaggcagaggatggaggcagcagcgtgcccccttccccctactcgaccccgtcctacctctcagtgccactgcctgccgagccctccccgggggcgcgggcgccgtgggagccgacgccgtccgcgccccccgctcggtggggacacggcgcccggcggcgctgcgacctggcgctgctaggctgcgccacgctgctgggggctgtgggcctgggcgccgacgtggccgaggcgcgcgcggccgacggtgaggagcagcggcgctggctcgacggcctcttctttccccgcgccggccgcttcccgcggggcctcagcccacccgcgcgtccccacggccgccgcgaagacgtgggccccggcctgggcctggcgccctcggccaccctcgtgtcgctgtcgtccgtgtccgactgcaactccacgcgttcactgctgcgctctgacagtgacgaggccgcaccggccgcgccctccccaccaccctccccgcccgcgcccacacccacgccctcgcccagcaccaaccccctggtggacctggagctggagagcttcaagaaggacccccgccagtcgctcacgcccacccacgtcacggctgcatgcgctgtgagccgcgggcaccggcggacgccatcgganggggcgctggggcagcgggggccgcccgagcccgcgggccatggccctggccctcgtgaccttctggacttcccccgcctgcccgacccccaggccctgttcccagcccgccgccggccccctgagttcccaggccgccccaccaccctgacctttgccccgagacctcggccggctgccagtcgcccccgcttggacccctggaaactggtctccttcggccggacactcaccatctcgcctcccagcaggccagacactccggagagccctgggccccccagcgtgcagcccacactgctggacatggacatggaggggcagaaccaagacagcacagtgcccctgtgcggggcccacggctcccactaaggcctgcccaccaccgcccgcctgggcagccatgaatgtagcgccccaggccctgccccagcccgccatgccacaaggtgggggaggccctgggcaggatgttcactctatttattggggaaggagggaggggggggacacttaacttattcctttgtaccccagggggtggagccctgtgcccaccctgcactggggggagggtgggcagggatactcagggacagggcatcatgggggatttggcacaaaatggagcattaaaggtaacccctgccccctaaaaaaaaaaaaaaaacaaaaaaaaaaaaaaaaaaaaaaaaaaaaaaaaaaaaaaaaaagggggggggcacacaaaaaaatccccggagggggcccaccgatatgagagcgcggcaaccgggacttgtgggacaaggggtgaccacataagaggaggacacaaataaaagagcgcacgcgcgggcgcggcataaaacacgccagcactggaaaaaagcgcaacagaggaacatttggggacaggcacctcctctcgtggcggtacaccaactgtgtggaaaactactcccaagggaaataataggcgcacactgggggaaacacatacacgagaggggatatagggggttccaactggtgtaaataactgggtgtacagaatggcacacgggctgtctccaacaactttccggg

SEQ ID NO: 17095 - DNA, 1677 bp, Homo sapiens
  misc_feature (1363)..(1363): n is a, c, g, or t
  misc_feature (1502)..(1502): n is a, c, g, or t
cgcgcggccaggccctcttagccctctgccgtttggggggcacgggtgaacctgccgccccactcccaccccgccccgccccgcccgtacagccaaatcggaagggacgagcctgccctttgaaagggttttttttcttgctcctgcggagggcgccccagccatggccctcaggagctccctagaccccgcagggactgccctccatcccggccgccggggcccgccctctgcatcccgcgggcagcctgtgtgaagcggcctcccgcagcccccggcccctcccccatggaggaggaggagggggcggtggccaaggagtggggcacgacccccgcggggcccgtctggaccgcggtgttcgactacgaggcggcgggcgacgaggagctgaccctgcggaggggcgatcgcgtccaggtgctttcccaagactgtgcggtgtccggcgacgagggctggtggaccgggcagctccccagcggccgcgtgggcgtcttccccagcaactacgtggcccccggcgcccccgctgcacccgcgggcctccagctgccccaggagatccccttccacgagctgcagctagaggagatcatcggtgtggggggctttggcaaggtctatcgggccctgtggcgtggcgaggaggtggcagtcaaggccgcccggctggaccctgagaaggacccggcagtgacagcggagcaggtgtgccaggaagcccggctctttggagccctgcagcaccccaacataattgcccttaggggcgcctgcctcaaccccccacacctctgcctagtgatggagtatgcccggggtggtgcactgagcagggtgctggcaggtcgccgggtgccacctcacgtgctggtcaactgggctgtgcaggtggcccggggcatgaactacctacacaatgatgcccctgtgcccatcatccaccgggacctcaagtccatcaacatcctgatcctggaggccatcgagaaccacaacctcgcagacacggtgctcaagatcacggacttcggcctcgcccgcgagtggcacaagaccaccaagatgagcgctgcggggacctacgcctggatggcgccggaggttatccgtctctccctcttctccaaaagcagtgatgtctggagcttcggggtgctgctgtgggagctgctgacgggggaggtcccctaccgtgagatcgacgccttggccgtggcgtatggcgtggctatgaataagctgacgctgcccattccctccacgtgccccgagccctttgcccgcctcctggagggtgagccggggccccgtgacgagggtaggctcagcttggagtggcagggacctgtgggccagnacctttccccttcacacctatccataccagtgggcccaggagtgaggaagaaggggctggaacccactggactctaaacagcctccccatggttggctccatcccccacatcccagcccttgtttgggccagggccagnagctctcaggacaacctgttaggattccttgggccctggggatttccacctttgatccttgatttcaactacccctcctcggggtgcaggtcccagggtttctctcccagcgtttcactgagtggaattggccaggagcttggctttgaatcccttcccctcagctccatagcag

SEQ ID NO: 17096 - DNA, 501 bp, Homo sapiens
cgtgggtcttggtcttgctgttggaggggtcatcgggggctgtcccttggcacaagtccccgtggggccctggccagccctgcagcggagtgatggccctctccggttgcagaggagttcgcggaggcagaggatggaggcagcagcgtgcccccttccccctactcgaccccgtcctacctctcagtgccactgcctgccgagccctccccgggggcgcgggcgccgtgggagccgacgccgtccgcgccccccgctcggtggggacacggcgcccggcggcgctgcgacctggcgctgctaggctgcgccacgctgctgggggctgtgggcctgggcgccgacgtggccgaggcgcgcgcggccgacggtgaggagcagcggcgctggctcgacggcctcttctttccccgcgccggccgcttcccgcggggcctcagcccacccgcgcgtccccacggccgccgcgaagacgtgggccccggcctgggcctggcgccc

SEQ ID NO: 17097 - DNA, 413 bp, Homo sapiens
cccacacctctgcctagtgatggagtatgcccggggtggtgcactgagcagggtgctggcaggtcgccgggtgccacctcacgtgctggtcaactgggctgtgcaggtggcccggggcatgaactacctacacaatgatgcccctgtgcccatcatccaccgggacctcaagtccatcaacagtaagtggtgtcctctccccaaaattccttccacagaacctctcaaggccaggcctaggtggtgggaaacagggtgagggacaccagatgacactgtgcctggagtgagaaggggcagcagtatgataccttcagggtgaaggtgaggtaggccttgcctgccttaagggagaaaaaggaggctcagaaaggttgaaggacttacctgcctcccaggctgcagagtcacaa

SEQ ID NO: 17098 - DNA, 566 bp, Homo sapiens
gttattttaacactacttttatcttatcaaagcaatgtatgcacgtggttgaaaagtgaaataatgctgacaaaacttctaacaagaagcactactcctgcccctgattctccccagaccagtttccagagacagtgaatcatttggactatttgagctgtttctttgattttgcctccaatttttaaatattaatttttaatgctttttcttgatttcgcctgtttcagaaattatcttttgacttcctgttttggaagttggacgtgtagctcttgccccctccacccacctaactcactacttttcctctccccttcattccaaaagacctgtttcacaatagtcagtgattatcatgtaaatgatgtttaccactgagccaagaaatgtataatattatgatgagttttttttgtttgttttgttttattttttgagacagggtcttgctctgtcacccagactggagtacagtggtgcagtcatggctcacttcatccttgacctccttggatcaaacaaccctcctgcttcaggctcctgagtagctggggctacaggcc

SEQ ID NO: 17099 - DNA, 1574 bp, Homo sapiens
atttagtttttttttttttgagacagagtcccactctgtctccaagccagcggcacgatctcggctcactgcaatctctgcctcctgggttcaagcgattcttctgccttagcctcccgagtagctgggattacaggcacacaccaccacacccagctaatttttatatttttagtagagacggggtttcaccatgttggccaggatggtcttgatctcctgacctcgtgatccacctgcctcggcctcccaaagtgctgggattataggcgtgagccactgcgccccaccttatttagtattaaagtgttctcattacttgtacacacaaatttaaatgtcttagctttacagtattgcttgctcagcgaatatatgtcatgagaaaggtctgtcagattcatacagtaaacttgagcaccaattatgtgttttgacactactgggcacaaagacaatggaaaagaaaaggtgtaacaaatcccctgtctgagattaataagccccaaggcaacaatttgggcttttgtttgttttgtcaatctgagaaatgcagtttcagaactttgataggtggtactgttagccctgatgacattcaaagtcctcatttcaaatattcaaggtagaaaattcaaaactcagttgtaaaacaaaagaattggattagcagacccttttcatgaaatgaaatcttacttagaagcctgttatgtaaagcagaaaagccaagctactctggtggttagtatctggaagccttcctactgttgtgttgtcacccacctgcactgccagtgatgcctaaggctcatcttcaagcttccaggttttaccaagcacactctgaaagtgagtctatgtattagggataacagaaggaaatcaagcaaaaacttgctctttatttacaataaactccataaggaatttgaattctaaagttaacaaatcaatgaactccatgtaaaatagtctttacatggaataatggaaaacaatcgatggtccttttcttaaaaaccaatttttccccattgtaatacctttttttttttttaagatgagatctcgctctgtttccaaggctggagtgcagtcatttccatgtagtatgtacttttcccgagtactgccatgactcacttgccattttcaaggaatagcagcccactgactcaacaccctcacagacacacccaggatcaatactttgtatccttcaatccaatcaggttgacactcattattaaccatcacaaacttctttataaattgttatggaatgagctccaatacatattgttaaagttaaaaagcaagattaaagactaccatttgtgtaaaaagggggggggattaaaatatatgtatgcatatttgcttgaataagcattaattaactcttgaaggatattgttaatattgattgcctctggggaaaagaactgggtggttggggagtaggggtgggagactttttgccatttatcttttctttatgccttttgagttttgaatcatgtgaatgaattacctattcagaaaaatacatattattttaaaaaataaca

SEQ ID NO: 17100 - DNA, 239 bp, Homo sapiens
  misc_feature (7)..(7): n is a, c, g, or t
  misc_feature (9)..(9): n is a, c, g, or t
  misc_feature (11)..(11): n is a, c, g, or t
gagaganananaaaaaaaaaaaaaaaaaaaaaaaaaaagagagagagagcgggaactgtccgaggtgctgagctggggcgggaccggaatcctcccggtagggtaccagggactgagttgggcctggggccgtgtccaaggtgccaatgatgcgggccgacagagcgggccgcactgtctgtctgtccgtctgtcccggaaagaactataaagcgctggaagcgcctgcagatggtttt

SEQ ID NO: 17101 - DNA, 2515 bp, Homo sapiens
ggcgcagctcaggattagagcagcggagccgcctagcagccaccttcccccgccagtccgcgcgcccgggccgggctaggccccccaccgccgggtcccccggggctgcagtagcagcggcgccgcccgcggctcccgctggggcctgggcgccggccccgctctgcaggatgggcacagtgctgtctctttcgcctgcctcctcggccaagggccggaggcccggcgggctgcccgaggagaagaagaaggcgccgcccgcgggggacgaggcgctggggggctacggggcgccgccagtgggcaagggcggcaaaggcgagagccgactcaagcggccgtccgtgctcatctcggcgctcacctggaagcgcctggtggccgcgtccgccaagaagaagaaaggcagcaagaaggtgacacccaagccggcatccacgggccccgaccccctggtccagcaacgcaaccgcgagaaccttctccgcaagggccgggatccccccgacggcggcggcaccgccaagcccctggcggtgccagtgcccaccgtgcccgcggctgccgccacctgcgagccaccgtcggggggcagcgcggccgctcagccgccgggctcgggcgggggaaagcctccgccgccgcctcccccagccccgcaggtggcgccgccggtgcctggcggctcgccgcggcgggtcatcgtgcaggcgtccaccggcgagctgctgcgctgtctgggcgacttcgtgtgccgacgctgctatcgcctcaaggagctgagcccgggcgagctggtgggctggttccgcggtgtggaccgctcgctgctgctgcagggctggcaagaccaggccttcattacgcctgcaaacctggtgttcgtgtacctgctgtgccgcgagtcgctgcgtggggacgagctggcgtcggccgccgagctgcaggccgccttcctcacctgcctctacctcgcctactcctacatgggcaacgagatctcctacccactcaagcccttcctcgtggagcccgacaaggagcgcttctggcagcgctgcctgcgcctcatccagcggctcagcccgcagatgctgcggctcaacgccgacccccacttcttcacgcaggtctttcaagacctcaagaacgagggcgaggccgccgccagcggcgggggcccaccgagcgggggcgcgcccgccgcctcctcggccgccagggacagctgcgcggccggaaccaagcactggactatgaacctggaccgctagggatacccaggggccgcgcccatccccccgccccagcccctgacacacactcggaccccccgggaccacaaagccaccgccgctgttaccgccgctcagcgccccggctgggcggaggaggagacgcccatgcccctcaggggaaagtggagaccgggacaccagaggccgcggtgtttggatttgctgggcgtggagtggggacggaagatgagcgcgggaaaggcactccaacctcactcttcccgtctgtctgcgcccccatttctccatttctgccggggtctcccccttcccttcagcccattccccctcggttttatccatttccttgcctcctttttgtgtcttcatttttcctcctgtctgcattcctctctctctctctccctctctctcctgttcctctctttcttcctccctctccctgcctttccattttccgttccttgggtttgtgtgtctgcatctccatcttaccccttgcctgactgtaccccgtagacccctgtttctcctcctgcacctgtgtccccatctgcccttcttgttgctcctgtcatgtgtcaccatcttccctcctgtctgccttcttcctccacttgtgtcagcttgcatttttttattcctgactgagtcaccacacccctctcccctgatcaaagggaatattagtttttaatttggatcgactgaggtgccaggagaaactgcagtcccaggtatccagacagccaccaggatggtccctcgccccacccccaccgcctctccccaccttttccaacgtgttgcatgctgggagctggggggtgtgggggaaggggctgccggcttctttcaggaggctgaggtttggaggcaaaatcaacctgggagaccaccccggccgcggcgcctcagtggacaggtgggaggaaaagaaaacttcttaccttggaggagggacatcccgcttccttatccttagcttttttgttgctcctccccactgccccttttaatttatttggttgtttgcggagggaggggggaggggggtaggctgggccgggaactgtccgaggtgctgagctggggcgggaccggaatcctcccggtagggtaccagggactgagttgggcctggggccgtgtccaaggtgccaatgatgcgggccgacagagcgggccgcactgtctgtctgtccgtctgtcccggaaagaactataaagcgctggaagcgcctgcagatggtttt

SEQ ID NO: 17102 - DNA, 1892 bp, Homo sapiens
  misc_feature (1872)..(1872): n is a, c, g, or t
ggcgcagctcaggattagagcagcggagccgcctagcagccaccttcccccgccagtccgcgcgcccgggccgggctaggccccccaccgccgggtcccccggggctgcagtagcagcggcgccgcccgcggctcccgctggggcctgggcgccggccccgctctgcaggatgggcacagtgctgtctctttcgcctgcctcctcggccaagggccggaggcccggcgggctgcccgaggagaagaagaaggcgccgcccgcgggggacgaggcgctggggggctacggggcgccgccagtgggcaagggcggcaaaggcgagagccgactcaagcggccgtccgtgctcatctcggcgctcacctggaagcgcctggtggccgcgtccgccaagaagaagaaaggcagcaagaaggtgacacccaagccggcatccacgggccccgaccccctggtccagcaacgcaaccgcgagaaccttctccgcaagggccgggatccccccgacggcggcggcaccgccaagcccctggcggtgccagtgcccaccgtgcccgcggctgccgccacctgcgagccaccgtcggggggcagcgcggccgctcagccgccgggctcgggcgggggaaagcctccgccgccgcctcccccagccccgcaggtggcgccgccggtgcctggcggctcgccgcggcgggtcatcgtgcaggcgtccaccggcgagctgctgcgctgtctgggcgacttcgtgtgccgacgctgctatcgcctcaaggagctgagcccgggcgagctggtgggctggttccgcggtgtggaccgctcgctgctgctgcagggctggcaagaccaggccttcattacgcctgcaaacctggtgttcgtgtacctgctgtgccgcgagtcgctgcgtggggacgagctggcgtcggccgccgagctgcaggccgccttcctcacctgcctctacctcgcctactcctacatgggcaacgagatctcctacccactcaagcccttcctcgtggagcccgacaaggagcgcttctggcagcgctgcctgcgcctcatccagcggctcagcccgcagatgctgcggctcaacgccgacccccacttcttcacgcaggtctttcaagacctcaagaacgagggcgaggccgccgccagcggcgggggcccaccgagcgggggcgcgcccgccgcctcctcggccgccagggacagctgcgcggccggaaccaagcactggactatgaacctggaccgctagggatacccaggggccgcgcccatccccccgccccagcccctgacacacactcggaccccccgggaccacaaagccaccgccgctgttaccgccgctcagcgccccggctgggcggaggaggagacgcccatgcccctcaggggaaagtggagaccgggacaccagaggccgcggtgtttggatttgctgggcgtggagtggggacggaagatgagcgcgggaaaggcactccaacctcactcttcccgtctgtctgcgcccccatttctccatttctgccggggtctcccccttcccttcagcccattccccctcggttttatccatttccttgcctcctttttgtgtcttcatttttcctcctgtctgcattcctctctctctctctccctctctctcctgttcctctctttcttcctccctctccctgcctttccattttccgttccttgggtttgtgtgtctgcatctccatcttaccccttgcctgactgtaccccgtagacccctgtttctcctcctgcacctgtgtccccatctgcccttcttgttgctcctgtcatgtgtcaccatcttccctcctgtcgggctagtcggntagactcctgagagtaccga

SEQ ID NO: 17103 - DNA, 1542 bp, Homo sapiens
ggcgcagctcaggattagagcagcggagccgcctagcagccaccttcccccgccagtccgcgcgcccgggccgggctaggccccccaccgccgggtcccccggggctgcagtagcagcggcgccgcccgcggctcccgctggggcctgggcgccggccccgctctgcaggatgggcacagtgctgtctctttcgcctgcctcctcggccaagggccggaggcccggcgggctgcccgaggagaagaagaaggcgccgcccgcgggggacgaggcgctggggggctacggggcgccgccagtgggcaagggcggcaaaggcgagagccgactcaagcggccgtccgtgctcatctcggcgctcacctggaagcgcctggtggccgcgtccgccaagaagaagaaaggcagcaagaaggtgacacccaagccggcatccacgggccccgaccccctggtccagcaacgcaaccgcggtgtttggatttgctgggcgtggagtggggacggaagatgagcgcgggaaaggcactccaacctcactcttcccgtctgtctgcgcccccatttctccatttctgccggggtctcccccttcccttcagcccattccccctcggttttatccatttccttgcctcctttttgtgtcttcatttttcctcctgtctgcattcctctctctctctctccctctctctcctgttcctctctttcttcctccctctccctgcctttccattttccgttccttgggtttgtgtgtctgcatctccatcttaccccttgcctgactgtaccccgtagacccctgtttctcctcctgcacctgtgtccccatctgcccttcttgttgctcctgtcatgtgtcaccatcttccctcctgtctgccttcttcctccacttgtgtcagcttgcatttttttattcctgactgagtcaccacacccctctcccctgatcaaagggaatattagtttttaatttggatcgactgaggtgccaggagaaactgcagtcccaggtatccagacagccaccaggatggtccctcgccccacccccaccgcctctccccaccttttccaacgtgttgcatgctgggagctggggggtgtgggggaaggggctgccggcttctttcaggaggctgaggtttggaggcaaaatcaacctgggagaccaccccggccgcggcgcctcagtggacaggtgggaggaaaagaaaacttcttaccttggaggagggacatcccgcttccttatccttagcttttttgttgctcctccccactgccccttttaatttatttggttgtttgcggagggaggggggaggggggtaggctgggccgggaactgtccgaggtgctgagctggggcgggaccggaatcctcccggtagggtaccagggactgagttgggcctggggccgtgtccaaggtgccaatgatgcgggccgacagagcgggccgcactgtctgtctgtccgtctgtcccggaaagaactataaagcgctggaagcgcctgcagatggtttt

SEQ ID NO: 17104 - DNA, 1007 bp, Homo sapiens
ccccgctagcccgacagcccccgactagcccgacagcccccgactagcccgacagcccccgactagcccgacagcccccgcgctctcccactccctcatgcctgtcctccccggtcccctcctcccgctcattcactcgcccctctctctctctccctctctctcctgttcctctctttcttcctccctctccctgcctttccattttccgttccttgggtttgtgtgtctgcatctccatcttaccccttgcctgactgtaccccgtagacccctgtttctcctcctgcacctgtgtccccatctgcccttcttgttgctcctgtcatgtgtcaccatcttccctcctgtctgccttcttcctccacttgtgtcagcttgcatttttttattcctgactgagtcaccacacccctctcccctgatcaaagggaatattagtttttaatttggatcgactgaggtgccaggagaaactgcagtcccaggtatccagacagccaccaggatggtccctcgccccacccccaccgcctctccccaccttttccaacgtgttgcatgctgggagctggggggtgtgggggaaggggctgccggcttctttcaggaggctgaggtttggaggcaaaatcaacctgggagaccaccccggccgcggcgcctcagtggacaggtgggaggaaaagaaaacttcttaccttggaggagggacatcccgcttccttatccttagcttttttgttgctcctccccactgccccttttaatttatttggttgtttgcggagggaggggggaggggggtaggctgggccgggaactgtccgaggtgctgagctggggcgggaccggaatcctcccggtagggtaccagggactgagttgggcctggggccgtgtccaaggtgccaatgatgcgggccgacagagcgggccgcactgtctgtctgtccgtctgtcccggaaagaactataaagcgctggaagcgcctgcagatggtttt

SEQ ID NO: 17105 - DNA, 917 bp, Homo sapiens
aagatgatttcaaataatgcattaagttagcctgctgtgttaatttcataaagctattctttttcattttattttttcaagttttcattcacttttcaaaataatggtagcatataatcacatgcaatgccaatgaatccccatattaagcttcgtacttctgtccaaatgtattgtagttgcctaatttcaaggttctaatttggaaatctgatttattttgtatgtttttatatacataccaattttaagcattatcttgcaaagtagacataggtggtgtttgatttgccataattaacttgaatttgattttgtaaccaaaatgtggctgtccacataattggagatcagtgtctttgggcttttaatggagaacaaatcacattgtgggtgttgctggtttttctgtttcacatttacttttgctctaggaagtatttccgtgagtctgatgactccataagttatgatcctcagtgttaagtaacttaggacggttgggcattacttttaatattcacttaaggcttctggtatcctttttttctgtatttttcccttaggaatttaattcgggtcttcctcaaattttacagctttaaaaaaattccatgaatgggttttcctcaacctcagaatatcataataaattacaagatatgaccccctggttcctattaccttgattaaagtggcggcaattaatttactgatgttttgtcagtgaaataaataatagcatcttatgaagtttgtgtatctctgatgaaaatgagtcatgtcagattccctctctgaagggaagttaaataaacaacatttttaaaattctttgaattctaaataaatatgctttgaaaagtgagttagggttttgtctaattgcactgaggcgagctagcttcggtgccatt

SEQ ID NO: 17106 - DNA, 633 bp, Homo sapiens
aaaaagactgggccccagcccgggccgcccttgcccacgagttgggttccaagtatttacagagaccttggggaaacgagggttttttcctcagtccgcctggcaagttcggaggtgacttcctggtctatcctggtgaccccctccgcttccacgcccattatatcgctcagtgctgggcccctgaggacaccatcccactccaagacctggttgctgctgggcgccttggaaccagcgtcagaaagaccctgctcctctgttctccgcagcctgatggtaaggtggtctacacctccctgcaatgggccagcctgcagtgaactccagagacctaggggatgtggctgtgtcggcagcaagagcctttctggatgttccccagctcttctctgggagtctagaacatcctcctacctttctccgcggttagtttttgattccaggttttcgaacactacatcttttttatgttcttccttgtttcaaagcacttattggctgtgtttttgtagttacctattttcacactgtgagcttcccgagaatggggcctgggtttgattcatctgttttctacagggtttaagtctcaggaggtctcaataaacttggtatataaatgttcatgat

SEQ ID NO: 17107 - DNA, 480 bp, Homo sapiens
gtaaattgccccttttaaaatcccttaccattagtttgccttcccacccattctaatattcctagtattagtctccaagtgtgttgctatctgtcctatgtatcttaagtaatgaagaagctcagagctaacaggtcaatttccccagcaatccttccagtgggaaaataaagagaaattacctttgtgagttgtgttttagggcatctggctcattcagcatggatttttccatttgcctgtggctgttaaccagcctgcagtgaagaggaattgcccatctgtagtcagaaaattggagtggtgacatatatttcctcccttgagtgacacagagagttccctctcatcatcaattcacttagaaggaccattttcaatagaaaaatgtacctgattcttgcccatgttcagaaagccagctaagaattctcaaacatttcatttcagttcagctttgtgactaatttccctatatgc

SEQ ID NO: 17108 - DNA, 447 bp, Homo sapiens
tcattggtagtattcatgaaattccaaattaaaatggaccaaaaaaaaatacctacctccttaccttacctaattccccaacctattagcacctttttattgtgatattccagtgctaatgaaggcatggtgaaactgatgatctcatgcatgcttttgtggcattgtaaattagtaacaatctttctggaaaggttttggcaagaggttttagttgtcataaaaatgtttatacctccaagcccactaatcccatttttgggaatctctcctgaagaggtaagttagaataagcaaagcttcattgcaactttatttgtagtaatgaataataggaagaaatcaacatattcaacaatatgaaaatgaagtaaatgaaatttcaactgaatttctttttagttgtgatttaaaacgagcaaaaaatatgagcatggaaaacaaaaa

SEQ ID NO: 17109 - DNA, 402 bp, Homo sapiens
tgaaagccctgagccccttcctcctccctttcttctacatgactggagtttggggagcacacagagccccgtgccacacccaactggctggcatttcggctcacaaaaacacctttcttggagaagcagatctaatttcctccctgtgaaaaaaacagttgtctagcactcgggcagcctctgtcgtggggcagtcagctgcttccacggtgagcacgagggtgggtaaaatctggatcaggacaagctgtgggcacatggacagtgactggcatgaaataatcattcttttcccaggtgagggctgtggtaagggcaagtggcggtgctgtgtgatgctccaggatggtttgtaaggctgagagtaactccccctccctaggcctcagtttccccatctgt

SEQ ID NO: 17110 - DNA, 299 bp, Homo sapiens
tttgattatttagttcagtaaaagcattttgagaattttaaagttgtaattgtaatcatttggttctttgttagtaattttgcttcatatattttgcattaaaatgtatttctgttatcagtgttcatctaaaatttttagctttgggagattaaaaaattaaatgtattatagaatgaatgatgaattacttattttggaagttctatagaaaatgggatactactgaatcatccctttgtcattttttcattatatatagatttatcttcttgacaatttattgtatgcattcattc

SEQ ID NO: 17111 - DNA, 343 bp, Homo sapiens
acaaataagatggtatagactcagttttcctgctcttccctgctaagtacaactctaaatcttggaattggtacaaaagacacccaaaggagaattcttgaagtttataagaagaaagtgaactgacttgggatcacagcattggaagaacaacatagtcgtagagcatcttgcatcctcccatccacctagacccggtgtttcctgaccctcccacctagcaacagagtgcaggctaggtaggttggctcattcctcccctgaatcaaatggaagtccccccgaaaacatctgccaaggccgacagcattgacaaaggggatcagttgggaactctagccct

SEQ ID NO: 17112 - DNA, 1439 bp, Homo sapiens
gcagcccgaagcagccagaccagcccctgagcctcccgggtgctggcagctgtcatggggctaccctgggggcagcctcacctagggctgcagatgctcctcctggcgttgaactgtctccggcccagcctgagcctgggtgagtgggggtcctggatggacgcgtccagccagacccaaggggctgggggccctgctggagtgattggaccctgggcgcccgcccccctccgattgggagaggcagccccagggacccccacgcccgtctccgtggctcaccttttgtcccccgtggccacagagctggtgccctacacaccacagataacagcttgggacctggaagggaaggtcacagccaccaccttctccctggagcagccgcgctgtgtcttcgatgggcttgccagcgccagcgataccgtctggctcgtggtggccttcagcaatgcctccaggggcttccagaacccggagacactggctgacattccggcctccccacagctgctgaccgatggccactacatgacgctgcccctgtctccggaccagctgccctgtggcgaccccatggcgggcagcggaggcgcccccgtgctgcgggtgggccatgaccacggctgccaccagcagcccttctgcaacgcgcccctccctggccctggaccctatcgggaagacccccggatccatcgacacctggccagggcggcgaagtggcagcatgatcgtcattacctccatcctctcttctctggccggcctcctactcttggccttcttggcagcctctaccatgcgcttctccagcctgtggtggccggaggaggccccggagcagctgcggatcggctccttcatgggcaagcgctacatgacccaccacatcccacccagcgaggccgccacactgccggtgggctgcaagcctggcctggaccccctccccagcctcagcccctagcctggcctctttgcatggggctgggggagatggggcgccgggagtgagtgcatggtgctttgtcccagctcctgcacccacaggccccctcagggctccttgcctttcccccccaccagcacaccccgtaccctgcctggaatcccagcaccagcccccctgcctctcctctgcctttctggtttctctccctctccaagcatctgtaagttgcactcaggagggtttaggggagggccatgggcaggctggtctcgtgatagtgagtgagtgctcatgggatctggttgtttagaagcatgcagcacctcctgcttcactctctctgtctctcctgctccaccatggccagaaacgtgcctgcttccccttcgccttctgccgtgattgtcagtttcttgagggctccccagccatgcttcctgtacagcctgcaaaactgtgagtcaattaaacctcttttcttcat

SEQ ID NO: 17113 - DNA, 1942 bp, Homo sapiens
gcagcccgaagcagccagaccagcccctgagcctcccgggtgctggcagctgtcatggggctaccctgggggcagcctcacctagggctgcagatgctcctcctggcgttgaactgtctccggcccagcctgagcctgggtgagtgggggtcctggatggacgcgtccagccagacccaaggggctgggggccctgctggagtgattggaccctgggcgcccgcccccctccgattgggagaggcagccccagggacccccacgcccgtctccgtggctcaccttttgtcccccgtggccacagagctggtgccctacacaccacagataacagcttgggacctggaagggaaggtcacagccaccaccttctccctggagcagccgcgctgtgtcttcgatgggcttgccagcgccagcgataccgtctggctcgtggtggccttcagcaatgcctccaggggcttccagaacccggagacactggctgacattccggcctccccacagctgctgaccgatggccactacatgacgctgcccctgtctccggaccagctgccctgtggcgaccccatggcgggcagcggaggcgcccccgtgctgcgggtgggccatgaccacggctgccaccagcagcccttctgcaacgcgcccctccctggccctggaccctatcgggaagacccccgtgaagttcctcctgatggacaccaggggctcacccagggctgagaccaagtggtcagaccccatcactctccaccaagggaagacccccggatccatcgacacctggccagggcggcgaagtggcagcatgatcgtcattacctccatcctctcttctctggccggcctcctactcttggccttcttggcagcctctaccatgcgcttctccagcctgtggtggccggaggaggccccggagcagctgcggatcggctccttcatgggcaagcgctacatgacccaccacatcccacccagcgaggccgccacactgccggtgggctgcaagcctggcctggaccccctccccagcctcagcccctagcctggcctctttgcatggggctgggggagatggggcgccgggagtgagtgcatggtgctttgtcccagctcctgcacccacaggccccctcagggctccttgcctttcccccccaccagcacaccccgtaccctgcctggaatcccagcaccagcccccctgcctctcctctgcctttctggtttctctccctctccaagcatctgtaagttgcactcaggagggtttaggggagggccatgggcaggctggatacccagtccccacctccatccccacctctgtctcacctgacctcctgcgagggaggctggagactgtgtggacaggccgccctgaccgcaagcttccagaccctgggaggaggcctgcagaggactgtgctttgcctgatgcagggagctgggcccatcctggggcctatgagacctgagccaccctccgtcccccatcccacacatcagtggctgggcggggtgaggattcagaggcatctctactgcccctgggcacagcacctttctgagagtgggactctccatggtcatctgactaccaattctggccaccacctccaaccctcttgtgcatatggatggctctagcccttatccaccccctcaagcatttattaagcatctgctgtatgctacatacagtgttagacttggggcttcaggcatagccggtcctgaccttggggagatgccttctctagacctgagacgaccacgtgtccagatgtgacctgttgctgtcgggggtctatcaggcccttagaccgtcaccccagtaggctctccaggacccaggagcctccatcacctggaaggaccctctgtgcaaaacctcaagcgtccatctgtgcacaaggccggtggt

SEQ ID NO: 17114 - DNA, 1529 bp, Homo sapiens
gcagcccgaagcagccagaccagcccctgagcctcccgggtgctggcagctgtcatggggctaccctgggggcagcctcacctagggctgcagatgctcctcctggcgttgaactgtctccggcccagcctgagcctgggtgagtgggggtcctggatggacgcgtccagccagacccaaggggctgggggccctgctggagtgattggaccctgggcgcccgcccccctccgattgggagaggcagccccagggacccccacgcccgtctccgtggctcaccttttgtcccccgtggccacagagctggtgccctacacaccacagataacagcttgggacctggaagggaaggtcacagccaccaccttctccctggagcagccgcgctgtgtcttcgatgggcttgccagcgccagcgataccgtctggctcgtggtggccttcagcaatgcctccaggggcttccagaacccggagacactggctgacattccggcctccccacagctgctgaccgatggccactacatgacgctgcccctgtctccggaccagctgccctgtggcgaccccatggcgggcagcggaggcgcccccgtgctgcgggtgggccatgaccacggctgccaccagcagcccttctgcaacgcgcccctccctggccctggaccctatcgggaagacccccgtgaagttcctcctgatggacaccaggggctcacccagggctgagaccaagtggtcagaccccatcactctccaccaagggaagacccccggatccatcgacacctggccagggcggcgaagtggcagcatgatcgtcattacctccatcctctcttctctggccggcctcctactcttggccttcttggcagcctctaccatgcgcttctccagcctgtggtggccggaggaggccccggagcagctgcggatcggctccttcatgggcaagcgctacatgacccaccacatcccacccagcgaggccgccacactgccggtgggctgcaagcctggcctggaccccctccccagcctcagcccctagcctggcctctttgcatggggctgggggagatggggcgccgggagtgagtgcatggtgctttgtcccagctcctgcacccacaggccccctcagggctccttgcctttcccccccaccagcacaccccgtaccctgcctggaatcccagcaccagcccccctgcctctcctctgcctttctggtttctctccctctccaagcatctgtaagttgcactcaggagggtttaggggagggccatgggcaggctggtctcgtgatagtgagtgagtgctcatgggatctggttgtttagaagcatgcagcacctcctgcttcactctctctgtctctcctgctccaccatggccagaaacgtgcctgcttccccttcgccttctgccgtgattgtcagtttcttgagggctccccagccatgcttcctgtacagcctgcaaaactgtgagtcaattaaacctcttttcttcat

SEQ ID NO: 17115 - DNA, 467 bp, Homo sapiens
ccccaccaagctgtttgtgatggcatcagtctcctcatttaagactgaacatttaagctgataatttagatcctgtctgcttggaggcattattattattttactgggaggctcggctaagaaggtaaaaggacacaaagccctgtagccttctcctgggagcatggattattttttcagattccctaagtgctgggagatggatgagtacattttaagggcacttggaagtaggatagaaggagtgaggtgggatctattctcctaagtaccaaggctgtagaaccataagttagggacagaggagaccactccagaacagagcattaaaaaggaacaagaggaggaatagcaaagaaaaaaatgtctcctttctgaattttgctaaatgctggccccagccccaagtggaaaaagcatgatattcttttaataaatcagctttgaaatgacttcccaaatggaaa

SEQ ID NO: 17116 - DNA, 891 bp, Homo sapiens
  misc_feature (3)..(3): n is a, c, g, or t
  misc_feature (8)..(8): n is a, c, g, or t
  misc_feature (18)..(18): n is a, c, g, or t
  misc_feature (21)..(22): n is a, c, g, or t
  misc_feature (26)..(26): n is a, c, g, or t
  misc_feature (33)..(33): n is a, c, g, or t
  misc_feature (36)..(36): n is a, c, g, or t
  misc_feature (44)..(44): n is a, c, g, or t
  misc_feature (47)..(47): n is a, c, g, or t
  misc_feature (51)..(51): n is a, c, g, or t
  misc_feature (54)..(54): n is a, c, g, or t
  misc_feature (57)..(58): n is a, c, g, or t
  misc_feature (61)..(61): n is a, c, g, or t
  misc_feature (65)..(65): n is a, c, g, or t
  misc_feature (69)..(69): n is a, c, g, or t
acncgccntccacgtgcnccnnctgnctctccnttntcgcttgnganctcnagnctnnccncggnttgnaatggaccccaactgctcctgcgccactggtaagggacgcccgggttctgtgccttgggatgccaaattcccagacaccatagagagtgtccctgggtttgaggaggtcgtattttgctatcagaggtaaaggggactcctttattggtccagtgctttcctgttggccaagctcctgagggcattttcctcctccctgttcctctatgtcagagttgagggtcctgaggctcaaggctgtcctgctccacgtcacctggttggtcacagggctgctggctgagccccaattctctaacctgactctgagctaccggattggataggagacattggataggaggggacattgcctcttccaggttcaggacagaaagtcgaagtcttcctgggccatgtctgcagcctgggactttcctttggagtagaaataggagggtgcttggttttcccagcatgaatggagaggacatggggcttctcttcctctgctctgagtgggaaaggagctctgagggctggctctgcacagagaagggggaagtggacactcattgacccactgctgtaccttctgcatctcactcaccgttcactggctttttctcttctagcaggtggctcctgcacgtgcgccggctcctgcaagtgcaaagagtgcaaatgcacctcctgcaagaagagctgctgctcctgctcccaagtacaaatagagtgacccgtaaaatccaggattttttgttttttgctacaatcttgacccctttgctacattcctttttttctgtgaaatatgtgaataataattaaacacttagactc

SEQ ID NO: 17117 - DNA, 303 bp, Homo sapiens
  misc_feature (3)..(3): n is a, c, g, or t
  misc_feature (8)..(8): n is a, c, g, or t
  misc_feature (18)..(18): n is a, c, g, or t
  misc_feature (21)..(22): n is a, c, g, or t
  misc_feature (26)..(26): n is a, c, g, or t
  misc_feature (33)..(33): n is a, c, g, or t
  misc_feature (36)..(36): n is a, c, g, or t
  misc_feature (44)..(44): n is a, c, g, or t
  misc_feature (47)..(47): n is a, c, g, or t
  misc_feature (51)..(51): n is a, c, g, or t
  misc_feature (54)..(54): n is a, c, g, or t
  misc_feature (57)..(58): n is a, c, g, or t
  misc_feature (61)..(61): n is a, c, g, or t
  misc_feature (65)..(65): n is a, c, g, or t
  misc_feature (69)..(69): n is a, c, g, or t
acncgccntccacgtgcnccnnctgnctctccnttntcgcttgnganctcnagnctnnccncggnttgnaatggaccccaactgctcctgcgccactggtggctcctgcacgtgcgccggctcctgcaagtgcaaagagtgcaaatgcacctcctgcaagaagagctgctgctcctgctcccaagtacaaatagagtgacccgtaaaatccaggattttttgttttttgctacaatcttgacccctttgctacattcctttttttctgtgaaatatgtgaataataattaaacacttagactc

SEQ ID NO: 17118 - DNA, 540 bp, Homo sapiens
gcctcacctactgtgctcctcctctttcatgaacgagccttcctgcctgtcatcacaaggcagacctcaaagcccctcttccaagcacagtaagcccaagatgtctgcctgtaggtcactcctggaactaggccaatacagagtggacacatggaataagaaattcatcacttctccggtggcctaaaggagccagcttcttaatattttctccatcatttcctgcttggtgtctgtcccaagtgtgggtaaaaagatgtaggagttctccctaatctgccatggaaacagctcagtcctctctcttaatttccagcatcatctgctgctcattgaaccctgagaggctgtccagcctcctggaggctgtctcaagcttctttgcatgatggtgggacagtgggttggctaaaaggaggttcctaaccatgtgctgtgagaaactgctgccctcagccctcagagtggctagggtcgccagagcctctgggctggttagctctagctgtgagcagcgtcatctgggatacagctctcctc

SEQ ID NO: 17119 - DNA, 378 bp, Homo sapiens
gagggagctccactcaggcctgtgccagactccgagggggagttcaaagacctaaggtcttgtctttgccccgccatgtccacaataacataacacatgtaccatctactttccctgaagttgtggttttctgttcaggttcctgattccctaattggcctgtagctcccagagcagcagatctgggctcctccccctcttctctggtgtgtaggcagtgcattgaagaacacaggtgcattggtgttagttctcagctcgtttctaatgtttaacatatacagtgtttcttgagctattactatgtgtccttacgatgcataccctgctctgatgatttccatgcattttatttccactgctatttcacagatgagg

SEQ ID NO: 17120 - DNA, 399 bp, Homo sapiens
agtgtgtccacatttacatagtctttctagctacttcaatctctcttgccacttctgccttcaaataagcttcaattttttaaaaaagacttttgactttactttcaactactgccctttgcctcatattgtgttttcaatacaattccaggaaatattaggaatgattgttttttacttcttaatcacctatatctactttcactccttcattaagtctgtttttttcctaaggtcttcattaattatttcaaacaaatctaaaggttgttgggttttttccccttagtctttattattcttgatctatcttttgcaaagaacaaagctaatgtccattttatttagtatctctttctctctctccatgtatttaatacccaagaattctttctgtcc

SEQ ID NO: 17121 - DNA, 642 bp, Homo sapiens
caccatctttaaagtgcttagggaaggagagctttggggaaagctgggaatcaagaattctacatccggcagaaatatcccacaggaatgaatgccacatgaagattattttagattttaaaagtgagaaaggaccagatgcggtagctcacacctgtaatcccagcattttgggaggccacacggcaggtggatcacttgaagccaggagttttgagaccaacctgcctgaaaccctgtctctattaaaaaaattaaatttaaaagagaaagaatttgttgccagctaccctccactagtagaaatgctgaagtaaattctttgggatgaagggaaatgatataccaagtcaaactcctgttttcaaaaaggaatgaagggaaaacttgtcttattttatcctctttatttgtttcaaatgtatatgatgttgaaagcaaaaaaaaaaaagtaacattgggtgatttatatgtagatataatacatatggcaactatatcagaaaggactgggatgggcaggtaaatagaatcatttggtgacaagttttttacatttttcataaattgtatgatattaactctgaaatgttaatatctgaaaatgtaaaggtatatttcagttcttagaacagacactta

SEQ ID NO: 17122 - DNA, 251 bp, Homo sapiens
tgaggaaggagggacagatttgtgggagacaaggtctgtgtagggcacaagaggtaggaagtgcctgtagggcatcaagtatgtggagatgtctggtattcagtttgtggttagagcttaggaaaagaggtcagacccagagataaagtctttgtctctttcccaaatcattcgtgtgatattctctctctctctctctctctctctctctctcttttttgagacggggtctctctttgtcccctgggctg

SEQ ID NO: 17123 - DNA, 778 bp, Homo sapiens
agattctaatactatatttttaccgtcctttttctatgtttagacatgcagatagcatggtgacagttgcctgcagtattcagtaccgtgctgtacagatgtgtagctaggagcagtaggttatggcacacagcctaggtgtgtagtgggtgccaccatctaggtctgtttaagtgtgctctgtgatgctcccacgacaaaatcgtccaacagcgcatttctcagaatgtacccctgtcgtcaactgatgcatggctgtaattttaagccagctgttcaaaaaagttctcaccaattagagaatttatattctcaccactttaacaaacggagttaagtaagaaacctctaaaatggttgctagaaattaaatattgtcaccgacctggtcaaaaccttttaagtaaaatgattagccaatcacagccttggcttacactggcatcagagtctggtgtgtgtcgcacacacgtgctgtaggtggaatgtttcatgacgaggactttctggaactcagaagccctttttgagtggggcccgggtagctgtaggatgggcagatctgaattcccagtacagtgtggcattttgaaaaagaaagaatgtataagaataaaagggtcagtcaagaagtaggagcaattattacccaactattcgaaggatgaccctttaaaaatcaataaaaacctatctggagtgaaagaccaacttaaatgagcaatagcatgaattacgtaatataaagacaagcgttcctgcttcaaagcacacgaaa

SEQ ID NO: 17124 - DNA, 576 bp, Homo sapiens
ggcagttaggcaggcaccagtagtatcatctgcacagttgaatactttattagccataacaatgtgcaaacaatccacacacttcatttgggatatttattccttcaggtgtaacttaagcatcttttttgactctaaacaattgagcgtattatggaaaatccttatttttctaaaccatcgtacttaacattaatgcttgtattctcaacaagcacaatattgtgaaaattggtttgggtcaggaggaggaaaaaaaaatcttagaaattgcaatggctgtgcatggtggctcattctggtaatcccagcactttaggaggccaaggtaaacagatcacctgagcccaggagttcgagaccagcttgggcaacgtggtgaagccctgttactacaaaacaaacaaacaaacacccaaaaaattagccaggcatggtagcttgcacctgtagtcccagctattcggaagactgaggtgggaggatcagttgatcccaggaaattgaggctgcagtgagctgtgatcatgcccctgcattgcagcctgggcaacagagcaagaccccatctcaaaa

SEQ ID NO: 17125 - DNA, 178 bp, Homo sapiens
gtgcctggccgctgcttggttttaaatgaatcttggatacaggtggccagactaaatggtctctcaacttgtcttcaagtttaggattttaatttttgatatttttcacttctctctggaaatttgttcaattctcaattgttgggggagtgcgcagctgcttcattatgagtttact

SEQ ID NO: 17126 - DNA, 779 bp, Homo sapiens
tcagtctcaggagttgctaagactacaggcgcacaccaccacgcccaactaattttttgtatttttagtagagatggggtttcaccacgttggccaggctggtctggaactcctagcctcaagtgatcctcccatctctgcctcccaaagtgctggaattacaggtgtaagccaccgtgcccagccctaaagagatcttttaatttcaaaagaaaaacatgtttgttggaagaaataaactaaacaaaactgtaaaaagtaaaagcccctctcctagttgttgagtttatcagtttacttaaaaaatggctgtcgcttatgcctgtaatcccagcactttgtggggctaaggcgggaggactgcttgagaccagcagtttgggaccatcctgggcaacatagcaagacccgtctctccaaaaaaaaaaaaaaaaaaaaaaaaattgccaggtgtgatggtgcacatctgtagtcccggctacaagggaggctaaggcaggaagactgcttgagcccaccagttcgaggctgctgtgagatatgatcccaccactgcacttgagcctcggtggcagtgcaaaatcctgtctctaaaaacaaaaaccaacaaaaaaaggcatcttactttctatgtggtcctgaaatttttttcaattaatgtcaatgacttttaattgttctcttggttatctaacaagaatcaatagaagacttttacaaattaaatgttatagaaaattctttaaccaactcagtttaattctaaacagcttcatgat

SEQ ID NO: 17127 - DNA, 517 bp, Homo sapiens
tagccaacagtgtcatactgtaggaaacaccgcccacaagtcttctaggcttgaattcctagcgagcttccccacatttgccaggtgcttctaagccaatgattatggagggagcatctggccctgcctgaccctagcagtggagaggtaatccaactaagttctggcgctcacatgaaatcttccccagattgggagagaagcaactgcatgtcagtgattactcatggacacaatatctggtcctgcccaagcctagcagtgaagagatgatccaactcagccctgatgctctcattatgtcttccccaaaccaggaggcagttgcaggtcagtgattacccatggaaagagcatctggccaccaccaaaccttggcgttctactctaccctagaccagtaggtaagcccaagtccacacatgtctatagggcatatcctctggccttgtccaccttgtgtggctgagtaacaaccacaaaaatctcacccagcatgggagcctgtcatacagct

SEQ ID NO: 17128 - DNA, 717 bp, Homo sapiens
atttatccatggtgtatcgtagcatactaataatagaaactggaacattatgtctcttgtgaactataggaatatttaccgtgtgttcttaatctttcatctcttgaatatttgacttttaaagattcttctgaaggcatattcaaataaaattttggaaatgtgaaaccagagaaaactatacgtacacatacatacatgtttacatatgcatacacacacatctttttttaacctattagactgtgtcaggctccatggattggtatcgttttgtaaaatgatgattactaaagagactatttaaaggaactaatgatagtctaactctaatacaggatgcctctcaagattttatacacaactttttcttgctaataatcttatattctagcactagacaaaaatgctaaattgagaccattttaagaaaatgggccaggcgcggtggctcacccctgtaatcccagcactttgggaggctgaggcgggtggatcacgaggtcagggggtcgagaccacggtgaaaccccatctctactaaaaatacaaaaaaaattcgccgggcacggtggtgggcgcttgtggtcccagctactcgggaggctgaggcaggagaatggcgtgaacccaggaggcggagcttgcagtgagctgagattgcgccattgcactccagcctgggcgacagagcaagactctgtcttaaaaaaaaaa

SEQ ID NO: 17129 - DNA, 368 bp, Homo sapiens
cagtttggttttccatccgcagagttgatttagtcagagtgtaatttgtgcaaaatgagaacatctgtaagagtcagacacctttgggttctgtctgctaaagaaaaggtttatgaatttaagagtttatttgcggccgggcgtggtggctcatgcgtgtaatcccagcactttgggaggccgaggcaggtggatcacctgaggtcaggagtttgagactaacctggccaacatgatgaaaccccatctctactaaaaatacaaaaaattagcaggacatggtggcaggcacctgtagtcccagctactggggaggctgaggcaggagaatcgcttgaacctgggaggcggatggaggttgctgtgag

SEQ ID NO: 17130 - DNA, 419 bp, Homo sapiens
cactttgggaggccgaggtgggtggatcatgaggtcaggagatcgagaccatcctgactaacacggtgaaaccccgtctctactaaaaatacaaaaattagccaggcgtggtcgcgggcgcctgtagtcccagctactcaggaggctgaggcaggagaatggcttgaacccaggaggcggagcttgcagtgagccgagatcgtgccactgcagtccagcctggacgacagagcaagactccgtctaaaaaaaaaaaaaaaaacaaaaaacaaaaagtagccaagcatggtatcacactcctgtagtcccagctactcaggtgagaggaccacttcagcccagaaaggtggtgatgctgtggtgagctgtgatggtgccactgcactctggcctaggcaacagagtgagaccctgtctcg

SEQ ID NO: 17131 - DNA, 305 bp, Homo sapiens
ttttttttttgagacaaggtctcgctcttttgtccaggctccagtacaatggtgcaatcttggctcgctgcaacttccacctcccaggctcaagcaattcttctgcctcagcctcccgagtatctgggactacaggcgtgtcaccatgccttgctataagagttggtgttttgaatagataaatcaaatcaataaaactttagctagactaagaaaaaaaagaaatctcaaaaccagaaatgaaaaaagaaacattacaactgatattacaaaaatataaagaattataagaaactactatgaac

SEQ ID NO: 17132 - DNA, 234 bp, Homo sapiens
atgggcaatgtctgtttttctacattcttagtgtaaaatatctttgtcacgctttttttcttaagaatttttttatgtgttattttcctcaatcagacagaatgtgcatccaaaatgacaaagtctcaattttttatttcaatgaaacctatgtaaatagtaacttacttaattcaccagaatcctcagtgaactggatcctgcctgcatcagactttagggaaaaaaaggaaa

SEQ ID NO: 17133 - DNA, 832 bp, Homo sapiens
  misc_feature (758)..(758): n is a, c, g, or t
  misc_feature (770)..(770): n is a, c, g, or t
tgggggtcagtgtcacctccaggatacagacagccccccttcagcccagcccagccaggtctcctacaccgccaccatgccattcggtaacacccacaacaagttcaagctgaattacaagcctgaggaggagtaccccgacctcagcaaacataacaaccacatggccaaggtactgacccttgaactctacaagaagctgcgggacaaggagactccatctggcttcactgtagacgatgtcatccagacaggagtggacaacccaggtcaccccttcatcatgaccgtgggctgcgtggctggtgatgaggagtcctacgaagttttcaaggaactctttgaccccatcatctcggatcgccacgggggctacaaacccactgacaagcacaagactgacctcaaccatgaaaacctcaagggtggagacgacctggaccccaactacgtgctcagcagccgcgtccgcactggccgcagcatcaagggctacacgttgcccccacactgctcccgtggcgagcgccgggcggtggagaagctctctgtggaagctctcaacagcctgacgggcgagttcaaagggaagtactaccctctgaagagcatgacggagaaggagcagcagcagtcatcgatgaccacttcctgttcgacaagcccgtgtcccgtgctgctggctcaggcatggccggaatggccgaagccgtgggtctggacaatgacaacaagagctcctggggggggaccagggngcaccccgggancccgggaacggggacacagggtccgcggtggaggcaaaagagcaaaaaagcgccgggaaacg

SEQ ID NO: 17134 - DNA, 832 bp, Homo sapiens
tgggggtcagtgtcacctccaggatacagacagccccccttcagcccagcccagccaggtctcctacaccgccaccatgccattcggtaacacccacaacaagttcaagctgaattacaagcctgaggaggagtaccccgacctcagcaaacataacaaccacatggccaaggtactgacccttgaactctacaagaagctgcgggacaaggagactccatctggcttcactgtagacgatgtcatccagacaggagtggacaacccaggtcaccccttcatcatgaccgtgggctgcgtggctggtgatgaggagtcctacgaagttttcaaggaactctttgaccccatcatctcggatcgccacgggggctacaaacccactgacaagcacaagactgacctcaaccatgaaaacctcaagggtggagacgacctggaccccaactacgtgctcacctgcccatccaacctgggcactgggctgcgtggaggcgtgcatgtgaagctggcgcacctgagcaagcaccccaagttcgaggagatcctcacccgcctgcgtctgcagaagaggggtacaggtggcgtggacacagctgccgtgggctcagtatttgacgtgtccaacgctgatcggctggctcgtccgaagtagaacaggtgcagctggtggtggatggtgtgaagctcatggtggaatggggagaagttggagaaggccagtccatcgagcatgatccccgagaatagggctgcaactgcacgtgcgggacccaaggggggggcaccaaattgtcaacgcgccgcacaccggggatctcccttacacgca

SEQ ID NO: 17135 - DNA, 819 bp, Homo sapiens
tgggggtcagtgtcacctccaggatacagacagccccccttcagcccagcccagccaggtctcctacaccgccaccatgccattcggtaacacccacaacaagttcaagctgaattacaagcctgaggaggagtaccccgacctcagcaaacataacaaccacatggccaaggtactgacccttgaactctacaagaagctgcgggacaaggagactccatctggcttcactgtagacgatgtcatccagacaggagtggacaacccaggtcaccccttcatcatgaccgtgggctgcgtggctggtgatgaggagtcctacgaagttttcaaggaactctttgaccccatcatctcggatcgccacgggggctacaaacccactgacaagcacaagactgacctcaaccaggagctctagttaatggagagctcccagcacactcggagctttgtgctttgtcctccacgcaaagcgaccaaaataaaagcctcgtggcccttaacaaaccaacacacaccacaacaccccaccgcgccccacacacacccccaccccccccacacacactgcgtgcggcgccgccgccccccacagacaactcctccacaacacacgttggggcgccacccccccagcgatagcaacaacggcccacgctccccaagaaacccgcccaacagccgtgctcccccacaaaaaagcgcggccccgcagcgtcgcacacccagacgcgcgcccacagccccacgacgccacgaccatacacgcaccgcgcagcaaccccacgcacacagcacacaggcccacacgccacg

SEQ ID NO: 17136 - DNA, 854 bp, Homo sapiens
tgggggtcagtgtcacctccaggatacagacagccccccttcagcccagcccagccaggtctcctacaccgccaccatgccattcggtaacacccacaacaagttcaagctgaattacaagcctgaggaggagtaccccgacctcagcaaacataacaaccacatggccaaggtactgacccttgaactctacaagaagctgcgggacaaggagactccatctggcttcactgtagacgatgtcatccagacaggagtggacaacccaggtcaccccttcatcatgaccgtgggctgcgtggctggtgatgaggagtcctacgaagttttcaaggaactctttgaccccatcatctcagaaggggggcaacatgaaggaggttttccgccgcttctgcgtagggctgcagaagattgaggagatctttaagaaagctggccaccccttcatgtggaaccagcacctgggctacgtgctcacctgcccatccaacctgggcactgggctgcgtggaggcgtgcatgtgaagctggcgcacctgagcaagcaccccaagttcgaggagatcctcacccgcctgcgtctgcagaagaggggtacaggtggcgtggacacagctgccgtgggctcagtatttgacgtgtccaacgctgatcggctggctcgtccgaagtagaacaggtgcagctggtggtggatggtgtgaagctcatggtggaatggggagaagttggagaaggccagtccatcgagcatgatccccgagaatagggctgcaactgcacgtgcgggacccaaggggggggcaccaaattgtcaacgcgccgcacaccggggatctcccttacacgca

SEQ ID NO: 17137 - DNA, 927 bp, Homo sapiens
tgggggtcagtgtcacctccaggatacagacagccccccttcagcccagcccagccaggtctcctacaccgccaccatgccattcggtaacacccacaacaagttcaagctgaattacaagcctgaggaggagtaccccgacctcagcaaacataacaaccacatggcgagcgccgggcggtggagaagctctctgtggaagctctcaacagcctgacgggcgagttcaaagggaagtactaccctctgaagagcatgacggagaaggagcagcagcagtcatcgatgaccacttcctgttcgacaagcccgtgtcccgtgctgctggctcaggcatggccggaatggccgaagccgtgggtctggacaatgacaacaagagctcctgggggggtgaacgaggaggatcacctccgggtcatctccatggagaaggggggcaacatgaaggaggttttccgccgcttctgcgtagggctgcagaagattgaggagatctttaagaaagctggccaccccttcatgtggaaccagcacctgggctacgtgctcacctgcccatccaacctgggcactgggctgcgtggaggcgtgcatgtgaagctggcgcacctgagcaagcaccccaagttcgaggagatcctcacccgcctgcgtctgcagaagaggggtacaggtggcgtggacacagctgccgtgggctcagtatttgacgtgtccaacgctgatcggctggctcgtccgaagtagaacaggtgcagctggtggtggatggtgtgaagctcatggtggaatggggagaagttggagaaggccagtccatcgagcatgatccccgagaatagggctgcaactgcacgtgcgggacccaaggggggggcaccaaattgtcaacgcgccgcacaccggggatctcccttacacgca

SEQ ID NO: 17138 - DNA, 805 bp, Homo sapiens
tgggggtcagtgtcacctccaggatacagacagccccccttcagcccagcccagccaggtctcctacaccgccaccatgccattcggtaacacccacaacaagttcaaagggaagtactaccctctgaagagcatgacggagaaggagcagcagcagtcatcgatgaccacttcctgttcgacaagcccgtgtcccgtgctgctggctcaggcatggccggaatggccgaagccgtgggtctggacaatgacaacaagagctcctgggggggtgaacgaggaggatcacctccgggtcatctccatggagaaggggggcaacatgaaggaggttttccgccgcttctgcgtagggctgcagaagattgaggagatctttaagaaagctggccaccccttcatgtggaaccagcacctgggctacgtgctcacctgcccatccaacctgggcactgggctgcgtggaggcgtgcatgtgaagctggcgcacctgagcaagcaccccaagttcgaggagatcctcacccgcctgcgtctgcagaagaggggtacaggtggcgtggacacagctgccgtgggctcagtatttgacgtgtccaacgctgatcggctggctcgtccgaagtagaacaggtgcagctggtggtggatggtgtgaagctcatggtggaatggggagaagttggagaaggccagtccatcgagcatgatccccgagaatagggctgcaactgcacgtgcgggacccaaggggggggcaccaaattgtcaacgcgccgcacaccggggatctcccttacacgca

SEQ ID NO: 17139 - DNA, 649 bp, Homo sapiens
tgggggtcagtgtcacctccaggatacagacagccccccttcagcccagcccagccaggtctcctacaccgccaccatgccattcggtaacacccacaacaagttcaagctgaattacaagcctgaggaggagtaccccgacctcagcaaacataacaaccacatggccaaggtactgacccttgaactctgcgtagggctgcagaagattgaggagatctttaagaaagctggccaccccttcatgtggaaccagcacctgggctacgtgctcacctgcccatccaacctgggcactgggctgcgtggaggcgtgcatgtgaagctggcgcacctgagcaagcaccccaagttcgaggagatcctcacccgcctgcgtctgcagaagaggggtacaggtggcgtggacacagctgccgtgggctcagtatttgacgtgtccaacgctgatcggctggctcgtccgaagtagaacaggtgcagctggtggtggatggtgtgaagctcatggtggaatggggagaagttggagaaggccagtccatcgagcatgatccccgagaatagggctgcaactgcacgtgcgggacccaaggggggggcaccaaattgtcaacgcgccgcacaccggggatctcccttacacgca

SEQ ID NO: 17140 - DNA, 1177 bp, Homo sapiens
tgggggtcagtgtcacctccaggatacagacagccccccttcagcccagcccagccaggtctcctacaccgccaccatgccattcggtaacacccacaacaagttcaagctgaattacaagcctgaggaggagtaccccgacctcagcaaacataacaaccacatggccaaggtactgacccttgaactctacaagaagctgcgggacaaggagactccatctggcttcactgtagacgatgtcatccagacaggagtggacaacccaggtcaccccttcatcatgaccgtgggctgcgtggctggtgatgaggagtcctacgaagttttcaaggaactctttgaccccatcatctcggatcgccacgggggctacaaacccactgacaagcacaagactgacctcaaccatgaaaacctcaagggtggagacgacctggaccccaactacgtgctcaacagcctgacgggcgagttcaaagggaagtactaccctctgaagagcatgacggagaaggagcagcagcagtcatcgatgaccacttcctgttcgacaagcccgtgtcccgtgctgctggctcaggcatggccggaatggccgaagccgtgggtctggacaatgacaacaagagctcctgggggggtgaacgaggaggatcacctccgggtcatctccatggagaaggggggcaacatgaaggaggttttccgccgcttctgcgtagggctgcagaagattgaggagatctttaagaaagctggccaccccttcatgtggaaccagcacctgggctacgtgctcacctgcccatccaacctgggcactgggctgcgtggaggcgtgcatgtgaagctggcgcacctgagcaagcaccccaagttcgaggagatcctcacccgcctgcgtctgcagaagaggggtacaggtggcgtggacacagctgccgtgggctcagtatttgacgtgtccaacgctgatcggctggctcgtccgaagtagaacaggtgcagctggtggtggatggtgtgaagctcatggtggaatggggagaagttggagaaggccagtccatcgagcatgatccccgagaatagggctgcaactgcacgtgcgggacccaaggggggggcaccaaattgtcaacgcgccgcacaccggggatctcccttacacgca

SEQ ID NO: 17141 - DNA, 719 bp, Homo sapiens
  misc_feature (645)..(645): n is a, c, g, or t
  misc_feature (657)..(657): n is a, c, g, or t
tgggggtcagtgtcacctccaggatacagacagccccccttcagcccagcccagccaggtctcctacaccgccaccatgccattcggtaacacccacaacaagttcaagctgaattacaagcctgaggaggagtaccccgacctcagcaaacataacaaccacatggccaaggtactgacccttgaactctacaagaagctgcgggacaaggagactccatctggcttcactgtagacgatgtcatccagacaggagtggacaacccaggtcaccccttcatcatgaccgtgggctgcgtggctggtgatgaggagtcctacgaagttttcaaggaactctttgagcagccgcgtccgcactggccgcagcatcaagggctacacgttgcccccacactgctcccgtggcgagcgccgggcggtggagaagctctctgtggaagctctcaacagcctgacgggcgagttcaaagggaagtactaccctctgaagagcatgacggagaaggagcagcagcagtcatcgatgaccacttcctgttcgacaagcccgtgtcccgtgctgctggctcaggcatggccggaatggccgaagccgtgggtctggacaatgacaacaagagctcctggggggggaccagggngcaccccgggancccgggaacggggacacagggtccgcggtggaggcaaaagagcaaaaaagcgccgggaaacg

SEQ ID NO: 17142 - DNA, 412 bp, Homo sapiens
ccagaaatccccattagccgacatctctttcataggccagattccagataatgatgtaggaatttccggttcactacacatttctacttcctaagatggggtggcttgccatttctccacccgtgaacttccaggacatgccctcctacgtctcctcctttaaatccctctgtcttcagtcccatacagaggtgagaacttctacctgttccctttgagaaccaggccgggaggaggattggaaccaattcacagtttagtaactagaattgaggtattataaacttttccaggttgcttttcctattgtttcattattattatcaaagttgatcctcactgttcaggtagttcttggcccttttgttccactcagtatttcttctgataattcagtgtgcagactttgtct

SEQ ID NO: 17143 - DNA, 279 bp, Homo sapiens
aggattttgtggctgaggcaggatcaaaggtgaactttaaaagtaaagctttattgattacctattgtaactgaagtcatctatgctaattatatatgtggattgatggggaatgtggttaaaagagaattctatacttcacactcattaggataagaaacaaaataatataaataataataaaatgcagtatattccaatattaaaaccctttctagagcattcaattatgggagccttggttaaggctcgatcttgtcttaacactgtctcaaggtt

SEQ ID NO: 17144 - DNA, 2098 bp, Homo sapiens
ggcacgagggtgagccgagattgcaccactgcactccagcctgggtgacagagcgagactccatctaaaaaaaataaataaacatgggagaaacctggaagaatatttgctcaactgtgaggcatggttggtggctaagggatcacagaatggcaggcctgcctattcctcctgagatcgttaaggaggctgaggtgccgcaggctgcgctgggcgtcccagcccaggggacaggggacaatggccacacgcctgtggaggaggaggtcgggggcatcccagtaccagcaccggggctcctgcaggtcacggagaggaggcagcctctgagcagcgtctcctctctggaggtccacttcgacctcctggacctcactgagctcaccgacatgtcggaccaggagctggccgaggtctttgctgactcggacgacgagaacctcaacaccgagtccccagcaggtctgcacccgctgccccgggccggctacctgcgctccccttcctggacgaggacaagggctgagcagagccacgagaagcagcccctaggcgaccccgagcggcaggccacagtcctggacacgtttctcactgtggagaggccccaggaggactagaccatctccacctgccccagctcctgcagggatggggtccgaacacgatggcagatctgggcagtgctgacccagcagacacacttcacccgcccacgaggctccagccgtcacctcctgacacacaccctgggggcagctctctgccagccccgagaccggccttgtctgctgggcacgggtcttcgcctcacttggagaccagccggctttcctgggggacacacggggcccccggatgcctctgggagccccagcacaagcacagcccagtggccttacgtccagctcgttcctgggccccgagtcaggaagacagcgtcacggagtcactgccaggaacgtgctgaggaatggagtggcccacggcggccttggggtgaaggggacccaggcctgtgacagccactccaggaactcctgggggtgctccaacctccgcgttttcctgtgctgccaagctcagaagccagaggcgggtttggtagtggctaatgggacaatgtgctgtccagcaaagcacacatggagaagcggccccaaaattcccaccttgatttccatcctgccccttcttctactccacggaggcgctgtctcactagggtcccctccccaaggctcagctctaagacctgcacctgcttctcttggcccctgcgtgacagacaagtccattccctccttagctcagaacaccaaatatcaccagactgcctaagagacttgatgacacctcccggaatgctctcggggtggggttcacctctccttgtcctgcacccactgctaggccacattctcgtttctgctcacatcccattgcccggctacaaggcctgcccacggcccttaaacttgctgggcaggtttggagcccatgggaccccgtgggtctctgtccaggagcagcagaggaggctgacaggccctgctccctctgctctgggggtgtctgggagccccagctcacaccctcccaatgcttatatgctgaagctcacagaatgggcttcttgcctgacagcaagtcaaagaatgagtttaatatcaaagtgtaagcttactttccatccccaagccagcctgccccctgccccatttcccatgagcacacttctggggaaggaaaacaggctcctggccttcactctcagcagagctttggagatgccccaggcatgccctgagctccttctgtgtacctgctcccacttctgagccacccgctgcccctccgcactgctggcaaacccagttcctgcctcagccaggtctccttccctggtttccagtcacacagagcccagcagctttctctttcagtcccataagggcagccttgtgtccctggccacacttccacccgccagggtcttcctccccatctttccatccttcctgctgagcttccacagagctcgtttgcaaacagggggattaaagcatcactgcgcattcgaaaaaaaaaaccacag

SEQ ID NO: 17145 - DNA, 2161 bp, Homo sapiens
  misc_feature (29)..(29): n is a, c, g, or t
  misc_feature (51)..(52): n is a, c, g, or t
  misc_feature (56)..(56): n is a, c, g, or t
  misc_feature (76)..(77): n is a, c, g, or t
ctgggggggcgccgggagggggccggggnccgggagcagctgcgcgccccnnccgncccgcggctcctccctgccnncgcggcccccggttgctgccccgatgcgctgcgcccggagccggggccgagtcgctgccgcagctgttggggcgcccgggccaggcgacgccgccgtcgcccgtgcccctcccagaccgcaccggccgcatggagcccccggagggcgccggcaccggagagatcgttaaggaggctgaggtgccgcaggctgcgctgggcgtcccagcccaggggacaggggacaatggccacacgcctgtggaggaggaggtcgggggcatcccagtaccagcaccggggctcctgcaggtcacggagaggaggcagcctctgagcagcgtctcctctctggaggtccacttcgacctcctggacctcactgagctcaccgacatgtcggaccaggagctggccgaggtctttgctgactcggacgacgagaacctcaacaccgagtccccagcaggtctgcacccgctgccccgggccggctacctgcgctccccttcctggacgaggacaagggctgagcagagccacgagaagcagcccctaggcgaccccgagcggcaggccacagtcctggacacgtttctcactgtggagaggccccaggaggactagaccatctccacctgccccagctcctgcagggatggggtccgaacacgatggcagatctgggcagtgctgacccagcagacacacttcacccgcccacgaggctccagccgtcacctcctgacacacaccctgggggcagctctctgccagccccgagaccggccttgtctgctgggcacgggtcttcgcctcacttggagaccagccggctttcctgggggacacacggggcccccggatgcctctgggagccccagcacaagcacagcccagtggccttacgtccagctcgttcctgggccccgagtcaggaagacagcgtcacggagtcactgccaggaacgtgctgaggaatggagtggcccacggcggccttggggtgaaggggacccaggcctgtgacagccactccaggaactcctgggggtgctccaacctccgcgttttcctgtgctgccaagctcagaagccagaggcgggtttggtagtggctaatgggacaatgtgctgtccagcaaagcacacatggagaagcggccccaaaattcccaccttgatttccatcctgccccttcttctactccacggaggcgctgtctcactagggtcccctccccaaggctcagctctaagacctgcacctgcttctcttggcccctgcgtgacagacaagtccattccctccttagctcagaacaccaaatatcaccagactgcctaagagacttgatgacacctcccggaatgctctcggggtggggttcacctctccttgtcctgcacccactgctaggccacattctcgtttctgctcacatcccattgcccggctacaaggcctgcccacggcccttaaacttgctgggcaggtttggagcccatgggaccccgtgggtctctgtccaggagcagcagaggaggctgacaggccctgctccctctgctctgggggtgtctgggagccccagctcacaccctcccaatgcttatatgctgaagctcacagaatgggcttcttgcctgacagcaagtcaaagaatgagtttaatatcaaagtgtaagcttactttccatccccaagccagcctgccccctgccccatttcccatgagcacacttctggggaaggaaaacaggctcctggccttcactctcagcagagctttggagatgccccaggcatgccctgagctccttctgtgtacctgctcccacttctgagccacccgctgcccctccgcactgctggcaaacccagttcctgcctcagccaggtctccttccctggtttccagtcacacagagcccagcagctttctctttcagtcccataagggcagccttgtgtccctggccacacttccacccgccagggtcttcctccccatctttccatccttcctgctgagcttccacagagctcgtttgcaaacagggggattaaagcatcactgcgcattcgaaaaaaaaaaccacag

SEQ ID NO: 17146 - DNA, 1144 bp, Homo sapiens
  misc_feature (29)..(29): n is a, c, g, or t
  misc_feature (51)..(52): n is a, c, g, or t
  misc_feature (56)..(56): n is a, c, g, or t
  misc_feature (76)..(77): n is a, c, g, or t
  misc_feature (1078)..(1078): n is a, c, g, or t
  misc_feature (1121)..(1121): n is a, c, g, or t
ctgggggggcgccgggagggggccggggnccgggagcagctgcgcgccccnnccgncccgcggctcctccctgccnncgcggcccccggttgctgccccgatgcgctgcgcccggagccggggccgagtcgctgccgcagctgttggggcgcccgggccaggcgacgccgccgtcgcccgtgcccctcccagaccgcaccggccgcatggagcccccggagggcgccggcaccggagagatcgttaaggaggctgaggtgccgcaggctgcgctgggcgtcccagcccaggggacaggggacaatggccacacgcctgtggaggaggaggtcgggggcatcccagtaccagcaccggggctcctgcaggtcacggagaggaggcagcctctgagcagcgtctcctctctggaggtccacttcgacctcctggacctcactgagctcaccgacatgtcggaccaggagctggccgaggtctttgctgactcggacgacgagaacctcaacaccgagtccccagcaggtctgcacccgctgccccgggccggctacctgcgctccccttcctggacgaggacaagggctgagcagagccacgagaagcagcccctaggcgaccccgagcggcaggccacagtcctggacacgtttctcactgtggagaggccccaggaggactagaccatctccacctgccccagctcctgcagggatggggtccgaacacgatggcagatctgggcagtgctgacccagcagacacacttcacccgcccacgaggctccagccgtcacctcctgacacacaccctgggggcagctctctgccagccccgagaccggccttgtctgctgggcacgggtcttcgcctcacttggagaccagccggctttcctgggggacacacggggcccccggatgcctctgggagccccagcacaagcacagcccagtggccttacgtccagctcgttcctgggccccgagtcaggaagacagcgtcacggagtcactgccaggaacgtgctgaggaatggagtggcccacggcggccttgggtgagggacaagctgtnaacaatcagaatctggggtgtcactcggtttctttctgcaatnaaacaaaggggttgtatgtatgg

SEQ ID NO: 17147 - DNA, 2066 bp, Homo sapiens
  misc_feature (37)..(37): n is a, c, g, or t
agcgggggtctgtcattacccagcgcgagtcaggccnctcctgtgcccctcgccagccccgaggggcgcccgcacacagtcggcgccccacacgcaagtacctggaagagaacaagaggacgccagcgggcgcggccgccaaagatcgttaaggaggctgaggtgccgcaggctgcgctgggcgtcccagcccaggggacaggggacaatggccacacgcctgtggaggaggaggtcgggggcatcccagtaccagcaccggggctcctgcaggtcacggagaggaggcagcctctgagcagcgtctcctctctggaggtccacttcgacctcctggacctcactgagctcaccgacatgtcggaccaggagctggccgaggtctttgctgactcggacgacgagaacctcaacaccgagtccccagcaggtctgcacccgctgccccgggccggctacctgcgctccccttcctggacgaggacaagggctgagcagagccacgagaagcagcccctaggcgaccccgagcggcaggccacagtcctggacacgtttctcactgtggagaggccccaggaggactagaccatctccacctgccccagctcctgcagggatggggtccgaacacgatggcagatctgggcagtgctgacccagcagacacacttcacccgcccacgaggctccagccgtcacctcctgacacacaccctgggggcagctctctgccagccccgagaccggccttgtctgctgggcacgggtcttcgcctcacttggagaccagccggctttcctgggggacacacggggcccccggatgcctctgggagccccagcacaagcacagcccagtggccttacgtccagctcgttcctgggccccgagtcaggaagacagcgtcacggagtcactgccaggaacgtgctgaggaatggagtggcccacggcggccttggggtgaaggggacccaggcctgtgacagccactccaggaactcctgggggtgctccaacctccgcgttttcctgtgctgccaagctcagaagccagaggcgggtttggtagtggctaatgggacaatgtgctgtccagcaaagcacacatggagaagcggccccaaaattcccaccttgatttccatcctgccccttcttctactccacggaggcgctgtctcactagggtcccctccccaaggctcagctctaagacctgcacctgcttctcttggcccctgcgtgacagacaagtccattccctccttagctcagaacaccaaatatcaccagactgcctaagagacttgatgacacctcccggaatgctctcggggtggggttcacctctccttgtcctgcacccactgctaggccacattctcgtttctgctcacatcccattgcccggctacaaggcctgcccacggcccttaaacttgctgggcaggtttggagcccatgggaccccgtgggtctctgtccaggagcagcagaggaggctgacaggccctgctccctctgctctgggggtgtctgggagccccagctcacaccctcccaatgcttatatgctgaagctcacagaatgggcttcttgcctgacagcaagtcaaagaatgagtttaatatcaaagtgtaagcttactttccatccccaagccagcctgccccctgccccatttcccatgagcacacttctggggaaggaaaacaggctcctggccttcactctcagcagagctttggagatgccccaggcatgccctgagctccttctgtgtacctgctcccacttctgagccacccgctgcccctccgcactgctggcaaacccagttcctgcctcagccaggtctccttccctggtttccagtcacacagagcccagcagctttctctttcagtcccataagggcagccttgtgtccctggccacacttccacccgccagggtcttcctccccatctttccatccttcctgctgagcttccacagagctcgtttgcaaacagggggattaaagcatcactgcgcattcgaaaaaaaaaaccacag

SEQ ID NO: 17148 - DNA, 1082 bp, Homo sapiens
  misc_feature (3)..(4): n is a, c, g, or t
  misc_feature (20)..(20): n is a, c, g, or t
  misc_feature (23)..(23): n is a, c, g, or t
ttnncgtttcaccccaaggncgncgtgggccactccattcctccgcgttttcctgtgctgccaagctcagaagccagaggcgggtttggtagtggctaatgggacaatgtgctgtccagcaaagcacacatggagaagcggccccaaaattcccaccttgatttccatcctgccccttcttctactccacggaggcgctgtctcactagggtcccctccccaaggctcagctctaagacctgcacctgcttctcttggcccctgcgtgacagacaagtccattccctccttagctcagaacaccaaatatcaccagactgcctaagagacttgatgacacctcccggaatgctctcggggtggggttcacctctccttgtcctgcacccactgctaggccacattctcgtttctgctcacatcccattgcccggctacaaggcctgcccacggcccttaaacttgctgggcaggtttggagcccatgggaccccgtgggtctctgtccaggagcagcagaggaggctgacaggccctgctccctctgctctgggggtgtctgggagccccagctcacaccctcccaatgcttatatgctgaagctcacagaatgggcttcttgcctgacagcaagtcaaagaatgagtttaatatcaaagtgtaagcttactttccatccccaagccagcctgccccctgccccatttcccatgagcacacttctggggaaggaaaacaggctcctggccttcactctcagcagagctttggagatgccccaggcatgccctgagctccttctgtgtacctgctcccacttctgagccacccgctgcccctccgcactgctggcaaacccagttcctgcctcagccaggtctccttccctggtttccagtcacacagagcccagcagctttctctttcagtcccataagggcagccttgtgtccctggccacacttccacccgccagggtcttcctccccatctttccatccttcctgctgagcttccacagagctcgtttgcaaacagggggattaaagcatcactgcgcattcgaaaaaaaaaaccacag

SEQ ID NO: 17149 - DNA, 628 bp, Homo sapiens
  misc_feature (128)..(128): n is a, c, g, or t
agcgccaagcaggcagggaccgagaggggtgatggcgcgcccacccctgcagagccgcctgcgcggttgtcccgcgcgtccctgccggcgaaggctgtgagaagcaccgcggggctacggcgcctccnatcctctctaacagccgcgcttaccagacagccagcctccagcgctgctaggctactccgagcaggggagaaaagacgccggtccgccggggaccaggagggagacgtgaaaccagaggcccgggggccccctctccgcctgtgcgacttgtagtctcgtaccagacgcgtccgcttcactgctgaatctgaaaacgtgggctcttgagagctgcccttggaaggagctgtgctttctgcctcatctttaacttttcgtttattcagcaaatatgtatcaagttccgacttcgtggaagagattgtgttagacactgggagtaatagaaacataattaagaagcaggggtcccggacctgaagggcctgagcgtcgggtaaggaggcaacgcttacaccgaacctgtgctgagataaataacgaacagttctggctcttagagttggcctgggggaacaaaaattcaaaaagaataaaaccccaaacaaacaggagaaaa

SEQ ID NO: 17150 - DNA, 800 bp, Homo sapiens
  misc_feature (128)..(128): n is a, c, g, or t
agcgccaagcaggcagggaccgagaggggtgatggcgcgcccacccctgcagagccgcctgcgcggttgtcccgcgcgtccctgccggcgaaggctgtgagaagcaccgcggggctacggcgcctccnatcctctctaacagccgcgcttaccagacagccagcctccagcgctgctaggctactccgagcaggggagaaaagacgccggtccgccggggaccaggagggagacgtgaaaccagaggcccgggggccccctctccgcctgtgcgacttgtagtctcgtaccagacgcgtccgcttcactgctgaatctgaaaacgtgggctcttgagagctgcccttggaaggagctgtgctttctgcctcatctttaacttttcgtttattcagcaaatatgtatcaagttccgacttcgtggaagagattgtgttagacactgggagtaatagaaacataattaagaagcaggggtcccggacctgaagggcctgagcgtcggttctgaaggctgagaagttcaagagcaagtgctggcatctgatgagggccttcttgctgtatcatcctacggtggaagggtttcactgtatctcccaggctggaatatagtggagatcatggctcactgcaaccttgacctcctgggctcaagcggtcttcacacctcagcctccccagtagctgatcctacaggttctttcaaaactggggaaatgctcatttaaactgaacaatgatgaacatcctattgggctggatcctgtacccttaggaacgctcttgttggaatacta

SEQ ID NO: 17151 - DNA, 934 bp, Homo sapiens
  misc_feature (128)..(128): n is a, c, g, or t
agcgccaagcaggcagggaccgagaggggtgatggcgcgcccacccctgcagagccgcctgcgcggttgtcccgcgcgtccctgccggcgaaggctgtgagaagcaccgcggggctacggcgcctccnatcctctctaacagccgcgcttaccagacagccagcctccagcgctgctaggctactccgagcaggggagaaaagacgccggtccgccggggaccaggagggagacgtgaaaccagaggcccgggggccccctctccgcctgtgcgacttgtagtctcgtaccagacgcgtccgcttcactgctgaatctgaaaacgtgggctcttgagagctgcccttggaaggagctgtgctttctgcctcatctttaacttttcgtttattcagcaaatatgtatcaagttccgacttcgtggaagagattgtgttagacactgggagtaatagaaacataattaagaagcaggggtcccggacctgaagggcctgagcgtcgggtaaggaggcaacgcttacaccgaacctgtgctgagataaataacgaacagttctggctcttagagttggccaaaaaaaaaaaaaaaaaaaaaaaaaaaaaaattggggggggggttggagctgagaaaaagggttttaaaacacaattgcgggggggcgcgcgggggcccaaggtgtggaacacgggacacacggggcgcaaaagggggtcccaagggaaacccggggccaaggcaacaagggaggggaggttcttacacacaattaaaaaagggcgggggggggaacaacggaggggtttttggagaaaaattccagaagggggaggttataaggagaggagaataaaagggggagtttattcacagggggggtaaaaggaagagatctcaaaatattcaaatttaagccaggagtggggggtgatg

SEQ ID NO: 17152 - DNA, 631 bp, Homo sapiens
caattaatgttagctattattatcatcataatcgttgtgttaaatatattgcccaagataatatgtgggggaatgtttgttttatatgcatattgtatcctgactgtgtgcagaacacattatgtgtattgcatatatgtaaaagaagtgtacaaggaagtggccatccttgttcaagttacgtatctagttagaacaacttcccagtccattggagttctttgagaagcctcagggaagtagctctgggtccttctaatcaacctcccattactgcgccagtaagtttctgtttcttataaataaactctttgctattcagaaaacctcaaggggcccccacattcactaagcatggggctcctaactggggtccaggtccatagagtgtaggaagaacatattagaacaatacttgtgcttatttttatctagcttttttatgtttgtgtatgttttataatggcataatagtacaatggtacatgtacataattttaaataaataaatgaatgaatgaataaataagcatatgcctggtgcatgcatgtgacaatattgtcgcaggtagggttgcattcactgaaatctggagagcactgaactggagaataaaccttccttatactc

SEQ ID NO: 17153 - DNA, 3466 bp, Homo sapiens
ggcggttgcgtgtggtgcgcgggggcgcgggctgcgtgtggcgcggggcggggcgcggctggtgcgcttgagaagcgatggcggcggcctgaactcacctaacaccgcagcagcaaccgggcccggccaggttcggcgttccgtgagtgaacgatttagaaatctggactggccagtgacctctgggcttgccattccagcctggtataacctctggctccatgggcagctactggctcctacagaccggatgaagcagactggagacacaagtggagaaaacctccagctggcaaatcctcagagtgtaggcctctggctgccagtcctgcccagcctgcctcatggagaggatgaattggctgagcagactggcctcccggggccctgggcaccgtatacctcaaggggccaatctccaaaccccagtcatggctgatcccgagacctgcctcatggtcttcaagaatcactggtcccaggtggtgcgaatcctggagcggcaaggccctcgggcagctcctgggggtgcagacgatctcagtgctgtgcgcaaccacacttaccagatgttgacactgctggcagaggaccgtgcagttccctcggcccccacaggccctgggcccctgctggagtttgctctgcacgaggatctgctgacccgtgtgttgacatggcagctgcaatgggatgagcttggggatggggtcgaggaacggcgggctgagcaactgaaactatttgaaatgctagtgagcgaagctcgccagccactgttgcggcatggtccagttcgtgaggctctgctcaccctgctggatgcctgtggccgccctgtgcccagtagcccagcactggatgaaggcttggtgctacttctcagccagctgtgtgtttgtgtggcccaggagccttcattgctcgagttcttcctgcagccacctcctgagcctggagccgctccccgtcttcttctcttttctcgccttgtcccttttgtgcatcgagagggcaccctgggccagcaggcccgtgatgccctacttcttctcatggctttgtcagctgggagccccactgtgggccgctacatcgcggatcactcttacttctgcccggtgctggccacagggctcagtgccctgtactcatcactgcctcgaaagattgaggttccaggggatgattggcactgtctgcgacgggaagactggctgggagtgccagcccttgcactcttcatgagttccctggagttctgcaatgcagtaattcaggtggctcaccccctggtgcagaagcagttggttgattatatccataatgggttcctggtgcctgtcatgggtcctgccttgcacaagacctctgtggaggagatgatcgccagtaccgcctacctggaacttttcctacggagtatctcagagcctgctttgctccgtaccttcctgcgattcctgttgttgcaccggcatgacacccacaccatcctcgacaccctcgttgctcgtattggcagtaactcccggctctgcatggtctctctgagtctcttcaggaccctcctgaacctcagctgtgaggatgtcctgctgcagctggttctcaggtatcttgttccatgtaaccacgttatgctgagccagaagccggctgttcgtgatgtggacctatatggacgagcagctgacaagtttctctccctaatcccacgctgttgtcggcaccacgcccccagcccacctcgtccagagcatgcctcatgggcacgaggtgggcctagcagagagacagggagaagggaggacatcacgggtcctggaagcccaagtgtggactcctcttctgtgacgacagtaccccggccctccacaccatctcgtctggctctcttcctgcggcagcagagcctgggtggctctgagtctccaggcccagccccttgctcaccagggctttctgcatcccccgcctccagccctggccgacggcctacccctgcagaggagcctggagagctggaagacaattacctggagtatctgcgtgaggcacgtcgtggtgtggaccgctgtgtccgagcctgccgtacctggtctgccccctatgatggcgagcggccctctcctgagcccagtccttttggctcccggactaagaaacgcagcctactgcctgaggaggacaggaacaacgtgggggaaggggaggaggaagagctggggaggagggggcgggctgggggtgcaggggagggccctggtcacctgccccctccccagctcaatggagtgccaggatcatggcctgagggggccaagaaggttcgtctggtgccaaaggagggagctggggaactgctagagggcatctccgagggcatggcaggactagagggctttgggcaggagctccgggagctagaggtggcattgagcaatgggggaactggctcagagtcccccttagaacctccactgccccttgaggaggaggaggcctacgagagcttcacctgtccccctgagccccctggccccttcctcagcagccctttgcggactctcaaccagctgccaagccagcccttcactggccccttcatggctgtgctctttgccaaactcgagaacatgctgcagaactccgtctatgtcaacttcctgctgacggggctggtggcccagctggcctgtcacccccagcccctgctccgctctttcctgctcaacaccaacatggtcttccagcccagtgtcaagtccctgctgcaggtgctgggctctgtgaagaataagattgagaactttgcggcttcccaggaggacttcccagcactgctgtccaaagccaagaagtacctcattgcccgtggcaagttggactgggctgagggccctgcagcaggacctgccccacgccgttctgatcccctagtgaagagccggaggccatccttgggggagttactcctgcggcatgcacacagtccaaccagggcccggcaggcggcacaattggtccttcagcctgggcgagacggagcaggacttggcctaagtgggggctcccctggggcttcaactccagttctactcacccggggcggggcccctgaacgccaaggtgaggctcttcgagtcaagaatgctgtctactgtgcagtcattttccctgaatttctcaaggagttggctgccatctcccaggctcatgccgtcacctcgcctttcttgttggagacttcagaggaaggatctggccctctcatctcaggctgtgggcccctcaatccttaactttcttccatggacaatcagggccatgggtggcccgggctggggctagggcacaggctcctttttatgtttggaggcagtggcaaaaggactttttaatttatttcagatgaatgttttatggagaacttgttgcaatatgtataaaagggaaatctcta

SEQ ID NO: 17154 - DNA, 3424 bp, Homo sapiens
ggcggttgcgtgtggtgcgcgggggcgcgggctgcgtgtggcgcggggcggggcgcggctggtgcgcttgagaagcgatggcggcggcctgaactcacctaacaccgcagcagcaaccgggcccggccaggttcggcgttccgtgagtgaacgatttagaaatctggactggccagtgacctctgggcttgccattccagcctggtataacctctggctccatgggcagctactggctcctacagaccggatgaagcagactggagacacaagtggagaaaacctccagctggcaaatcctcagagtgtaggcctctggctgccagtcctgcccagcctgcctcatggagaggatgaattggctgagcagactggcctcccggggccctgggcaccgtatacctcaaggggccaatctccaaaccccagtcatggctgatcccgagacctgcctcatggtcttcaagaatcactggtcccaggtggtgcgaatcctggagcggcaaggccctcgggcagctcctgggggtgcagacgatctcagtgctgtgcgcaaccacacttaccagatgttgacactgctggcagaggaccgtgcagttccctcggcccccacaggccctgggcccctgctggagtttgctctgcacgaggatctgctgacccgtgtgttgacatggcagctgcaatgggatgagcttggggatggggtcgaggaacggcgggctgagcaactgaaactatttgaaatgctagtgagcgaagctcgccagccactgttgcggcatggtccagttcgtgaggctctgctcaccctgctggatgcctgtggccgccctgtgcccagtagcccagcactggatgaaggcttggtgctacttctcagccagctgtgtgtttgtgtggcccaggagccttcattgctcgagttcttcctgcagccacctcctgagcctggagccgctccccgtcttcttctcttttctcgccttgtcccttttgtgcatcgagagggcaccctgggccagcaggcccgtgatgccctacttcttctcatggctttgtcagctgggagccccactgtgggccgctacatcgcggatcactcttacttctgcccggtgctggccacagggctcagtgccctgtactcatcactgcctcgaaagattgaggttccaggggatgattggcactgtctgcgacgggaagactggctgggagtgccagcccttgcactcttcatgagttccctggagttctgcaatgcagtaattcaggtggctcaccccctggtgcagaagcagttggttgattatatccataatgggttcctggtgcctgtcatgggtcctgccttgcacaagacctctgtggaggagatgatcgccagtaccgcctacctggaacttttcctacggagtatctcagagcctgctttgctccgtaccttcctgcgattcctgttgttgcaccggcatgacacccacaccatcctcgacaccctcgttgctcgtattggcagtaactcccggctctgcatggtctctctgagtctcttcaggaccctcctgaacctcagctgtgaggatgtcctgctgcagctggttctcaggtatcttgttccatgtaaccacgttatgctgagccagaagccggctgttcgtgatgtggacctatatggacgagcagctgacaagtttctctccctaatcccacgctgttgtcggcaccacgcccccagcccacctcgtccagagcatgcctcatgggcacgaggtcctggaagcccaagtgtggactcctcttctgtgacgacagtaccccggccctccacaccatctcgtctggctctcttcctgcggcagcagagcctgggtggctctgagtctccaggcccagccccttgctcaccagggctttctgcatcccccgcctccagccctggccgacggcctacccctgcagaggagcctggagagctggaagacaattacctggagtatctgcgtgaggcacgtcgtggtgtggaccgctgtgtccgagcctgccgtacctggtctgccccctatgatggcgagcggccctctcctgagcccagtccttttggctcccggactaagaaacgcagcctactgcctgaggaggacaggaacaacgtgggggaaggggaggaggaagagctggggaggagggggcgggctgggggtgcaggggagggccctggtcacctgccccctccccagctcaatggagtgccaggatcatggcctgagggggccaagaaggttcgtctggtgccaaaggagggagctggggaactgctagagggcatctccgagggcatggcaggactagagggctttgggcaggagctccgggagctagaggtggcattgagcaatgggggaactggctcagagtcccccttagaacctccactgccccttgaggaggaggaggcctacgagagcttcacctgtccccctgagccccctggccccttcctcagcagccctttgcggactctcaaccagctgccaagccagcccttcactggccccttcatggctgtgctctttgccaaactcgagaacatgctgcagaactccgtctatgtcaacttcctgctgacggggctggtggcccagctggcctgtcacccccagcccctgctccgctctttcctgctcaacaccaacatggtcttccagcccagtgtcaagtccctgctgcaggtgctgggctctgtgaagaataagattgagaactttgcggcttcccaggaggacttcccagcactgctgtccaaagccaagaagtacctcattgcccgtggcaagttggactgggctgagggccctgcagcaggacctgccccacgccgttctgatcccctagtgaagagccggaggccatccttgggggagttactcctgcggcatgcacacagtccaaccagggcccggcaggcggcacaattggtccttcagcctgggcgagacggagcaggacttggcctaagtgggggctcccctggggcttcaactccagttctactcacccggggcggggcccctgaacgccaaggtgaggctcttcgagtcaagaatgctgtctactgtgcagtcattttccctgaatttctcaaggagttggctgccatctcccaggctcatgccgtcacctcgcctttcttgttggagacttcagaggaaggatctggccctctcatctcaggctgtgggcccctcaatccttaactttcttccatggacaatcagggccatgggtggcccgggctggggctagggcacaggctcctttttatgtttggaggcagtggcaaaaggactttttaatttatttcagatgaatgttttatggagaacttgttgcaatatgtataaaagggaaatctcta

SEQ ID NO: 17155 - DNA, 3356 bp, Homo sapiens
ggcggttgcgtgtggtgcgcgggggcgcgggctgcgtgtggcgcggggcggggcgcggctggtgcgcttgagaagcgatggcggcggcctgaactcacctaacaccgcagcagcaaccgggcccggccaggttcggcgttccgtgagtgaacgatttagaaatctggactggccagtgacctctgggcttgccattccagcctggtataacctctggctccatgggcagctactggctcctacagaccggatgaagcagactggagacacaagtggagaaaacctccagctggcaaatcctcagagtgtaggcctctggctgccagtcctgcccagcctgcctcatggagaggatgaattggctgagcagactggcctcccggggccctgggcaccgtatacctcaaggggccaatctccaaaccccagtcatggctgatcccgagacctgcctcatggtcttcaagaatcactggtcccaggtggtgcgaatcctggagcggcaaggccctcgggcagctcctgggggtgcagacgatctcagtgctgtgcgcaaccacacttaccagatgttgacactgctggcagaggaccgtgcagttccctcggcccccacaggccctgggcccctgctggagtttgctctgcacgaggatctgctgacccgtgtgttgacatggcagctgcaatgggatgagcttggggatggggtcgaggaacggcgggctgagcaactgaaactatttgaaatgctagtgagcgaagctcgccagccactgttgcggcatggtccagttcgtgaggctctgctcaccctgctggatgcctgtggccgccctgtgcccagtagcccagcactggatgaaggcttggtgctacttctcagccagctgtgtgtttgtgtggcccaggagccttcattgctcgagttcttcctgcagccacctcctgagcctggagccgctccccgtcttcttctcttttctcgccttgtcccttttgtgcatcgagagggcaccctgggccagcaggcccgtgatgccctacttcttctcatggctttgtcagctgggagccccactgtgggccgctacatcgcggatcactcttacttctgcccggtgctggccacagggctcagtgccctgtactcatcactgcctcgaaagattgaggttccaggggatgattggcactgtctgcgacgggaagactggctgggagtgccagcccttgcactcttcatgagttccctggagttctgcaatgcagtaattcaggtggctcaccccctggtgcagaagcagttggttgattatatccataatgggttcctggtgcctgtcatgggtcctgccttgcacaagacctctgtggaggagatgatcgccagtaccgcctacctggaacttttcctacggagtatctcagagcctgctttgctccgtaccttcctgcgattcctgttgttgcaccggcatgacacccacaccatcctcgacaccctcgttgctcgtattggcagtaactcccggctctgcatggtctctctgagtctcttcaggaccctcctgaacctcagctgtgaggatgtcctgctgcagctggttctcaggtatcttgttccatgtaaccacgttatgctgagccagaagccggctgttcgtgatgtggacctatatggacgagcagctgacaagtttctctccctaatcccacgctgttgtcggcaccacgcccccagcccacctcgtccagagcatgcctcatgggcacgaggtcctggaagcccaagtgtggactcctcttctgtgacgacagtaccccggccctccacaccatctcgtctggctctcttcctgcggcagcagagcctgggtggctctgagtctccaggcccagccccttgctcaccagggctttctgcatcccccgcctccagccctggccgacggcctacccctgcagaggagcctggagagctggaagacaattacctggagtatctgcgtgaggcacgtcgtggtgtggaccgctgtgtccgagcctgccgtacctggtctgccccctatgatggcgagcggccctctcctgagcccagtccttttggctcccggactaagaaacgcagcctactgcctgaggaggacaggaacaacgtgggggaaggggaggaggaagagctggggaggagggggcgggctgggggtgcaggggagggccctggtcacctgccccctccccagctcaatggagtgccaggatcatggcctgagggggccaagaaggttcgtctggtgccaaaggagggagctggggaactgctagagggcatctccgagggcatggcaggactagagggctttgggcaggagctccgggagctagaggtggcattgagcaatgggggaactggctcagagtcccccttagaacctccactgccccttgaggaggaggaggcctacgagagcttcacctgtccccctgagccccctggccccttcctcagcagccctttgcggactctcaaccagctgccaagccagcccttcactggccccttcatggctgtgctctttgccaaactcgagaacatgctgcagaatccgctctttcctgctcaacaccaacatggtcttccagcccagtgtcaagtccctgctgcaggtgctgggctctgtgaagaataagattgagaactttgcggcttcccaggaggacttcccagcactgctgtccaaagccaagaagtacctcattgcccgtggcaagttggactgggctgagggccctgcagcaggacctgccccacgccgttctgatcccctagtgaagagccggaggccatccttgggggagttactcctgcggcatgcacacagtccaaccagggcccggcaggcggcacaattggtccttcagcctgggcgagacggagcaggacttggcctaagtgggggctcccctggggcttcaactccagttctactcacccggggcggggcccctgaacgccaaggtgaggctcttcgagtcaagaatgctgtctactgtgcagtcattttccctgaatttctcaaggagttggctgccatctcccaggctcatgccgtcacctcgcctttcttgttggagacttcagaggaaggatctggccctctcatctcaggctgtgggcccctcaatccttaactttcttccatggacaatcagggccatgggtggcccgggctggggctagggcacaggctcctttttatgtttggaggcagtggcaaaaggactttttaatttatttcagatgaatgttttatggagaacttgttgcaatatgtataaaagggaaatctcta

SEQ ID NO: 17156 - DNA, 3309 bp, Homo sapiens
ggcggttgcgtgtggtgcgcgggggcgcgggctgcgtgtggcgcggggcggggcgcggctggtgcgcttgagaagcgatggcggcggcctgaactcacctaacaccgcagcagcaaccgggcccggccaggttcggcgttccgtgagtgaacgcctggtataacctctggctccatgggcagctactggctcctacagaccggatgaagcagactggagacacaagtggagaaaacctccagctggcaaatcctcagagtgtaggcctctggctgccagtcctgcccagcctgcctcatggagaggatgaattggctgagcagactggcctcccggggccctgggcaccgtatacctcaaggggccaatctccaaaccccagtcatggctgatcccgagacctgcctcatggtcttcaagaatcactggtcccaggtggtgcgaatcctggagcggcaaggccctcgggcagctcctgggggtgcagacgatctcagtgctgtgcgcaaccacacttaccagatgttgacactgctggcagaggaccgtgcagttccctcggcccccacaggccctgggcccctgctggagtttgctctgcacgaggatctgctgacccgtgtgttgacatggcagctgcaatgggatgagcttggggatggggtcgaggaacggcgggctgagcaactgaaactatttgaaatgctagtgagcgaagctcgccagccactgttgcggcatggtccagttcgtgaggctctgctcaccctgctggatgcctgtggccgccctgtgcccagtagcccagcactggatgaaggcttggtgctacttctcagccagctgtgtgtttgtgtggcccaggagccttcattgctcgagttcttcctgcagccacctcctgagcctggagccgctccccgtcttcttctcttttctcgccttgtcccttttgtgcatcgagagggcaccctgggccagcaggcccgtgatgccctacttcttctcatggctttgtcagctgggagccccactgtgggccgctacatcgcggatcactcttacttctgcccggtgctggccacagggctcagtgccctgtactcatcactgcctcgaaagattgaggttccaggggatgattggcactgtctgcgacgggaagactggctgggagtgccagcccttgcactcttcatgagttccctggagttctgcaatgcagtaattcaggtggctcaccccctggtgcagaagcagttggttgattatatccataatgggttcctggtgcctgtcatgggtcctgccttgcacaagacctctgtggaggagatgatcgccagtaccgcctacctggaacttttcctacggagtatctcagagcctgctttgctccgtaccttcctgcgattcctgttgttgcaccggcatgacacccacaccatcctcgacaccctcgttgctcgtattggcagtaactcccggctctgcatggtctctctgagtctcttcaggaccctcctgaacctcagctgtgaggatgtcctgctgcagctggttctcaggtatcttgttccatgtaaccacgttatgctgagccagaagccggctgttcgtgatgtggacctatatggacgagcagctgacaagtttctctccctaatcccacgctgttgtcggcaccacgcccccagcccacctcgtccagagcatgcctcatgggcacgaggtcctggaagcccaagtgtggactcctcttctgtgacgacagtaccccggccctccacaccatctcgtctggctctcttcctgcggcagcagagcctgggtggctctgagtctccaggcccagccccttgctcaccagggctttctgcatcccccgcctccagccctggccgacggcctacccctgcagaggagcctggagagctggaagacaattacctggagtatctgcgtgaggcacgtcgtggtgtggaccgctgtgtccgagcctgccgtacctggtctgccccctatgatggcgagcggccctctcctgagcccagtccttttggctcccggactaagaaacgcagcctactgcctgaggaggacaggaacaacgtgggggaaggggaggaggaagagctggggaggagggggcgggctgggggtgcaggggagggccctggtcacctgccccctccccagctcaatggagtgccaggatcatggcctgagggggccaagaaggttcgtctggtgccaaaggagggagctggggaactgctagagggcatctccgagggcatggcaggactagagggctttgggcaggagctccgggagctagaggtggcattgagcaatgggggaactggctcagagtcccccttagaacctccactgccccttgaggaggaggaggcctacgagagcttcacctgtccccctgagccccctggccccttcctcagcagccctttgcggactctcaaccagctgccaagccagcccttcactggccccttcatggctgtgctctttgccaaactcgagaacatgctgcagaatccgctctttcctgctcaacaccaacatggtcttccagcccagtgtcaagtccctgctgcaggtgctgggctctgtgaagaataagattgagaactttgcggcttcccaggaggacttcccagcactgctgtccaaagccaagaagtacctcattgcccgtggcaagttggactgggctgagggccctgcagcaggacctgccccacgccgttctgatcccctagtgaagagccggaggccatccttgggggagttactcctgcggcatgcacacagtccaaccagggcccggcaggcggcacaattggtccttcagcctgggcgagacggagcaggacttggcctaagtgggggctcccctggggcttcaactccagttctactcacccggggcggggcccctgaacgccaaggtgaggctcttcgagtcaagaatgctgtctactgtgcagtcattttccctgaatttctcaaggagttggctgccatctcccaggctcatgccgtcacctcgcctttcttgttggagacttcagaggaaggatctggccctctcatctcaggctgtgggcccctcaatccttaactttcttccatggacaatcagggccatgggtggcccgggctggggctagggcacaggctcctttttatgtttggaggcagtggcaaaaggactttttaatttatttcagatgaatgttttatggagaacttgttgcaatatgtataaaagggaaatctcta

SEQ ID NO: 17157 - DNA, 3162 bp, Homo sapiens
ggcggttgcgtgtggtgcgcgggggcgcgggctgcgtgtggcgcggggcggggcgcggctggtgcgcttgagaagcgatggcggcggcctgaactcacctaacaccgcagcagcaaccgggcccggccaggttcggcgttccgtgagtgaacgatttagaaatctggactggccagtgacctctgggcttgccattccagcctggtataacctctggctccatgggcagctactggctcctacagaccggatgaagcagactggagacacaagtggagaaaacctccagctggcaaatcctcagagtgtaggcctctggctgccagtcctgcccagcctgcctcatggagaggatgaattggctgagcagactggcctcccggggccctgggcaccgtatacctcaaggggccaatctccaaaccccagtcatggctgatcccgagacctgcctcatggtcttcaagaatcactggtcccaggtggtgcgaatcctggagcggcaaggccctcgggcagctcctgggggtgcagacgatctcagtgctgtgcgcaaccacacttaccagatgttgacactgctggcagaggaccgtgcagttccctcggcccccacaggccctgggcccctgctggagtttgctctgcacgaggatctgctgacccgtgtgttgacatggcagctgcaatgggatgagcttggggatggggtcgaggaacggcgggctgagcaactgaaactatttgaaatgctagtgagcgaagctcgccagccactgttgcggcatggtccagttcgtgaggctctgctcaccctgctggatgcctgtggccgccctgtgcccagtagcccagcactggatgaaggcttggtgctacttctcagccagctgtgtgtttgtgtggcccaggagccttcattgctcgagttcttcctgcagccacctcctgagcctggagccgctccccgtcttcttctcttttctcgccttgtcccttttgtgcatcgagagggcaccctgggccagcaggcccgtgatgccctacttcttctcatggctttgtcagctgggagccccactgtgggccgctacatcgcggatcactcttacttctgcccggtgctggccacagggctcagtgccctgtactcatcactgcctcgaaagattgaggttccaggggatgattggcactgtctgcgacgggaagactggctgggagtgccagcccttgcactcttcatgagttccctggagttctgcaatgcagtaattcaggtggctcaccccctggtgcagaagcagttggttgattatatccataatgggttcctggtgcctgtcatgggtcctgccttgcacaagacctctgtggaggagatgatcgccagtaccgcctacctggaacttttcctacggagtatctcagagcctgctttgctccgtaccttcctgcgattcctgttgttgcaccggcatgacacccacaccatcctcgacaccctcgttgctcgtattggcagtaactcccggctctgcatggtctctctgagtctcttcaggaccctcctgaacctcagctgtgaggatgtcctgctgcagctggttctcaggtatcttgttccatgtaaccacgttatgctgagccagaagccggctgttcgtgatgtggacctatatggacgagcagctgacaagtttctctccctaatcccacgctgttgtcggcaccacgcccccagcccacctcgtccagagcatgcctcatgggcacgaggtcctggaagcccaagtgtggactcctcttctgtgacgacagtaccccggccctccacaccatctcgtctggctctcttcctgcggcagcagagcctgggtggctctgagtctccaggcccagccccttgctcaccagggctttctgcatcccccgcctccagccctggccgacggcctacccctgcagaggagcctggagagctggaagacaattaccaggatcatggcctgagggggccaagaaggttcgtctggtgccaaaggagggagctggggaactgctagagggcatctccgagggcatggcaggactagagggctttgggcaggagctccgggagctagaggtggcattgagcaatgggggaactggctcagagtcccccttagaacctccactgccccttgaggaggaggaggcctacgagagcttcacctgtccccctgagccccctggccccttcctcagcagccctttgcggactctcaaccagctgccaagccagcccttcactggccccttcatggctgtgctctttgccaaactcgagaacatgctgcagaactccgtctatgtcaacttcctgctgacggggctggtggcccagctggcctgtcacccccagcccctgctccgctctttcctgctcaacaccaacatggtcttccagcccagtgtcaagtccctgctgcaggtgctgggctctgtgaagaataagattgagaactttgcggcttcccaggaggacttcccagcactgctgtccaaagccaagaagtacctcattgcccgtggcaagttggactgggctgagggccctgcagcaggacctgccccacgccgttctgatcccctagtgaagagccggaggccatccttgggggagttactcctgcggcatgcacacagtccaaccagggcccggcaggcggcacaattggtccttcagcctgggcgagacggagcaggacttggcctaagtgggggctcccctggggcttcaactccagttctactcacccggggcggggcccctgaacgccaaggtgaggctcttcgagtcaagaatgctgtctactgtgcagtcattttccctgaatttctcaaggagttggctgccatctcccaggctcatgccgtcacctcgcctttcttgttggagacttcagaggaaggatctggccctctcatctcaggctgtgggcccctcaatccttaactttcttccatggacaatcagggccatgggtggcccgggctggggctagggcacaggctcctttttatgtttggaggcagtggcaaaaggactttttaatttatttcagatgaatgttttatggagaacttgttgcaatatgtataaaagggaaatctcta

SEQ ID NO: 17158 - DNA, 3447 bp, Homo sapiens
ggcggttgcgtgtggtgcgcgggggcgcgggctgcgtgtggcgcggggcggggcgcggctggtgcgcttgagaagcgatggcggcggcctgaactcacctaacaccgcagcagcaaccgggcccggccaggttcggcgttccgtgagtgaacgatttagaaatctggactggccagtgacctctgggcttgccattccagcctggtataacctctggctccatgggcagctactggctcctacagaccggatgaagcagactggagacacaagtggagaaaacctccagctggcaaatcctcagagtgtaggcctctggctgccagtcctgcccagcctgcctcatggagaggatgaattggctgagcagactggcctcccggggccctgggcaccgtatacctcaaggggccaatctccaaaccccagtcatggctgatcccgagacctgcctcatggtcttcaagaatcactggtcccaggtggtgcgaatcctggagcggcaaggccctcgggcagctcctgggggtgcagacgatctcagtgctgtgcgcaaccacacttaccagatgttgacactgctggcagaggaccgtgcagttccctcggcccccacaggccctgggcccctgctggagtttgctctgcacgaggatctgctgacccgtgtgttgacatggcagctgcaatgggatgagcttggggatggggtcgaggaacggcgggctgagcaactgaaactatttgaaatgctagtgagcgaagctcgccagccactgttgcggcatggtccagttcgtgaggctctgctcaccctgctggatgcctgtggccgccctgtgcccagtagcccagcactggatgaaggcttggtgctacttctcagccagctgtgtgtttgtgtggcccaggagccttcattgctcgagttcttcctgcagccacctcctgagcctggagccgctccccgtcttcttctcttttctcgccttgtcccttttgtgcatcgagagggcaccctgggccagcaggcccgtgatgccctacttcttctcatggctttgtcagctgggagccccactgtgggccgctacatcgcggatcactcttacttctgcccggtgctggccacagggctcagtgccctgtactcatcactgcctcgaaagattgaggttccaggggatgattggcactgtctgcgacgggaagactggctgggagtgccagcccttgcactcttcatgagttccctggagttctgcaatgcagtaattcaggtggctcaccccctggtgcagaagcagttggttgattatatccataatgggttcctggtgcctgtcatgggtcctgccttgcacaagacctctgtggaggagatgatcgccagtaccgcctacctggaacttttcctacggagtatctcagagcctgctttgctccgtaccttcctgcgattcctgttgttgcaccggcatgacacccacaccatcctcgacaccctcgttgctcgtattggcagtaactcccggctctgcatggtctctctgagtctcttcaggaccctcctgaacctcagctgtgaggatgtcctgctgcagctggttctcaggtatcttgttccatgtaaccacgttatgctgagccagaagccggctgttcgtgatgtggacctatatggacgagcagctgacaagtttctctccctaatcccacgctgttgtcggcaccacgcccccagcccacctcgtccagagcatgcctcatgggcacgaggtcctggaagcccaagtgtggactcctcttctgtgacgacagtaccccggccctccacaccatctcgtctggctctcttcctgcggcagcagagcctgggtggctctgagtctccaggcccagccccttgctcaccagggctttctgcatcccccgcctccagccctggccgacggcctacccctgcagaggagcctggagagctggaagacaattacctggagtatctgcgtgaggcacgtcgtggtgtggaccgctgtgtccgagcctgccgtacctggtctgccccctatgatggcgagcggccctctcctgagcccagtccttttggctcccggactaagaaacgcagcctactgcctgaggaggacaggaacaacgtgggggaaggggaggaggaagagctggggaggagggggcgggctgggggtgcaggggagggccctggtcacctgccccctccccagctcaatggagtgccaggatcatggcctgagggggccaagaaggttcgtctggtgccaaaggagggagctggggaactgctagagggcatctccgagggcatggcaggactagagggctttgggcaggagctccgggagctagaggtggcattgagcaatgggggaactggctcagagtcccccttagaacctccactgccccttgaggaggaggaggcctacgagagcttcacctgtccccctgagccccctggccccttcctcagcagccctttgcggactctcaaccagctgccaagccagcccttcactggccccttcatggctgtgctctttgccaaactcgagaacatgctgcagaactccgtctatgtcaacttcctgctgacggggctggtggcccagctggcctgtcacccccagcccctgctccgctctttcctgctcaacaccaacatggtcttccagcccagtgtcaagtccctgctgcaggtgtgcgatgcatgcatgcatgggtgctgggctctgtgaagaataagattgagaactttgcggcttcccaggaggacttcccagcactgctgtccaaagccaagaagtacctcattgcccgtggcaagttggactgggctgagggccctgcagcaggacctgccccacgccgttctgatcccctagtgaagagccggaggccatccttgggggagttactcctgcggcatgcacacagtccaaccagggcccggcaggcggcacaattggtccttcagcctgggcgagacggagcaggacttggcctaagtgggggctcccctggggcttcaactccagttctactcacccggggcggggcccctgaacgccaaggtgaggctcttcgagtcaagaatgctgtctactgtgcagtcattttccctgaatttctcaaggagttggctgccatctcccaggctcatgccgtcacctcgcctttcttgttggagacttcagaggaaggatctggccctctcatctcaggctgtgggcccctcaatccttaactttcttccatggacaatcagggccatgggtggcccgggctggggctagggcacaggctcctttttatgtttggaggcagtggcaaaaggactttttaatttatttcagatgaatgttttatggagaacttgttgcaatatgtataaaagggaaatctcta

SEQ ID NO: 17159 - DNA, 2081 bp, Homo sapiens
tgatagcgtgcaggttttaccacagtcttgaagtattaattgaagcttttgtctttttttcctttggtaaacttatctgagcttttcaattttttttttccaagaaacttccaggaaatgaaaggaacaggacaaaattatggggcgtcttaggactctgttaagctagagttgttttgaagctaatgctagacatgtgcacctggagtgaaaaatgttttagcatctttttcaggattcactccctcctgccctccatcattctcctgtctcaatgcatagtacagttcttagatatatactccctttccccaaaaaaatccctaatcagaaggactgtgatggttatagaggcctactgctggtgatctggcttagctgaggtcagttttcccagtggataatgctgatcctttcccttccttctctcccaccaaagagtctgtcctcagtcagtttctctgcccctgcactaagctatccttttactacatattctgttccaccgtcttggttcccagcttctgaaagacaaaactgatgtcttctctggtcctccaaatatttttttccctaactttaaattggctcacatagttactttgtctttgcaacaccatcttctagctttctttctgagcaggtttagtgttatcctccgttttttgtggaacctaattcttttggacctaattactttctcaacctatttgttcttctgttgtgcctcttgggtgaatcttttataaaaacaatatgtaattgtagcttatggttataactgaacacttaaaatttgccagatctgaggctaaatgctttatattgataactctttgatcctcttcatcaccttatgaggtaggtatattttcctattttacgaactaggaaactaaggcttggacaattttgacctgtccaaactagtaaagggcaaagccagtgaaaccagatctttcagagtccagagcctaagatctggcttgtcagcttgaatgtgtgtaaagctggcatctggaatcttgtgggtccatatggtgtctgccatcttatttcctccagaataggtggccacgggatatttaaacatacccagaggctgacatacaaatacttttcatctggtgggggtctcttgttttggggaggaatgcgtgcgatgtgcattgtgttcaggctttgtatccttgtgcccacctcccccccaacccaggccccttcatggctgtgctctttgccaaactcgagaacatgctgcagaactccgtctatgtcaacttcctgctgacggggctggtggcccagctggcctgtcacccccagcccctgctccgctctttcctgctcaacaccaacatggtcttccagcccagtgtcaagtccctgctgcaggtgctgggctctgtgaagaataagattgagaactttgcggcttcccaggaggacttcccagcactgctgtccaaagccaagaagtacctcattgcccgtggcaagttggactgggctgagggccctgcagcaggacctgccccacgccgttctgatcccctagtgaagagccggaggccatccttgggggagttactcctgcggcatgcacacagtccaaccagggcccggcaggcggcacaattggtccttcagcctgggcgagacggagcaggacttggcctaagtgggggctcccctggggcttcaactccagttctactcacccggggcggggcccctgaacgccaaggtgaggctcttcgagtcaagaatgctgtctactgtgcagtcattttccctgaatttctcaaggagttggctgccatctcccaggctcatgccgtcacctcgcctttcttgttggagacttcagaggaaggatctggccctctcatctcaggctgtgggcccctcaatccttaactttcttccatggacaatcagggccatgggtggcccgggctggggctagggcacaggctcctttttatgtttggaggcagtggcaaaaggactttttaatttatttcagatgaatgttttatggagaacttgttgcaatatgtataaaagggaaatctcta

SEQ ID NO: 17160 - DNA, 1883 bp, Homo sapiens
tataagaaagcgtcaagacacaacacccactacctaaaaaatcccaaacatatactgaactcctcacacccaattggaccaatctatcaccctatagaagaactaatgttagtataagtaacatgaaaacattctcctccgcatacgcccttagggcctactgctggtgatctggcttagctgaggtcagttttcccagtggataatgctgatcctttcccttccttctctcccaccaaagagtctgtcctcagtcagtttctctgcccctgcactaagctatccttttactacatattctgttccaccgtcttggttcccagcttctgaaagacaaaactgatgtcttctctggtcctccaaatatttttttccctaactttaaattggctcacatagttactttgtctttgcaacaccatcttctagctttctttctgagcaggtttagtgttatcctccgttttttgtggaacctaattcttttggacctaattactttctcaacctatttgttcttctgttgtgcctcttgggtgaatcttttataaaaacaatatgtaattgtagcttatggttataactgaacacttaaaatttgccagatctgaggctaaatgctttatattgataactctttgatcctcttcatcaccttatgaggtaggtatattttcctattttacgaactaggaaactaaggcttggacaattttgacctgtccaaactagtaaagggcaaagccagtgaaaccagatctttcagagtccagagcctaagatctggcttgtcagcttgaatgtgtgtaaagctggcatctggaatcttgtgggtccatatggtgtctgccatcttatttcctccagaataggtggccacgggatatttaaacatacccagaggctgacatacaaatacttttcatctggtgggggtctcttgttttggggaggaatgcgtgcgatgtgcattgtgttcaggctttgtatccttgtgcccacctcccccccaacccaggccccttcatggctgtgctctttgccaaactcgagaacatgctgcagaactccgtctatgtcaacttcctgctgacggggctggtggcccagctggcctgtcacccccagcccctgctccgctctttcctgctcaacaccaacatggtcttccagcccagtgtcaagtccctgctgcaggtgctgggctctgtgaagaataagattgagaactttgcggcttcccaggaggacttcccagcactgctgtccaaagccaagaagtacctcattgcccgtggcaagttggactgggctgagggccctgcagcaggacctgccccacgccgttctgatcccctagtgaagagccggaggccatccttgggggagttactcctgcggcatgcacacagtccaaccagggcccggcaggcggcacaattggtccttcagcctgggcgagacggagcaggacttggcctaagtgggggctcccctggggcttcaactccagttctactcacccggggcggggcccctgaacgccaaggtgaggctcttcgagtcaagaatgctgtctactgtgcagtcattttccctgaatttctcaaggagttggctgccatctcccaggctcatgccgtcacctcgcctttcttgttggagacttcagaggaaggatctggccctctcatctcaggctgtgggcccctcaatccttaactttcttccatggacaatcagggccatgggtggcccgggctggggctagggcacaggctcctttttatgtttggaggcagtggcaaaaggactttttaatttatttcagatgaatgttttatggagaacttgttgcaatatgtataaaagggaaatctcta

SEQ ID NO: 17161 - DNA, 990 bp, Homo sapiens
aacttaggcgacagcgattctaggatagtcagtagaattagaatcgtgaagatgataagtgtagagggaaggttaatggttgatattgctagggtggcgcttccaattaggtgcatgagtaggtggcctgcagtaatgttagcggttaggcgtacggccagggctattggttgaatgagtaggctgatggtttcgatacctaagttcagagccaggcctggctctgaacttaggcccagtgggactagaaaggactgtatcagtctagagctgctcagaaatgtcacgaaggtgtgcttcataggtgctgggctctgtgaagaataagattgagaactttgcggcttcccaggaggacttcccagcactgctgtccaaagccaagaagtacctcattgcccgtggcaagttggactgggctgagggccctgcagcaggacctgccccacgccgttctgatcccctagtgaagagccggaggccatccttgggggagttactcctgcggcatgcacacagtccaaccagggcccggcaggcggcacaattggtccttcagcctgggcgagacggagcaggacttggcctaagtgggggctcccctggggcttcaactccagttctactcacccggggcggggcccctgaacgccaaggtgaggctcttcgagtcaagaatgctgtctactgtgcagtcattttccctgaatttctcaaggagttggctgccatctcccaggctcatgccgtcacctcgcctttcttgttggagacttcagaggaaggatctggccctctcatctcaggctgtgggcccctcaatccttaactttcttccatggacaatcagggccatgggtggcccgggctggggctagggcacaggctcctttttatgtttggaggcagtggcaaaaggactttttaatttatttcagatgaatgttttatggagaacttgttgcaatatgtataaaagggaaatctcta

SEQ ID NO: 17162 - DNA, 3362 bp, Homo sapiens
ggcggttgcgtgtggtgcgcgggggcgcgggctgcgtgtggcgcggggcggggcgcggctggtgcgcttgagaagcgatggcggcggcctgaactcacctaacaccgcagcagcaaccgggcccggccaggttcggcgttccgtgagtgaacgatttagaaatctggactggccagtgacctctgggcttgccattccagcctggtataacctctggctccatgggcagctactggctcctacagaccggatgaagcagactggagacacaagtggagaaaacctccagctggcaaatcctcagagtgtaggcctctggctgccagtcctgcccagcctgcctcatggagaggatgaattggctgagcagactggcctcccggggccctgggcaccgtatacctcaaggggccaatctccaaaccccagtcatggctgatcccgagacctgcctcatggtcttcaagaatcactggtcccaggtggtgcgaatcctggagcggcaaggccctcgggcagctcctgggggtgcagacgatctcagtgctgtgcgcaaccacacttaccagatgttgacactgctggcagaggaccgtgcagttccctcggcccccacaggccctgggcccctgctggagtttgctctgcacgaggatctgctgacccgtgtgttgacatggcagctgcaatgggatgagcttggggatggggtcgaggaacggcgggctgagcaactgaaactatttgaaatgctagtgagcgaagctcgccagccactgttgcggcatggtccagttcgtgaggctctgctcaccctgctggatgcctgtggccgccctgtgcccagtagcccagcactggatgaaggcttggtgctacttctcagccagctgtgtgtttgtgtggcccaggagccttcattgctcgagttcttcctgcagccacctcctgagcctggagccgctccccgtcttcttctcttttctcgccttgtcccttttgtgcatcgagagggcaccctgggccagcaggcccgtgatgccctacttcttctcatggctttgtcagctgggagccccactgtgggccgctacatcgcggatcactcttacttctgcccggtgctggccacagggctcagtgccctgtactcatcactgcctcgaaagattgaggttccaggggatgattggcactgtctgcgacgggaagactggctgggagtgccagcccttgcactcttcatgagttccctggagttctgcaatgcagtaattcaggtggctcaccccctggtgcagaagcagttggttgattatatccataatgggttcctggtgcctgtcatgggtcctgccttgcacaagacctctgtggaggagatgatcgccagtaccgcctacctggaacttttcctacggagtatctcagagcctgctttgctccgtaccttcctgcgattcctgttgttgcaccggcatgacacccacaccatcctcgacaccctcgttgctcgtattggcagtaactcccggctctgcatggtctctctgagtctcttcaggaccctcctgaacctcagctgtgaggatgtcctgctgcagctggttctcaggtatcttgttccatgtaaccacgttatgctgagccagaagccggctgttcgtgatgtggacctatatggacgagcagctgacaagtttctctccctaatcccacgctgttgtcggcaccacgcccccagcccacctcgtccagagcatgcctcatgggcacgaggtcctggaagcccaagtgtggactcctcttctgtgacgacagtaccccggccctccacaccatctcgtctggctctcttcctgcggcagcagagcctgggtggctctgagtctccaggcccagccccttgctcaccagggctttctgcatcccccgcctccagccctggccgacggcctacccctgcagaggagcctggagagctggaagacaattacctggagtatctgcgtgaggcacgtcgtggtgtggaccgctgtgtccgagcctgccgtacctggtctgccccctatgatggcgagcggccctctcctgagcccagtccttttggctcccggactaagaaacgcagcctactgcctgaggaggacaggaacaacgtgggggaaggggaggaggaagagctggggaggagggggcgggctgggggtgcaggggagggccctggtcacctgccccctccccagctcaatggagtgccaggatcatggcctgagggggccaagaaggttcgtctggtgccaaaggagggagctggggaactgctagagggcatctccgagggcatggcaggactagagggctttgggcaggagctccgggagctagaggtggcattgagcaatgggggaactggctcagagtcccccttagaacctccactgccccttgaggaggaggaggcctacgagagcttcacctgtccccctgagccccctggccccttcctcagcagccctttgcggactctcaaccagctgccaagccagcccttcactggccccttcatggctgtgctctttgccaaactcgagaacatgctgcagaactccgtctatgtcaacttcctgctgacggggctggtggcccagctggcctgtcacccccagcccctgctccgctctttcctgctcaacaccaacatggtcttccagcccagtgtcaagtccctgctgcaggtgctgggctctgtgaagaataagattgagaactttgcggcttcccaggaggacttcccagcactgctgtccaaagccaagaagtacctcattgcccgtggcaagttggactgggctgagggccctgcagcaggacctgccccacgccgttctgatcccctagtgaagagccggaggccatccttgggggagttactcctgcggcatgcacacagtccaaccagggcccggcaggcggcacaattggtccttcagcctgggcgagacggagcaggacttggcctaagtgggggctcccctggggcttcaactccagttctactcacccggggcggggcccctgaacgccaaggtgaggctcttcgagtcaagaatgctgtctactgtgcagtcattttccctgaatttctcaaggagttggctgccatctcccaggctcatgccgtcacctcgcctttcttgttggagacttcagaggaaggatctggccctctcatctcaggctgtgggcccctcaatccttaactttcttccatggacaatcagggccatgggtggcccgggctggggctatattaaggcgcccggagggtaaggctcaaggatcgtctagagtacccagca

SEQ ID NO: 17163 - DNA, 706 bp, Homo sapiens
aggatccctcctgctgcagtgcctcagcccagtcaacttgccacgggcagtgaggtacttcttgtgctttggacagcagtgctgggaagtcctcctgggaagccgcaaagttctcaatcttattcttcacagagcccagcacctgcagcagggacttgacactacgccgttctgtatccctagtgaagagccggaggccatccttgggggagttactcctgcggcatgcacacagtccaaccagggcccggcaggcggcacaattggtccttcagcctgggcgagacggagcaggacttggcctaagtgggggctcccctggggcttcaactccagttctactcacccggggcggggcccctgaacgccaaggtgaggctcttcgagtcaagaatgctgtctactgtgcagtcattttccctgaatttctcaaggagttggctgccatctcccaggctcatgccgtcacctcgcctttcttgttggagacttcagaggaaggatctggccctctcatctcaggctgtgggcccctcaatccttaactttcttccatggacaatcagggccatgggtggcccgggctggggctagggcacaggctcctttttatgtttggaggcagtggcaaaaggactttttaatttatttcagatgaatgttttatggagaacttgttgcaatatgtataaaagggaaatctcta

SEQ ID NO: 17164 - DNA, 3245 bp, Homo sapiens
ggcggttgcgtgtggtgcgcgggggcgcgggctgcgtgtggcgcggggcggggcgcggctggtgcgcttgagaagcgatggcggcggcctgaactcacctaacaccgcagcagcaaccgggcccggccaggttcggcgttccgtgagtgaacgatttagaaatctggactggccagtgacctctgggcttgccattccagcctggtataacctctggctccatgggcagctactggctcctacagaccggatgaagcagactggagacacaagtggagaaaacctccagctggcaaatcctcagagtgtaggcctctggctgccagtcctgcccagcctgcctcatggagaggatgaattggctgagcagactggcctcccggggccctgggcaccgtatacctcaaggggccaatctccaaaccccagtcatggctgatcccgagacctgcctcatggtcttcaagaatcactggtcccaggtggtgcgaatcctggagcggcaaggccctcgggcagctcctgggggtgcagacgatctcagtgctgtgcgcaaccacacttaccagatgttgacactgctggcagaggaccgtgcagttccctcggcccccacaggccctgggcccctgctggagtttgctctgcacgaggatctgctgacccgtgtgttgacatggcagctgcaatgggatgagcttggggatggggtcgaggaacggcgggctgagcaactgaaactatttgaaatgctagtgagcgaagctcgccagccactgttgcggcatggtccagttcgtgaggctctgctcaccctgctggatgcctgtggccgccctgtgcccagtagcccagcactggatgaaggcttggtgctacttctcagccagctgtgtgtttgtgtggcccaggagccttcattgctcgagttcttcctgcagccacctcctgagcctggagccgctccccgtcttcttctcttttctcgccttgtcccttttgtgcatcgagagggcaccctgggccagcaggcccgtgatgccctacttcttctcatggctttgtcagctgggagccccactgtgggccgctacatcgcggatcactcttacttctgcccggtgctggccacagggctcagtgccctgtactcatcactgcctcgaaagattgaggttccaggggatgattggcactgtctgcgacgggaagactggctgggagtgccagcccttgcactcttcatgagttccctggagttctgcaatgcagtaattcaggtggctcaccccctggtgcagaagcagttggttgattatatccataatgggttcctggtgcctgtcatgggtcctgccttgcacaagacctctgtggaggagatgatcgccagtaccgcctacctggaacttttcctacggagtatctcagagcctgctttgctccgtaccttcctgcgattcctgttgttgcaccggcatgacacccacaccatcctcgacaccctcgttgctcgtattggcagtaactcccggctctgcatggtctctctgagtctcttcaggaccctcctgaacctcagctgtgaggatgtcctgctgcagctggttctcaggtatcttgttccatgtaaccacgttatgctgagccagaagccggctgttcgtgatgtggacctatatggacgagcagctgacaagtttctctccctaatcccacgctgttgtcggcaccacgcccccagcccacctcgtccagagcatgcctcatgggcacgaggtcctggaagcccaagtgtggactcctcttctgtgacgacagtaccccggccctccacaccatctcgtctggctctcttcctgcggcagcagagcctgggtggctctgagtctccaggcccagccccttgctcaccagggctttctgcatcccccgcctccagccctggccgacggcctacccctgcagaggagcctggagagctggaagacaattacctggagtatctgcgtgaggcacgtcgtggtgtggaccgctgtgtccgagcctgccgtacctggtctgccccctatgatggcgagcggccctctcctgagcccagtccttttggctcccggactaagaaacgcagcctactgcctgaggaggacaggaacaacgtgggggaaggggaggaggaagagctggggaggagggggcgggctgggggtgcaggggagggccctggtcacctgccccctccccagctcaatggagtgccaggatcatggcctgagggggccaagaaggttcgtctggtgccaaaggagggagctggggaactgctagagggcatctccgagggcatggcaggactagagggctttgggcaggagctccgggagctagaggtggcattgagcaatgggggaactggctcagagtcccccttagaacctccactgccccttgaggaggaggaggcctacgagagcttcacctgtccccctgagccccctggccccttcctcagcagccctttgcggactctcaaccagctgccaagccagcccttcactggtaagctacttagcctaggccttcccttctgtgtactctttgcatgttctcgacatgtttgtgctggtttcttggacctcttggccatgtcatttctgtgtacttgcctagcccctcatccatcctgcttgcatcacttccagatacgtgtcatgtcatacttgtgtccctgtgtctgtctgtacgtcttccatgcttgtgctggtttgagtattgacttacatctgagccttgtatgtatgtcctatgtgcatgttcctcctctttccctagtctggccatttcctgcgatttgtaattaggatattctgtgtttgatgtttcctggtgaatcacagcaatatttctgaaccatattgaagacgtatgtgctgtcctgtatggagaggcacctaaacactctctatgccattccgtccagtttatctgtctgggtcttgggttttctgtcagctctcctggggcctaaggttaaccttctggtatttttctccctactcagctccttcctccccacctcttcaaagaaggacttgatttcaagtttttcctgttcgctttccttgtaccttcttggttgctgtgactgtctgctagcactaagactgtcttaagcagatagagtgcaatttctttgaaggcaaatgacaaagcgtggccctgagctccctgactgagttcatttg

SEQ ID NO: 17165 - DNA, 2658 bp, Homo sapiens
ggcggttgcgtgtggtgcgcgggggcgcgggctgcgtgtggcgcggggcggggcgcggctggtgcgcttgagaagcgatggcggcggcctgaactcacctaacaccgcagcagcaaccgggcccggccaggttcggcgttccgtgagtgaacgatttagaaatctggactggccagtgacctctgggcttgccattccagcctggtataacctctggctccatgggcagctactggctcctacagaccggatgaagcagactggagacacaagtggagaaaacctccagctggcaaatcctcagagtgtaggcctctggctgccagtcctgcccagcctgcctcatggagaggatgaattggctgagcagactggcctcccggggccctgggcaccgtatacctcaaggggccaatctccaaaccccagtcatggctgatcccgagacctgcctcatggtcttcaagaatcactggtcccaggtggtgcgaatcctggagcggcaaggccctcgggcagctcctgggggtgcagacgatctcagtgctgtgcgcaaccacacttaccagatgttgacactgctggcagaggaccgtgcagttccctcggcccccacaggccctgggcccctgctggagtttgctctgcacgaggatctgctgacccgtgtgttgacatggcagctgcaatgggatgagcttggggatggggtcgaggaacggcgggctgagcaactgaaactatttgaaatgctagtgagcgaagctcgccagccactgttgcggcatggtccagttcgtgaggctctgctcaccctgctggatgcctgtggccgccctgtgcccagtagcccagcactggatgaaggcttggtgctacttctcagccagctgtgtgtttgtgtggcccaggagccttcattgctcgagttcttcctgcagccacctcctgagcctggagccgctccccgtcttcttctcttttctcgccttgtcccttttgtgcatcgagagggcaccctgggccagcaggcccgtgatgccctacttcttctcatggctttgtcagctgggagccccactgtgggccgctacatcgcggatcactcttacttctgcccggtgctggccacagggctcagtgccctgtactcatcactgcctcgaaagattgaggttccaggggatgattggcactgtctgcgacgggaagactggctgggagtgccagcccttgcactcttcatgagttccctggagttctgcaatgcagtaattcaggtggctcaccccctggtgcagaagcagttggttgattatatccataatgggttcctggtgcctgtcatgggtcctgccttgcacaagacctctgtggaggagatgatcgccagtaccgcctacctggaacttttcctacggagtatctcagagcctgctttgctccgtaccttcctgcgattcctgttgttgcaccggcatgacacccacaccatcctcgacaccctcgttgctcgtattggcagtaactcccggctctgcatggtctctctgagtctcttcaggaccctcctgaacctcagctgtgaggatgtcctgctgcagctggttctcaggtatcttgttccatgtaaccacgttatgctgagccagaagccggctgttcgtgatgtggacctatatggacgagcagctgacaagtttctctccctaatcccacgctgttgtcggcaccacgcccccagcccacctcgtccagagcatgcctcatgggcacgaggtcctggaagcccaagtgtggactcctcttctgtgacgacagtaccccggccctccacaccatctcgtctggctctcttcctgcggcagcagagcctgggtggctctgagtctccaggcccagccccttgctcaccagggctttctgcatcccccgcctccagccctggccgacggcctacccctgcagaggagcctggagagctggaagacaattacctggagtatctgcgtgaggcacgtcgtggtgtggaccgctgtgtccgagcctgccgtacctggtctgccccctatgatggcgagcggccctctcctgagcccagtccttttggctcccggactaagaaacgcagcctactgcctgaggaggacaggaacaacgtgggggaaggggaggaggaagagctggggaggagggggcgggctgggggtgcaggggagggccctggtcacctgccccctccccagctcaatggagtgccaggatcatggcctgagggggccaagaaggttcgtctggtgccaaaggagggagctggggaactgctagagggcatctccgagggcatggcaggactagagggctttgggcaggagctccgggagctagaggtggcattgagcaatgggggaactggctcagagtcccccttagaacctccactgccccttgaggaggaggaggcctacgagagcttcacctgtccccctgagccccctggccccttcctcagcagccctttgcggactctcaaccagctgccaagccagcccttcactggacccttcatggctgcgctgtttgccaacttgagaaaagtctctcagaaccgctatgtgcatttggtgttcaaggcttcttgtccttctaagtagattg

SEQ ID NO: 17166 - DNA, 210 bp, Homo sapiens
cagggagaagggaggacatcacgggtatggcctaggttctgggggagcgtagcaaggaggggctggggtgaaggggaggaaggtgtccatgaatgatagtctgtctttggggaggttgatgagggtgtcttgcagggaggacccttaacactcaccaaagaaaattagagtgggacttctgggcaaagctattcttgttcttctctctag

SEQ ID NO: 17167 - DNA, 296 bp, Homo sapiens
ggaatgcgtgcgatgtgcattgtgttcaggctttgtatccttgtgcccacctcccccccaacccaggccccttcatggctgtgctctttgccaaactcgagaacatgctgcagaactccgtctatgtcaacttcctgctgacggggctggtggcccagctggcctgtcacccccagcccctgctccgctctttcctgctcaacaccaacatggtcttccagcccagtgtcaagtccctgctgcaggtgtgcgatgcatgcatgcatgggtgcgtccaggctccgtggtgggccagg

SEQ ID NO: 17168 - DNA, 2647 bp, Homo sapiens
tcatgcagtacagacatagcaagccttgtcctgactatgtttcacatttgtgaattaggtatggccacctggtgaattcagttgttaagcaatatataatggggaattgtataccccactatttctaagattcccattagttttccctttttcctttttaatatgagtaatgctttataaaaatgggaaaaaaagtatacttaaggatctgtagtaataactgctttacaaaatccttaaaactactaatttgctgcttgtacagaaagtgaaaattagttggcaatcataagaaacatctgaataacaacgatgaatgggaaactagtgttgaaataggattcattttacttagcaccagcttaatttccttaggaagggctcatctccattagaaaatggagtcatcttatgtgcttaattattttcagttaattgtcaagtttaagtgcctaatcaaggcaagtgttgtttcagcctatgcttaatgcaagctaggatagtgattttaaataatcactaaaatcactagatttaaataatcactaaaatgatttgtgagaaactggcacttcagatattatatcctttagctataggttcttctctccctaagaacattagatattttagttttccagaacaaaagctttaaacttctgcagtaagttgagagaagggttgagaagaggaaaagaacttctcattttctatcagataagaatcacattagaaactaagtacaagattagacaacaaattatgtggtcaaataatatagtcattagccacctaaacattttaattccagatattatttaattccatataataactgaattcttgtgagtggattacaggtttttgatcccaaaattccagagctttcaactctctgaatttgtagtcctgaatatcccagtggtgggggttcccagcattgtgggtgctacttgcaaggccatagaatctagatggccctgtcttgaccctgaaatgaaccttaagccttagaacaaagtcatgcagatgccccatttgataataatcttattcacctgtgctctggtcctcggtttctgcatgtgttagcattgcattgataactcagaatcttgataaacacttaatatttgggcctgaagcattaaactttctttttattgtatatacttaaaaaatagaactcactgccctatcatacattgtagccctcttattctttggtctttcatatgcattagttaaatcccttaaagtagacattcataaaaacttacattgtttattggagtataaaatattacccaagtttcttcatgagttgacatgagctgttttaaatactggtgtattttcagaacagtaaaattactgaatatcagaaaaaatgttaattgatgatgaagcttattcccaaaatgccttttgtgcatatgatacttggaaagtcactaatgtgcctcagttaatacatcagtaaaatgttgtgtttcttttccagtgtagtgtttttggaatataaattccccatgctagtatagtatctcagcaaagagaatttccccccaggaggctcagtaaaggaataccgtgtcttacccatcgttatgatggaaggctgctttgaaaatggctgttttaccttataaggttaaaattttgatccatatgttaagtgatagaagattttggtgcaacagtagtaggatatatttctcctagaacatcccttattggcttacatgattttattgccttttaatagatattttgtcattttggccaaacaaaagacactgagtagttacacttaagttaaaaatgaggggaaaatcattattttaggtgtggagccatttttattataaaactttctcaaaataaaaaaacattgaatcatttcaatttttgcagtccctgtattagtatatgaatacatacttgccatttgaattaataacatgaaaagagtatactgtgtttttaaatccgtgtttctttgaatttaaagggtgtacaggtctttctgtagggaaaattattccatgtaaacatttcaactctgtatgaaaatgttaaatattgtaagaaagttatcctctcattttttcactgctatgatatatttattataaaatagggaatgaatgaatgaatatggattgctgttaactagaaacacttctgtatgtcagtcagcatttaatgaccacctactgtgtgcacagcactactggtaaaattttgaagacattgttaacattaaaaaatattttaaagttgtctacaaatctgagccttgtaatgatgtatatttaagttatttttgtttttatagattaaagtaagattatactatccagttttattactaaaaaagactggttttaattttaccaatgtgtgaactataaaagctttttgcctacagattttacattttaaaattatctatggctgttttaaattgtctagcaatttatatggttgtggttaactcatttaagaaacaattatctttctatattaagccattttcaaatagcaagacagtgcttgtctttttttgttattacactaactgcaattcagtaagctgcatgacaaaatatgtattatgtaaataaactgggtttactaaata

SEQ ID NO: 17169 - DNA, 2714 bp, Homo sapiens
tcatgcagtacagacatagcaagccttgtcctgactatgtttcacatttgtgaattaggtatggccacctggtgaattcagttgttaagcaatatataatggggaattgtataccccactatttctaagattcccattagttttccctttttcctttttaatatgagtaatgctttataaaaatgggaaaaaaagtatacttaaggatctgtagtaataactgctttacaaaatccttaaaactactaatttgctgcttgtacagaaagtgaaaattagttggcaatcataagaaacatctgaataacaacgatgaatgggaaactagtgttgaaataggattcattttacttagcaccagcttaatttccttaggaagggctcatctccattagaaaatggagtcatcttatgtgcttaattattttcagttaattgtcaagtttaagtgcctaatcaaggcaagtgttgtttcagcctatgcttaatgcaagctaggatagtgattttaaataatcactaaaatcactagatttaaataatcactaaaatgatttgtgagaaactggcacttcagatattatatcctttagctataggttcttctctccctaagaacattagatattttagttttccagaacaaaagctttaaacttctgcagtaagttgagagaagggttgagaagaggaaaagaacttctcattttctatcagataagaatcacattagaaactaagtacaagattagacaacaaattatgtggtcaaataatatagtcattagccacctaaacattttaattccagatattatttaattccatataataactgaattcttgtgagtggattacaggtttttgatcccaaaattccagagctttcaactctctgaatttgtagtcctgaatatcccagtggtgggggttcccagcattgtgggtgctacttgcaaggccatagaatctagatggccctgtcttgaccctgaaatgaaccttaagccttagaacaaagtcatgcagatgccccatttgataataatcttattcacctgtgctctggtcctcggtttctgcatgtgttagcattgcattgataactcagaatcttgataaacacttaatatttgggcctgaagcattaaactttctttttattgtatatacttaaaaaatagaactcactgccctatcatacattgtagccctcttattctttggtctttcatatgcattagttaaatcccttaaagtagacattcataaaaacttacattgtttattggagtataaaatattacccaagtttcttcatgagttgacatgagctgttttaaatactggtgtattttcagaacagtaaaattactgaatatcagaaaaaatgttaattgatgatgaagcttattcccaaaatgccttttgtgcatatgatacttggaaagtcactaatgtgcctcagttaatacatcagtaaaatgttgtgtttcttttccagtgtagtgtttttggaatataaattccccatgctagtatagtatctcagcaaagagaatttccccccaggaggctcagtaaaggaataccgtgtcttacccatcgttatgatggaaggctgctttgaaaatggctgttttaccttataaggttaaaattttgatccatatgttaagtgatagaagattttggtgcaacagtagtaggatatatttctcctagaacatcccttattggcttacatgattttattgccttttaatagatattttgtcattttggccaaacaaaagacactgagtagttacacttaagttaaaaatgaggggaaaatcattattttaggtgtggagccatttttattataaaactttctcaaaataaaaaaacattgaatcatttcaatttttgcagtccctgtattagtatatgaatacatacttgccatttgaattaataacatgaaaagagtatactgtgtttttaaatccgtgtttctttgaatttaaagggtgtacaggtctttctgtagggaaaattattccatgtaaacatttcaactctgtatgaaaatgttaaatattgtaagaaagttatcctctcattttttcactgctatgatatatttattataaaatagggaatgaatgaatgaatatggattgctgttaactagaaacacttctgtatgtcagtcagcatttaatgaccacctactgtgtgcacagcactactggtaaaattttgaagacattgttaacattaaaaaatattttaaagttgtctacaaatctgagccttgtaatgatgtatatttaagttatttttgtttttatagattaaagtaagattatactatccagttttattactaaaaaagactggttttaattttaccaatgtgtgaactataaaagctttttgcctacagattttacattttaaaattatctatggctgttttaaattgtctagcaatttatatggttgtggttaactcatttaagaaacaattatctttctatattaagccattttcaaatagcaagacagtgcttgtctttttttgttattacactaactgcaattcagtaagctgcatgacaaaatatgtattatgtaaataaactgggtttactaaataaaaaaaacaccccaaaaaaaaaagggggggggggaaaaatacccgggggggcccattgccccccttt

SEQ ID NO: 17170 - DNA, 2676 bp, Homo sapiens
tcatgcagtacagacatagcaagccttgtcctgactatgtttcacatttgtgaattaggtatggccacctggtgaattcagttgttaagcaatatataatggggaattgtataccccactatttctaagattcccattagttttccctttttcctttttaatatgagtaatgctttataaaaatgggaaaaaaagtatacttaaggatctgtagtaataactgctttacaaaatccttaaaactactaatttgctgcttgtacagaaagtgaaaattagttggcaatcataagaaacatctgaataacaacgatgaatgggaaactagtgttgaaataggattcattttacttagcaccagcttaatttccttaggaagggctcatctccattagaaaatggagtcatcttatgtgcttaattattttcagttaattgtcaagtttaagtgcctaatcaaggcaagtgttgtttcagcctatgcttaatgcaagctaggatagtgattttaaataatcactaaaatcactagatttaaataatcactaaaatgatttgtgagaaactggcacttcagatattatatcctttagctataggttcttctctccctaagaacattagatattttagttttccagaacaaaagctttaaacttctgcagtaagttgagagaagggttgagaagaggaaaagaacttctcattttctatcagataagaatcacattagaaactaagtacaagattagacaacaaattatgtggtcaaataatatagtcattagccacctaaacattttaattccagatattatttaattccatataataactgaattcttgtgagtggattacaggtttttgatcccaaaattccagagctttcaactctctgaatttgtagtcctgaatatcccagtggtgggggttcccagcattgtgggtgctacttgcaaggccatagaatctagatggccctgtcttgaccctgaaatgaaccttaagccttagaacaaagtcatgcagatgccccatttgataataatcttattcacctgtgctctggtcctcggtttctgcatgtgttagcattgcattgataactcagaatcttgataaacacttaatatttgggcctgaagcattaaactttctttttattgtatatacttaaaaaatagaactcactgccctatcatacattgtagccctcttattctttggtctttcatatgcattagttaaatcccttaaagtagacattcataaaaacttacattgtttattggagtataaaatattacccaagtttcttcatgagttgacatgagctgttttaaatactggtgtattttcagaacagtaaaattactgaatatcagaaaaaatgttaattgatgatgaagcttattcccaaaatgccttttgtgcatatgatacttggaaagtcactaatgtgcctcagttaatacatcagtaaaatgttgtgtttcttttccagtgtagtgtttttggaatataaattccccatgctagtatagtatctcagcaaagagaatttccccccaggaggctcagtaaaggaataccgtgtcttacccatcgttatgatggaaggctgctttgaaaatggctgttttaccttataaggttaaaattttgatccatatgttaagtgatagaagattttggtgcaacagtagtaggatatatttctcctagaacatcccttattggcttacatgattttattgccttttaatagatattttgtcattttggccaaacaaaagacactgagtagttacacttaagttaaaaatgaggggaaaatcattattttaggtgtggagccatttttattataaaactttctcaaaataaaaaaacattgaatcatttcaatttttgcagtccctgtattagtatatgaatacatacttgccatttgaattaataacatgaaaagagtatactgtgtttttaaatccgtgtttctttgaatttaaagggtgtacaggtctttctgtagggaaaattattccatgtaaacatttcaactctgtatgaaaatgttaaatattgtaagaaagttatcctctcattttttcactgctatgatatatttattataaaatagggaatgaatgaatgaatatggattgctgttaactagaaacacttctgtatgtcagtcagcatttaatgaccacctactgtgtgcacagcactactggtaaaattttgaagacattgttaacattaaaaaatattttaaagttgtctacaaatctgagccttgtaatgatgtatatttaagttatttttgtttttatagattaaagtaagattatactatccagttttattactaaaaaagactggttttaattttaccaatgtgtgaactataaaagctttttgcctacagattttacattttaaaattatctatggctgttttaaattgtctagcaatttatatggttgtggttaactcatttaagaaacaattatctttctatattaagccattttcaaatagcaagacagtgcttgtctttttttgttattacactaactgcaattcagtaagctgcatgacaaaatatgtattatgtaaataaactgggtttactaaataagaaataaacaataaatgaaacaagaaga

SEQ ID NO: 17171 - DNA, 2452 bp, Homo sapiens
tcatgcagtacagacatagcaagccttgtcctgactatgtttcacatttgtgaattaggtatggccacctggtgaattcagttgttaagcaatatataatggggaattgtataccccactatttctaagattcccattagttttccctttttcctttttaatatgagtaatgctttataaaaatgggaaaaaaagtatacttaaggatctgtagtaataactgctttacaaaatccttaaaactactaatttgctgcttgtacagaaagtgaaaattagttggcaatcataagaaacatctgaataacaacgatgaatgggaaactagtgttgaaataggattcattttacttagcaccagcttaatttccttaggaagggctcatctccattagaaaatggagtcatcttatgtgcttaattattttcagttaattgtcaagtttaagtgcctaatcaaggcaagtgttgtttcagcctatgcttaatgcaagctaggatagtgattttaaataatcactaaaatcactagatttaaataatcactaaaatgatttgtgagaaactggcacttcagatattatatcctttagctataggttcttctctccctaagaacattagatattttagttttccagaacaaaagctttaaacttctgcagtaagttgagagaagggttgagaagaggaaaagaacttctcattttctatcagataagaatcacattagaaactaagtacaagattagacaacaaattatgtggtcaaataatatagtcattagccacctaaacattttaattccagatattatttaattccatataataactgaattcttgtgagtggattacaggtttttgatcccaaaattccagagctttcaactctctgaatttgtagtcctgaatatcccagtggtgggggttcccagcattgtgggtgctacttgcaaggccatagaatctagatggccctgtcttgaccctgaaatgaaccttaagccttagaacaaagtcatgcagatgccccatttgataataatcttattcacctgtgctctggtcctcggtttctgcatgtgttagcattgcattgataactcagaatcttgataaacacttaatatttgggcctgaagcattaaactttctttttattgtatatacttaaaaaatagaactcactgccctatcatacattgtagccctcttattctttggtctttcatatgcattagttaaatcccttaaagtagacattcataaaaacttacattgtttattggagtataaaatattacccaagtttcttcatgagttgacatgagctgttttaaatactggtgtattttcagaacagtaaaattactgaatatcagaaaaaatgttaattgatgatgaagcttattcccaaaatgccttttgtgcatatgatacttggaaagtcactaatgtgcctcagttaatacatcagtaaaatgttgtgtttcttttccagtgtagtgtttttggaatataaattccccatgctagtatagtatctcagcaaagagaatttccccccaggaggctcagtaaaggaataccgtgtcttacccatcgttatgatggaaggctgctttgaaaatggctgttttaccttataaggttaaaattttgatccatatgttaagtgatagaagattttggtgcaacagtagtaggatatatttctcctagaacatcccttattggcttacatgattttattgccttttaatagatattttgtcattttggccaaacaaaagacactgagtagttacacttaagttaaaaatgaggggaaaatcattattttaggtgtggagccatttttattataaaactttctcaaaataaaaaaacattgaatcatttcaatttttgcagtccctgtattagtatatgaatacatacttgccatttgaattaataacatgaaaagagtatactgtgtttttaaatccgtgtttctttgaatttaaagggtgtacaggtctttctgtagggaaaattattccatgtaaacatttcaactctgtatgaaaatgttaaatattgtaagaaagttatcctctcattttttcactgctatgatatatttattataaaatagggaatgaatgaatgaatatggattgctgttaactagaaacacttctgtatgtcagtcagcatttaatgaccacctactgtgtgcacagcactactggtaaaattttgaagacattgttaacattaaaaaatattttaaagttgtctacaaatctgagccttgtaatgatgtatatttaagttatttttgtttttatagattaaagtaagattcccatcccactttatcacctaaaaagacatcgttttcattctcaccactcggaccactataataagcctttttgtctacccacgttttcatttaaaa

SEQ ID NO: 17172 - DNA, 1287 bp, Homo sapiens
tattcgtgttgcacttatacgtgttgcacaatgttaattgatgatgaagcttattcccaaaatgccttttgtgcatatgatacttggaaagtcactaatgtgcctcagttaatacatcagtaaaatgttgtgtttcttttccagtgtagtgtttttggaatataaattccccatgctagtatagtatctcagcaaagagaatttccccccaggaggctcagtaaaggaataccgtgtcttacccatcgttatgatggaaggctgctttgaaaatggctgttttaccttataaggttaaaattttgatccatatgttaagtgatagaagattttggtgcaacagtagtaggatatatttctcctagaacatcccttattggcttacatgattttattgccttttaatagatattttgtcattttggccaaacaaaagacactgagtagttacacttaagttaaaaatgaggggaaaatcattattttaggtgtggagccatttttattataaaactttctcaaaataaaaaaacattgaatcatttcaatttttgcagtccctgtattagtatatgaatacatacttgccatttgaattaataacatgaaaagagtatactgtgtttttaaatccgtgtttctttgaatttaaagggtgtacaggtctttctgtagggaaaattattccatgtaaacatttcaactctgtatgaaaatgttaaatattgtaagaaagttatcctctcattttttcactgctatgatatatttattataaaatagggaatgaatgaatgaatatggattgctgttaactagaaacacttctgtatgtcagtcagcatttaatgaccacctactgtgtgcacagcactactggtaaaattttgaagacattgttaacattaaaaaatattttaaagttgtctacaaatctgagccttgtaatgatgtatatttaagttatttttgtttttatagattaaagtaagattatactatccagttttattactaaaaaagactggttttaattttaccaatgtgtgaactataaaagctttttgcctacagattttacattttaaaattatctatggctgttttaaattgtctagcaatttatatggttgtggttaactcatttaagaaacaattatctttctatattaagccattttcaaatagcaagacagtgcttgtctttttttgttattacactaactgcaattcagtaagctgcatgacaaaatatgtattatgtaaataaactgggtttactaaata

SEQ ID NO: 17173 - DNA, 547 bp, Homo sapiens
  misc_feature (14)..(15): n is a, c, g, or t
  misc_feature (21)..(21): n is a, c, g, or t
  misc_feature (36)..(36): n is a, c, g, or t
  misc_feature (40)..(40): n is a, c, g, or t
  misc_feature (43)..(45): n is a, c, g, or t
  misc_feature (60)..(60): n is a, c, g, or t
  misc_feature (66)..(66): n is a, c, g, or t
  misc_feature (81)..(81): n is a, c, g, or t
  misc_feature (110)..(110): n is a, c, g, or t
cgttaccccccccnntttccnccgccctgatatctntatnccnnnatcgggcctgactgnatgcanctggattgccgttcncccgacccccccccgtatgcccgcccgcntttaatgccccccccccgtggccccgccccccaaattttgaagacattgttaacattaaaaaatattttaaagttgtctacaaatctgagccttgtaatgatgtatatttaagttatttttgtttttatagattaaagtaagattatactatccagttttattactaaaaaagactggttttaattttaccaatgtgtgaactataaaagctttttgcctacagattttacattttaaaattatctatggctgttttaaattgtctagcaatttatatggttgtggttaactcatttaagaaacaattatctttctatattaagccattttcaaatagcaagacagtgcttgtctttttttgttattacactaactgcaattcagtaagctgcatgacaaaatatgtattatgtaaataaactgggtttactaaata

SEQ ID NO: 17174 - DNA, 2157 bp, Homo sapiens
tttaaataaagcttcttcaagctgttttcagctttggaaccagaaacctccaaactttgtaagttacataaatgcttagtacatcataaccttcaaaaggttgccaattagaagaaatcttaagcattgtcaggaaattccttctctctatatatagccttatgcatagtagacttgttgctttctttcccttttaaagttggaacatagaacataaaaccccagtacgtcggcattgtgaggtccttgtgacctcacctttcaaataggatatggttacctgggaaactaagttaattacatatggaacatcagaggctaagctcaggtggcaacaggatgggtcagatcaaggaagactgagactccggaccaagcctcacggctggtgagggccagggactcaatcacaggaacaagacttcttttgtagaattatcctatggaatgatattttcataatgagtcaacaaggttacgtggctacacctccgtattctcagcctcagcctggaataggcctttctccacctcattatgggcactatggggatccgtcgcacacagcatctccaacaggaagaaaactgaggtccttaaagataagcttcttgcccaggttcatacaactaataagtaaccagtggggccttgaactactctaacccaagcccagtgatttctctcctttactgcaatttctcaagaagaaaagagagaaatgtctgaagacagttccaaagagaagtctttaaaggtatgatgaagccagcagggcctttgggggccaccgccactaggggaatgttgcctccgggtcccccacctcctggaccccatcagtttggtcagaatggagctcatgccactggtcaccctccccaaagatttccaggccctccacctgtcaacaatgtggcatcctcacatgcaccataccaaccctctgcacaatcttcttatccaggtcctatatccacttcatctgtcacccagctgggcagccagctcagtgctatgcaaatcaacagctatggtaatagttttattattagtgtttattgactgccttgtgtcctggtcatttttaatgagagaggttttcttcatttttaaaatagatgtaactagggcatactgtgttgaagtagtatttggacatttttaataataaagcatctatcttatgtatggctatagttaattgttttcttgatcatgctgccacttatttcaaggtaattgaaggaccctcagaataccttccattcaatgattgaacaataagaaaagacaaaaaatgctgatttcacaaataaacattagaatagtgaaattattttaagaaataaataaggataatttaaaccttgtattgtttatgatggggcccccaaatcagaaatatagtactcattgtttcacagtgcattttaattatgtgtttagatcatggaaagagtggaagctcagatgttgtgaggcagaaaagagaagataggagaggaaagagtcacagtactgagatttacatcaacagaaatgctgtatatcctgtgagtcatggaaagctccactgtaatgacagcacagtcggccatttatctagatgaagaatgtttccatgttacttaaaattagttttctgaagtatcattaaaacccctctattttctgtcttttactcatttcaaaatggataagtctccaaagaagcaacccagtttcccataatcagagaaaggaaaacataatctggttttacagctatttccaatatgattggagagcatgttggtggcccttctcttgtctctggttatttccacctaattctgaaatttgtttggtcaagtcacgcacaggatgcaaataatttattgaatgtgcaatttacctgagtaatgcttgttatgtaatagaatttttatatgattttctagatttgtaccagatacagatgctttaattaatgcatatatcatgtaattacacaactgagttaaaatttattctatgaattcccttacttaaattataaatgttgcttttaccttttaaaaattttccaggccaggcatggtggctcacacctataatcccagcactttgggatgccaaggaggaagtattgcttgagcccaggagtttgagacc

SEQ ID NO: 17175 - DNA, 1461 bp, Homo sapiens
tttaaataaagcttcttcaagctgttttcagctttggaaccagaaacctccaaactttgtaagttacataaatgcttagtacatcataaccttcaaaaggttgccaattagaagaaatcttaagcattgtcaggaaattccttctctctatatatagccttatgcatagtagacttgttgctttctttcccttttaaagttggaacatagaacataaaaccccagtacgtcggcattgtgaggtccttgtgacctcacctttcaaataggatatggttacctgggaaactaagttaattacatatggaacatcagaggctaagctcaggtggcaacaggatgggtcagatcaaggaagactgagactccggaccaagcctcacggctggtgagggccagggactcaatcacaggaacaagacttcttttgtagaattatcctatggaatgatattttcataatgagtcaacaaggttacgtggctacacctccgtattctcagcctcagcctggaataggcctttctccacctcattatgggcactatggggatccgtcgcacacagcatctccaacaggaagaaaactgaggtccttaaagataagcttcttgcccaggttcatacaactaataagtaaccagtggggccttgaactactctaacccaagcccagtgatttctctcctttactgcaatttctcaagaagaaaagagagaaatgtctgaagacagttccaaagagaagtctttaaaggtatgatgaagccagcagggcctttgggggccaccgccactaggggaatgttgcctccgggtcccccacctcctggaccccatcagtttggtcagaatggagctcatgccactggtcaccctccccaaagatttccaggccctccacctgtcaacaatgtggcatcctcacatgcaccataccaaccctctgcacaatcttcttatccaggtcctatatccacttcatctgtcacccagctgggcagccagctcagtgctatgcaaatcaacagctatggttcaggcatggctcctccaagccagggaccccctggccctctgtcagccacatcattgcagactcctccacgacctccacagccgtccattttgcagcctggatctcaagttcttccaccaccacccaccacactcaatggtcctggtgcctcacctttgcctctaccaatgtacagaccagatgggctctctgggcctcctcctccaaatgcccagtaccagcccccacctcttccaggccagaccttgggtgctggatatcctccgcagcaggccaactctggtccccagatggcaggcgcacaactgtcttacccaggaggcttccctggaggtcctgcacagatggctggtccgccacagccccagaagaagctggatcctgactctatccctaacccaatccaggtgattgagaatgaa

SEQ ID NO: 17176 - DNA, 1744 bp, Homo sapiens
tttaaataaagcttcttcaagctgttttcagctttggaaccagaaacctccaaactttgtaagttacataaatgcttagtacatcataaccttcaaaaggttgccaattagaagaaatcttaagcattgtcaggaaattccttctctctatatatagccttatgcatagtagacttgttgctttctttcccttttaaagttggaacatagaacataaaaccccagtacgtcggcattgtgaggtccttgtgacctcacctttcaaataggatatggttacctgggaaactaagttaattacatatggaacatcagaggctaagctcaggtggcaacaggatgggtcagatcaaggaagactgagactccggaccaagcctcacggctggtgagggccagggactcaatcacaggaacaagacttcttttgtagaattatcctatggaatgatattttcataatgagtcaacaaggttacgtggctacacctccgtattctcagcctcagcctggaataggcctttctccacctcattatgggcactatggggatccgtcgcacacagcatctccaacaggaagaaaactgaggtccttaaagataagcttcttgcccaggttcatacaactaataagtaaccagtggggccttgaactactctaacccaagcccagtgatttctctcctttactgcaatttctcaagaagaaaagagagaaatgtctgaagacagttccaaagagaagtctttaaaggtatgatgaagccagcagggcctttgggggccaccgccactaggggaatgttgcctccgggtcccccacctcctggaccccatcagtttggtcagaatggagctcatgccactggtcaccctccccaaagatttccaggccctccacctgtcaacaatgtggcatcctcacatgcaccataccaaccctctgcacaatcttcttatccaggtcctatatccacttcatctgtcacccagctgggcagccagctcagtgctatgcaaatcaacagctatgatcatggaaagagtggaagctcagatgttgtgaggcagaaaagagaagataggagaggaaagagtcacagtactgagatttacatcaacagaaatgctgtatatcctgtgagtcatggaaagctccactgtaatgacagcacagtcggccatttatctagatgaagaatgtttccatgttacttaaaattagttttctgaagtatcattaaaacccctctattttctgtcttttactcatttcaaaatggataagtctccaaagaagcaacccagtttcccataatcagagaaaggaaaacataatctggttttacagctatttccaatatgattggagagcatgttggtggcccttctcttgtctctggttatttccacctaattctgaaatttgtttggtcaagtcacgcacaggatgcaaataatttattgaatgtgcaatttacctgagtaatgcttgttatgtaatagaatttttatatgattttctagatttgtaccagatacagatgctttaattaatgcatatatcatgtaattacacaactgagttaaaatttattctatgaattcccttacttaaattataaatgttgcttttaccttttaaaaattttccaggccaggcatggtggctcacacctataatcccagcactttgggatgccaaggaggaagtattgcttgagcccaggagtttgagacc

SEQ ID NO: 17177 - DNA, 1283 bp, Homo sapiens
tttaaataaagcttcttcaagctgttttcagctttggaaccagaaacctccaaactttgtaagttacataaatgcttagtacatcataaccttcaaaaggttgccaattagaagaaatcttaagcattgtcaggaaattccttctctctatatatagccttatgcatagtagacttgttgctttctttcccttttaaagttggaacatagaacataaaaccccagtacgtcggcattgtgaggtccttgtgacctcacctttcaaataggatatggttacctgggaaactaagttaattacatatggaacatcagaggctaagctcaggtggcaacaggatgggtcagatcaaggaagactgagactccggaccaagcctcacggctggtgagggccagggactcaatcacaggaacaagacttcttttgtagaattatcctatggaatgatattttcataatgagtcaacaaggttacgtggctacacctccgtattctcagcctcagcctggaataggcctttctccacctcattatgggcactatggggatccgtcgcacacagcatctccaacaggtatgatgaagccagcagggcctttgggggccaccgccactaggggaatgttgcctccgggtcccccacctcctggaccccatcagtttggtcagaatggagctcatgccactggtcaccctccccaaagatttccaggccctccacctgtcaacaatgtggcatcctcacatgcaccataccaaccctctgcacaatcttcttatccaggtcctatatccacttcatctgtcacccagctgggcagccagctcagtgctatgcaaatcaacagctatggttcaggcatggctcctccaagccagggaccccctggccctctgtcagccacatcattgcagactcctccacgacctccacagccgtccattttgcagcctggatctcaagttcttccaccaccacccaccacactcaatggtcctggtgcctcacctttgcctctaccaatgtacagaccagatgggctctctgggcctcctcctccaaatgcccagtaccagcccccacctcttccaggccagaccttgggtgctggatatcctccgcagcaggccaactctggtccccagatggcaggcgcacaactgtcttacccaggaggcttccctggaggtcctgcacagatggctggtccgccacagccccagaagaagctggatcctgactctatccctaacccaatccaggtgattgagaatgaa

SEQ ID NO: 17178 - DNA, 803 bp, Homo sapiens
tttaaataaagcttcttcaagctgttttcagctttggaaccagaaacctccaaactttgtaagttacataaatgcttagtacatcataaccttcaaaaggttgccaattagaagaaatcttaagcattgtcaggaaattccttctctctatatatagccttatgcatagtagacttgttgctttctttcccttttaaagttggaacatagaacataaaaccccagtacgtcggcattgtgaggtccttgtgacctcacctttcaaataggatatggttacctgggaaactaagttaattacatatggaacatcagaggctaagctcaggtggcaacaggatgggtcagatcaaggaagactgagactccggaccaagcctcacggctggtgagggccagggactcaatcacaggaacaagacttcttttgtagaattatcctatggaatgatattttcataatgagtcaacaaggttacgtggctacacctccgtattctcagcctcagcctggaataggcctttctccacctcattatgggcactatggggatccgtcgcacacagcatctccaacaggaagaaaactgaggtccttaaagataagcttcttgcccaggttcatacaactaataagtaaccagtggggccttgaactactctaacccaagcccagtgatttctctcctttactgcaatttctcaagaagaaaagagagaaatgtctgaagacagttccaaagagaagtctttaaaggtctctatttgagaagagctgctaataaatgaaaacacagacattc

SEQ ID NO: 17179 - DNA, 338 bp, Homo sapiens
gatccaggacccactccaccaccacaagagtgtgagaacagaaataaggaaaaagcttttaagtcaagtatgaagaccccacatgtatcccactattctccctactgcaggtctgtatgtagaatttacaaaggaagcaacaaaaagacgctacaattctcacaaaaaagacttgacttcatctactacagagaacctcaactcttgtcatcttaccctcaaagcagaacttaaataccccaggtaatcaaaggggcaataattcacttctgcaccactgaagataacccttgacttccacaccaccaattaggataaatctatttggatgaacaaag

SEQ ID NO: 17180 - DNA, 389 bp, Homo sapiens
gtcccataagaagagtgaacccttgcattttacctagactcaaataatccacctgtttgcttagtctaatctgttaacacaccctcgctgaagcccataacttctacagagggttaatgacttttatacagtactcaatacagttgatgaatgaatgaatgagtgaatatgaattcagtttcagtgatatgggtcatgtcactgtggagatgatcttttatttcaaatacagtatgagaaccttacaatagtatactttcatttctttccttctggccttttcattattgtcttttaataaattttaaaccctagaatatatttaaaaaaatactttctctttaaatacttttcttttaaataataataaagatctgtttactcagata

SEQ ID NO: 17181 - DNA, 1047 bp, Homo sapiens
ccccaaacacccccaccaaattccctgaactgcgtcccagcacttctcaaacctccaagacttgacccagctcttttcagctcaaattcagcctttgggatgctccaaatccttcccacaactgacatttcttggacacccccaaagcctcaggcctgttccgcacccatatccccaaagccctaacagacttgtccagcccaggttcccttgatgctagaacttccaagataggcgcaacctgtctgcaattccagggaaccagaccctccccaagcaccctctttgtcttacgcctaaccctgagtcccttccctgagatggtgccccaaaggtaccctcttcacagacaccagtgtttcccagagggttgtatttgtacctttggtggtgtgctaaggtttgaggcagtatgaggacaaacacttgttttaaaagttttgtctctaatacgcattttgtacagaagccgataagtgcaggcatcgctgcttggctaggacacggtttatttaggttaagagtgtttccatttaaagtagtccacagatgatcacagaggctgttcccgaagggcaggaacactggagtatcagaagattgggaaccgacaacacccagctcggctgggatcccagccccccttccccagcggtcctcaccgcgtcacgctcgcgggtggaaaatcatttcccacctcctatcctggctcaaggatgcgctacctcccccaagcccagagaccacaccggtcccagactctttagcggaccccccttttggagccggggtcccacggaattagccacctccctccctctgctcccacggcctcaggaaccccccacccgagggtggatggggggcgtcactgagcacgattctcgatgcaacgattcctatgcaaggggcattttgagtcccccccatccttccctcggaccctaaaccctggtgaagcaggggtgaggggtggggcgggttttggtgggggcggggcaaagggctaggggctccagacaccagggtacggggtggggactgatt

SEQ ID NO: 17182 - DNA, 761 bp, Homo sapiens
gatctcagctcactgcagcctccacctcccgggttgaagcatgtctcctgccccagcctcccaagtagctgggactacaggcgcatgtcaccatgcctagctaatttttgtatttttaatagagatggggtttcaccatgttgctcaggcgaatctcgaactcctgacctcaagtgatccgcctgcctcggcttcctaatgtgcaaagatgcttttttgttgtcacattttaagacagccaaaaagaatgagaaagtcattgtttagaagaaaaggaatcctagtgacgagttgtcttgaaagagaagaaaaaaagttaaaaaacagaagaaaaaggagatctttaaccgtgctgggtataaaattctaagtcaggatacttttcttcctttgagcatctttgactgcctggggaatatcagacattcttttagtggccttgtgatcattttgctgagcttgttcatattcctgttctaggttctcttagaattgataaatagacttaacgaaaaccttttaattaccatgaatttttaataaaacgtgaaattaatgttctggccttgtattgcacttctgtgccaattgggaagatgtctcaaccttttctcaacagttattaagaaatatgttggataaaacaccgattactactgctaaagaagaaccttccaacaaattggtaatgttttctttcagataagcaacacacactgccacttaagtacaagccgcatctagactcctcactatcacca

SEQ ID NO: 17183 - DNA, 312 bp, Homo sapiens
tctgctactaatatggtatgtcctgatagagactgaatcttaccctgaatcccagcatcgcattgtggaactaagtgctgaataataatagttctgaggaagaaataaacgtttgttcttgcaagcctctgagaattcaaagatatttgctaccacattacaacttccagaaagctgaaagtacactttcaatgacctgttttttctttactcaccttaaccttccaaatccacagttacagatagtagctcattatctccactacttgtacgaactttgaaatctgcatttgagaattttcttcatatgat

SEQ ID NO: 17184 - DNA, 155 bp, Homo sapiens
gacagtttaggggacataaaacagcaaaaatggatttaaaggaaagcccagtcattcacacttagaagaattcctggactaacaattctaagccaaggcagctgcggcaacgttgaggcagaatcaaaacctggggaaagaccttaggtattcag

SEQ ID NO: 17185 - DNA, 1027 bp, Homo sapiens
gaaccaacattctgcctcttgggatatatttcaaagaatctttaatacagctccatcagatgacatgtgcatgagtgtttttgcagtatgatttttggtggtgggggcctagaggcaacataaatgttcagcattaggagaatgcataggtgaaacatgtattcatatcatggggcattaaacaacagaagcaacaaaattcatgtgcatacaacataagagtaccttttaaaaggtatgtagtgggagaagaaaaagcattttatagatacagaaaacatcattctgtaacttagaaacatacataggaaacagaaacagtttttaaaaacctacacaaaaagccacagtattactacattagaaaagttgcttttcagaggaatgggagtgagatggcgataagaggaaataaaaaacaaaaatatttttaaatagcaaaataacccctttttttttgagacagtttccctctgtcactcaggctggagtgtagtggcgcgatcctggctcactgcaacctttgcctcccgggttcaagcattcttctgcctcaacctcttgagtagctgcagttacaggtgcgcactaccatacctggctaatttttgtgtttttagtagagacggggttttgtcatgttggccaggctggtcttgaactcctgacctcaagtaatctgcccgcctcagcctcccaaagtgctgggattacaggtgtgagccaccgtgcccagccaaaacatgtttttgaagagtagttgataaagagtagatgataaaaaggaagatgcttaactgtgtaactaaatgaaaacataatatgggtatgtatatagtatgatctcagttatgtaaaaaactatgcacaaaaaaacctaaaaagaaaaatatcaggatgtatttctagaaggtgggattatctgttgttaaaaatttttgatattctattttctaaattgagtttttatcgcttttgtataagagaacctaaagggtaaagagttttaaaaatgaggacattgaaa

SEQ ID NO: 17186 - DNA, 734 bp, Homo sapiens
caggcaagaggttaggtttggcccatgggcataggtttgctgacttcagcatagagtcgtgggttatttacaagtgacatacttttcctgggttatctgggtatgttgactccatgccacttgcataaagcagcaatggatattagtattatggatgtccagtaagttattccacaaagaccatgcctaaggtggcatcagccctgggctccacagctgcgtggcatcaaagctttctcttaactctcttacctctaggcaaactgagacctcaccatcctctcccctgcttcccacgacagtcctttgcccttgccatgctcagggttggaatcaagttgttctattctcaacagaccaaaatgtttagttaaggcaaagtatcttggaaacaattgtgattaattacagtcttgtactcttgacaaagctgtgcagatggcaataagttcataccagcaatcctggagtcccataataaatacgtacatgtggaacatcgtgcacataatttcaacagttcgcagatctgtagttatgaagccagggtttggtggtatttgctctctcttggtgcatttgataaggatccactgaggcctgaatgtggaagatgatgggcagcgagaggagcgtcagaagaccccagtcaagacgtgttcgccatcagaggttacaggccgcacagcctgatgagcttcaagcctggcagggtaaatagtttttgggttttt

SEQ ID NO: 17187 - DNA, 311 bp, Homo sapiens
caatggcacaggccaatgtaggctggggcttagagaactggagaaaaacgtgtttgtgtgtagtacctcaggtactccttgccttgcagtccaaagcaaatgtaccgcttctcctggttttctttctagaaactgcattatatataccctatttttatatataatgcttctgtattactcctctggagactagccttttttatagactttctggtagaatgttaattagaaaggaaaataactatcttcaaccaatttattcattaaaagttcagttttttccaaagagtcataatacataaacttttttt

SEQ ID NO: 17188 - DNA, 402 bp, Homo sapiens
acgccactgcactccagcctgggtgacagagggaggctccctctcagaaaaacaaacaaacaaacagaccttagagagtcagcgtgaagttcccagagagtgaactctggctaactaattatctggctaatttgcatcttaaaaggacacacgggaatcagtgaggagaatcctaagggtcagagacttgcttggcatcttaatcgttaaaaataatttactcagactaggcaatatatccacaaaaaaaattttaaaaattagctggaggtggtggctcacgcctttagtcccagctactcgggaggctgaggtaggaggattgcttgagccactgcgttccaggctgcggtgagctgtgatcttaccactgtgctccagcctgagcggcatagcgagacc

SEQ ID NO: 17189 - DNA, 263 bp, Homo sapiens
tgaagtgaaaattagatttaaatggaatcaaggtaacttctgcaaataagtgtattctccaacttctgtgacttggtccaccccagagcgcaggtgtcatgtcctcagaagtgttcctggctcaggtgggaaggacattttccatatctgaagggactgaaatacatcctggaatagtcggttgatctccaattcctaccctttatttctttaaaaagaaaagagtcaaccaaaccaaaaaggagtgattcacatgtcatttt

SEQ ID NO: 17190 - DNA, 380 bp, Homo sapiens
tccaaatgtttctggagctacacttcttaatctccttcctcctttcctgtctcagaggaacagaagtccttcctcctcatcagttctaacttccatctgcagttttgatcccatggcttcccacctcctctggactgatttccatcatttatttatttatttatttagctgtgtttttcttctccattgagtctccttttatgtacaaatatcctcctgtgttctccatttaaaacaaatttaaaaattaaaagtaggccaggtgcagtggctcacacctgtaacacctcccagcactttgggagccaaaggcaggaaaattgcttgagcttaggcatttgtgaccagctggggaaacatagtaagatcctgtctctaca

SEQ ID NO: 17191 - DNA, 176 bp, Homo sapiens
acagaagtttgctaacccctgtctaagcctcattgtcctaaaataaattcagaaacctcaactgctactccttcagcccagacagcacctttattttctctctccttcattttaatatgcacgacaccactcagcaaaatgtcctgcatgcatggcctggcctaggtactccactc

SEQ ID NO: 17192 - DNA, 389 bp, Homo sapiens
gattcaatccatatattacggtaccagccccagaacaggagcagcctagagcaagcctgtaatatagggtttctgaaacctcctccatataaccaggagacaacataaaaagttacacgactatttatgtgacatggagtcgtattagtagtgacgtgcccacataaatagcactgtgaatttttggaatatggaaattaaagaaaaatatttcaaacctaagctgtgtattatgaaaaataacaaatcttcccaaatgccataaaaaaatagaggtggaaggaaagacaaagggctagaagtctatgagtattctttcttgataaaaatttaattttctaaaaaatctcataattgtacaaatagtaaataaacatttatgaaaggaa

SEQ ID NO: 17193 - DNA, 395 bp, Homo sapiens
cgcccacctcggcctcccaaagtgctaggattacacatgtgagccaccacgcctggcctgtggtacattcttaaagcagccctaagaaatcaatacaagaaatgtctaggcagggcaaggtggctcacgcctataaccccagcaatttgggaggccgaggtgggaggaccacctgaggtcaggagttcaagacccgcccagccaacatggcgaaaccccatctctactaaaaatacaaaaattagctgtgcatggtgggggcatgcctgtaatcccagctgcctgggaggctgaggcagtagaatcgcttgaacccaggaggcagaggttgcagtgagtcgaaatcgtgccactgcactccagcttggctgactgagcaagattccatctcaaaa

SEQ ID NO: 17194 - DNA, 466 bp, Homo sapiens
gggtcttaagtcctcttgggcaccaaaaaccccttctacactgtggagctgtgctgtccagggtagcagccactagtcacatatggtcttttacatctaaattaatgaaaattaaactaaaaaatttagctcctcagtcacactagttatattccaagtactcagtaatcacatgtggctagttgctactgtattggacaacagagataggaaaacatttctatcatcacagaaagttcaattggactctattgctttggagggaattcctggctccatattctttctgggatgacttatattctttgaattccagggcccactttgggttttaggaggcctaattttatgcctctgagaaaaacgaacacacatttgacttatcctccctcctaactccaaagttccttccctaaaggtgtattttcagtatggtagtataggtttacacctcagatgttatgga

SEQ ID NO: 17195 - DNA, 435 bp, Homo sapiens
ttactagggatggacactaagcagaaagatttctgagtatctattcatcttccccaatcagacagtcctttaaatttaaagaagaatgcctgacccttaagacagggaggttcatcatatttcccattctgacagtttggaatgaaaggacacataaattattattattattattgaattagaggtatgggtatgatgactgaggtttctcagcagaagatttctgattccatgctttgcatcattagacagccaacagaagctgcacttagtggccgcgtgatgtgattgattggttagattgggaataaaacttttttgttgttttttaaatccaatattactttatttttatttaattaacttacattcaaatgcaattgatcatatgattttctaattttaggattaaaatatatatgaagataagtttgg

SEQ ID NO: 17196 - DNA, 407 bp, Homo sapiens
tttctgttttcaggaatgacgagtcctttttgtaatgccaataatacatgaccattcagtctcagttttagtacttttagtgatagcaagttcattaccgcacaaaccagcctatgtcatatttgaagagctttgttggaatattttcttactttgcccctaaatcatccttctatccatatgtctctgaaatcacacaagtgcaattctcttccagttttcagttcttcgaatattatgaaaacataattatttcacaacagttttctttctgaatagaggggattgtcttcacagccctgtcttctgtagcatctgcttggaggcctcttggcaccctgaatactgtcctagggaaattgtctagtttacctcacttttagggcttcgatgccaccaaaaaaaaa

SEQ ID NO: 17197 - DNA, 286 bp, Homo sapiens
atcttccttttagtttggaccaccctttctcctgatggaagggctaaaacttcctttgagtcccgaggcctccaggagcaggacagctggccccaattattcccataaacaacttctgttctaaaccctgtctgcctggcattcttatttgttcactctactgaccggtttgctttcatatttgcctgataagacagaagattcctggcctagcgtggctttctatgggatgatggaaagtgtgtggggcccattttttctctttctgacacatagcttatacatt

SEQ ID NO: 17198 - DNA, 702 bp, Homo sapiens
cccggacccagcagccgtttcacgccaatagatagggcgcatgcgagcaaatcctcctcggctctctagcgtgactttcccaaggggccacgccagcttgccttctgattggtccagctggtgggttgtcttccgccatctttgatcagggcactaaggatgctcccgacggccttcacagtgacggcggagaccctgccccgccagctgctcagtacgtgccgcgtacccgtgcgagccaagtgtgagtccgggcgagcgcctgcggagctagcactgggcccagaatgagagggaggcggaggagcagcgatcacgtggttttagggactgtctaataattccacgccagcattgccggtgtttcagggggtgggaaccgctgcgttccccatcaacttttctcccacccaccaccctccccaacctacaagcccagctcagcttgaggtaactgctgaccggactgtcctatacagccctacaagacagaggcgcctagggctgaaagcgggggcctccgtagggagccagcgggggcctcaatagttactcattttctctacctttgatgaaaataagagctaattcttaataaggcctaccgggtatcacgcaaaaaccctgtgcttactattatactttgggttgttgcaaagattaaaggaaataagccgtgcaaagcgcttaagagcttggtat

SEQ ID NO: 17199 - DNA, 608 bp, Homo sapiens
tagcacaaagttattaacaggccaggaagaccttgtttctttcaggcttccataatgggtttgaaagaaaacacggattcttctacagcaacagagttaaagaaatagtcatagtcattcttccacgatctttgtagtctagcttgaatttcaaactgtgtccttccttactccagagagggagcaagtgtttcagctgcatgtggaactaggtaagcttcagtggcctcagaactccaggcccctcacggagatcaccctgaacaatgcccagtttttcatgcaggttttgtcctatgaccagttaactacatgttcaataaataaatgtcaaagaaataaatgcgtgaaaaggcaaccagttcatcatcttatgattaggttttcttgattagggatgtgtttagtacagctgaatgaacaagttcacccagctgctggtgacagaaacccaactcaaactagctgatgaaaaacagaactatacagatcaatgaatctctccccctttttcagcctcactgcacctctcccacccctacttccggtaccctcttcttgtcggactctctatgctttgccccctctctccctcgcttgcgccttcc

SEQ ID NO: 17200 - DNA, 666 bp, Homo sapiens
tagcacaaagttattaacaggccaggaagaccttgtttctttcaggcttccataatgggtttgaaagaaaacacggattcttctacagcaacagagttaaagaaatagtcatagtcattcttccacgatctttgtagtctagcttgaatttcaaactgtgtccttccttactccagagagggagcaagaaaaaaaacctggatgctttgaagggatctgccactatttaaaaggggattaggattctgtttcagctgcatgtggaactaggtaagcttcagtggcctcagaactccaggcccctcacggagatcaccctgaacaatgcccagtttttcatgcaggttttgtcctatgaccagttaactacatgttcaataaataaatgtcaaagaaataaatgcgtgaaaaggcaaccagttcatcatcttatgattaggttttcttgattagggatgtgtttagtacagctgaatgaacaagttcacccagctgctggtgacagaaacccaactcaaactagctgatgaaaaacagaactatacagatcaatgaatctctccccctttttcagcctcactgcacctctcccacccctacttccggtaccctcttcttgtcggactctctatgctttgccccctctctccctcgcttgcgccttcc

SEQ ID NO: 17201 - DNA, 1464 bp, Homo sapiens
acattaatttgcatttataccattttctttacaaagtgctttaatgtaaactcatctaccaatttagactaactcttagtactaagtttaatgttaatttaatgactaactcatctaccaattaaccctatagataacttttctgggtattttccccattttacattagagagtattgaaacttaaaaaggactcgtgatttatccagtgatccaaagtgtgtatttcataaacacatacacacagtgcgtgcattgtttaggcatacgttactttccacagtatctcaaatgccttttacatgaatcccatactatcaaaaattggtgataacctaaaatgtagtgcaataatacaataaggcatttattttcttagagttgagttgatggatttttagatttttattcaagatcttttgtttgtttggctttgcttggaagatactgatttattctttcatattaaagcaaatcctgccaaagcactaaatagaccgttttgggttggttttttagtgtaatattaatacgggtccacaggtgaattgagtctgttcagatgtaaggattgaaccttatgttatcaatccttgacaccatccttgataacttacggatatcaaggatcaaaccatatggtatcaatattgttagttattcagcataaacagaattatttcccaatacttgatctgaaatatttttaatggtcttacttgaaacttatattctttctgggagtgatgtttttatcatttttccatggagacaggttctaactctgttgcccaggctgcagtgcagtgatgtgatcatagctcactgcagcctgaaactcctgggttcaagtgatctctggcctcagcctcccaagtagttggaacttcagatacgtgccaccacaaccagctaatttattttttagagatgaggtctcgctatgttgcccagtctggtctcctagcctcaagtgatcttcccatctcagccttcagttggagatttctgatttatgttaatataagaaagctgttgatagtttatcataaaggcatttccttatattgctagtataattttctgaaaattagtggtaagatgtgacaatacatcagctgcatccacaggaaaggggaattaattagcagttctgattctgggtacacttgttatgatcataatttacataatattttcatgaaaatggtcagctcacagctatgaaatgtaaatgatagaaatctttaatcatgtatatggatagacttgttactatttccttatcaaagtgtcactttagggacagcagttgcccctttaaattaaggatcaccacaataatactctgccatgtcatggaatcagcatgaagccctggatgctatccaagattctgtttcagttctcattttgtatattcttgtttgtgctcttgattaaaatatctccttatatatagctg

SEQ ID NO: 17202 - DNA, 449 bp, Homo sapiens
tgtttatttccctccagccatactgagatttttctcttcagaaagcatccacacatcctcttgtgtcagcacttttagacatactgctccttttgctaggaaagctcccctcactatctttcactctgtgtaggaagaatgctttgcatgctttgttccctctctgcattcaagtctctgctctggtcacctcttcaaagaggccttcgctcacccaactgcacctaaaatatcaccatctgccctgttgttttcatcctccaaccttagtgtgtactccatttctcccttctagaatatgagctccatgaaggtagaagctcttgtaaccgcattgctgagagcaggatctagggtccagtgccaggaaggcattcactgcctccatatgccctctgagaagcagcattttctctgcagagcctgcagacaaggttatctccacttgg

SEQ ID NO: 17203 - DNA, 4324 bp, Homo sapiens
tgggcaggccccgggccgcatgcggaccctagaggcaaccagcgggctggatccgcacagcggccctggggaatggatcgtgtacaggggacaaagctacacatgtctttcattttggaggggggaaaaaagaaaaaacggaaatgaaagattgaaaatgtgtgggctctccgtcctttcctttgctcctgcgcgctctctggggtggggggctcagcgagcttcaagaggtggccgagattcccccaccccgcccccagatccccgggagaggtcagcacggcccctcccgtgggtgtcacagagaccgataccggtcccgctccccgggaaggagtgggtctgggtccagtccgcaggaccccctcgcggatgctgacgcagaatggagttgaggtgggggcagcgctggaccctagggcccctgcctgcctcctggggagcccggtgacccaggcagccctggtgaggccgcaggagtctgggccctagcgacgcccccgggctcccacaggacgaatgtagacggtgaggccaaggacgccctgctgccctcgggactgtccctccagcccccagctttccgtggttattgggccccctctgcagaggggcaggggagcccaccctggatcctgaggcgccgagcttgagggaccccagagctccagccaggccgctttctttgcggatggtgaagctgaggtcccgaggagggcaggggcaggtcccgggcgctcctcaggcaaagggagccgatttaggggctggggtcacaggaggcgcttctgcgacctctagggccctagagcccgggaggatgagagactgggggcctttcgtccacccctggggctgggcagacgctcagcctgtgcaacccgaagctgcttctgcccagtcccagccgcggcccctttaagagggggtggtgcttcagcctggcgccagggacgctgccagcatgcaggccccgacggaagccgagactgcgcttcgtgcgaggcccgggcagcatcggcggcgtggtcagagcgagtctcggagaagatgtggtggcttccgtttgttggtggaggaggtggcaggcctcggcgggtaacccagagaacacagccgaagtggaatgtggggacgtctgcgacaccggggacagagcaactgtggatgaagagggctacatctggttcctggggaggagtcatgacactatcaatgcctctgggtggtgaaggcattgattgtcctgaccccacagtttctgtcccatgacaaggaccagctgactaaggagctgcagcagcatgtaaagtcagtgacagccccatgaaacctcctcgacactccgaagtccagatcgcaggccccacctggaatgctctccttgcagcctgttcgaagactcatgagaccgtgctgcacactggacttcaaccatgagcttcaccgtctgtctcttccttcactaccttcgctctgcactaggccataagctctgtaggagaaggaactcatcacagtgcctgccccagacaggttgttcataagcacgtattgaaatatagaattcccaggcacctccaacagagagactggaccttgtgagacccaacaagaagccagtatttcagaactgatgaaaaatagcaaggatctagattagggggtatagtgggaatgaaatgggggactgggtgatgccccatatttgtcaacgactcatagtctttctccagagatgtcttcctcccctgtgttctttgtctcatcagctgccaccagcactcactccagccactaaagccagaaagttgaaagacctctgccctcatccggcccagcccccatccagccaaagacctgtcatttcaacctcacgcccaccccgctttccactcccactgctcctgccttagttcagaccaccaccgtcgctctcctacccagttcaagccaagctgacctggccagtggccttcaggccttcccttctccatcctgccatgtccatcctccacaggcagaacaggaagctgtcatgtaaaagtgcaggtctgctttggtccttctcctaaacccttcagtggcttcccggttccctttgggtcctggtacagattccttagcatggccagggaggacagccctccatgatcctcccctccctgagatgttcctcctgccccagcaccctgtgtttgagcccaagcccgccctgtggtgtcacgggaggcccagctcctctgcctggggtgccttgcctggcctaggaactgggaaaacttacctgcttccaagactcagctctagcacctcttcctgctgggtgttttccgatgccccccctctcgccacctcatggggaccccacagtcccctgaagagccttctgccccagtgcctcaccccactctttagacctgtttctgtttccatggctgccttgccttcttagaccacgggctcctgcagagcgggaccccatatctcagtcggctttgcattcccagtgcctggccgaaactgaggctggaatggtctcctattccataagctctcaataacccttgaaaaatgactggaatcctggacagcgccaaggcagcaactgggatgggagagtgatctgctgccctctcctggcaatgtgaggaattgtcctaagcacagacaactccctccctgccttgcacaagtgcaggatgggggaaactggaaaaggagctgatggaggattggggaggtggatgctgtctaaggagacaaactgaattgaggggttgctgggactctgccggctcacacgctattcccatgtcatgggcccaggggccaagtcagtgcttccaaaggagggtgcatcctgagagaggctctggctcccccaacaaaaccctaaactcttgaaggacatcttccttctcagtataccctattgctgtgttgttgtaactatcactgtaacttttattcacttcagtgggcgatcactgagtttttcctccattgttgtaaaacatgtgttttgctcttgtgtgtaaaatgactgtgaatttagccactgccttctcctgattttaactcagctttctactgctaggaggttatctctgttctgggtttctcagctttctatcaaaacccaaatactgtcattcctcggtatccgtaggggattggttccaggaacctcccttgaagataccaacattgcaggtgcccaagcccctgatagagaacagcgcagcatttgcagacaacctatgtacacactgcatgcactttcaatcagctctagattacttctgatacctaattcaatgtaaatgctgtgtcagtagttgtctagggaataatgacaagaagaaaattttgtacatgttcagtacgtaggaaaaagaaagagagatcagactgtcactgtgtctatgtagaaagggaagacataagagattccattttgaaaaagacctgtactttaaacagttgctttgctgagatgttgttaatttgtagctttgccccagccactttgccttagccactttgacccaacctggagctcacaaaaatatgtgttgtataaaatcaaggtttaagggatctagggctgtgcaggatatgccttgttaacaaaatgtttacaagcagtatacttggtaaaggtcatcgccattctctagtctcaataaaacaggagcacagtgcactgcggaaagccgcagggacctctgcccttgaaagtggggtattgtccaaggtttctccccatgtgatagtctgaaatatggctcgtgggatgagaaagacctgactgtgccccagcccgacacccataaagggtctgtgctgaggtggattagtaaaagaggaaagcctcttgcagttgagatagaggaaggccactgtctcctgcctgcccctgggaactgaatgtctcggtataaaacccgattgtacatttgttcaattctgagataggagaaaaaccgccctatggtgggaggcgagacatgtttgcagcaatgctgccttgttattctttactccgctgagatgtttgggtggagagaaacataaatctggcctacatgcacatccgggcatagtaccttcccttgaacttaatcatgacacagattcttttgctcacatgttttttgctgaccttctccttattatcaccctgctgtcctactacattcctttttgctgaaataatgaaaataatagtcaataaaaactgagggaactcaaaggccggtgccagtgcaggtccttggtgtgccgaatactggtcccctggacccactgttgtttctct

SEQ ID NO: 17204 - DNA, 1373 bp, Homo sapiens
attgacaatcctgcccatgttctcactcttgagagtgtggcactggggcagaagcagcaaagacgaccactgcatactttgcagctcccagacagaggcgcacttggcttccaatgcacaaggcccccttcgataacaccttttcagggtgcaggataatagagtaaagtgtgggtggactggagtgaagtgcagcccaggatgatagcaccagctcagaacgtcctcagcgaggccagcaacaatttggagaatattgagatggagctgtccaatgagccagagggtccctgagagatgagatggccttggcctggattccccacccctcactcacaaaagcagcttggtccatggagctggggagcactgttcaataataatgaacagcccaccaggcatgcctcccatcagagcccagtgagggggcaggtgagcgctgtctccccagcacctgctcctgcctgggccagtggccctgacccttctgacaaatccctaagtgcgccaactgctacgtggtttctcaccatctgcagcccaaactctgcctccaaagcctagtggatccacccaatgggccttacctcccactctccccacacattctgctgtaactgagactcgcctgctccctgggctgcaacgctcatgtttacctggacttcctcacaccgtccccaccacctgaattatcctgctcctttccaccccgaacaatggtaggaacagaagcagcacagaagagatagcttcaagtcctccactaaacagagagtgcctgcataatcccacaaacgaacataaagttaaccatcttacagttacagaggcccgacgtccacagttagcctcagccaggctgaagtcacagtgtcagcacggctggctcgttctggagctcctgggagacgtggctcccttgcctttcccagctcctagaggcatcatgagttccttggcttatggtcccatagcacatggacttctgcttctgtggccacatctccatctttgactctggccctccagagtccctcttttgaggactcctgtgattacattaccagacgttgtaagggaagcatggcaccagcatctgcttctgatgagggcctcaggaagcttcccatcatggcatatggcaaagagggagcaagcaaatcatggtgagaaaggaagcaagagtgagcgggaggaaatgccaggctcttttgaacaaccggatctcgcatgaagtcatagagtgagaactcattcattactgcaggacaacaccaagtcatttgtgaagattccatccccgtgacccaaacacctccagtgttggaggtgtggcctaccccggagttcgacgcggccgcaaatttagg

SEQ ID NO: 17205 - DNA, 426 bp, Homo sapiens
cttttgttttttgttttaccactcttgtttacaccccatgtaccccaaaaggtgggagggaagggaggctggcagaccgatggattttaatgcctataaatggggagactgcgcttcgtgcgaggcccgggcagcatcggcggcgtggtcagagcgagtctcggagaagatgtggtggcttccgtttgttggtggaggaggtggcaggcctcggcgctatgtttcccagtgtcctctgggtgtttcccagagccaccagaaacggataaatctctgccataggagttttagcccattcagaggccttgctcccccccatttgggacattcccttggatttgacccagtcaggaagagatgggagaaaagtgaaaccaccaccattaacccccagcattaaccaaccaaaagagtttagccaaacca

SEQ ID NO: 17206 - DNA, 3400 bp, Homo sapiens
tgggcaggccccgggccgcatgcggaccctagaggcaaccagcgggctggatccgcacagcggccctggggaatggatcgtgtacaggggacaaagctacacatgtctttcattttggaggggggaaaaaagaaaaaacggaaatgaaagattgaaaatgtgtgggctctccgtcctttcctttgctcctgcgcgctctctggggtggggggctcagcgagcttcaagaggtggccgagattcccccaccccgcccccagatccccgggagaggtcagcacggcccctcccgtgggtgtcacagagaccgataccggtcccgctccccgggaaggagtgggtctgggtccagtccgcaggaccccctcgcggatgctgacgcagaatggagttgaggtgggggcagcgctggaccctagggcccctgcctgcctcctggggagcccggtgacccaggcagccctggtgaggccgcaggagtctgggccctagcgacgcccccgggctcccacaggacgaatgtagacggtgaggccaaggacgccctgctgccctcgggactgtccctccagcccccagctttccgtggttattgggccccctctgcagaggggcaggggagcccaccctggatcctgaggcgccgagcttgagggaccccagagctccagccaggccgctttctttgcggatggtgaagctgaggtcccgaggagggcaggggcaggtcccgggcgctcctcaggcaaagggagccgatttaggggctggggtcacaggaggcgcttctgcgacctctagggccctagagcccgggaggatgagagactgggggcctttcgtccacccctggggctgggcagacgctcagcctgtgcaacccgaagctgcttctgcccagtcccagccgcggcccctttaagagggggtggtgcttcagcctggcgccagggacgctgccagcatgcaggccccgacggaagccgagactgcgcttcgtgcgaggcccgggcagcatcggcggcgtggtcagagcgagtctcggagaagatgtggtggcttccgtttgttggtggaggaggtggcaggcctcggcgggtaacccagagaacacagccgaagtggaatgtggggacgtctgcgacaccggggacagagcaactgtggatgaagagggctacatctggttcctggggaggagtcatgacactatcaatgcctctgggtggtgaaggcattgattgtcctgaccccacagtttctgtcccatgacaaggaccagctgactaaggagctgcagcagcatgtaaagtcagtgacagccccatgtgccttgcctggcctaggaactgggaaaacttacctgcttccaagactcagctctagcacctcttcctgctgggtgttttccgatgccccccctctcgccacctcatggggaccccacagtcccctgaagagccttctgccccagtgcctcaccccactctttagacctgtttctgtttccatggctgccttgccttcttagaccacgggctcctgcagagcgggaccccatatctcagtcggctttgcattcccagtgcctggccgaaactgaggctggaatggtctcctattccataagctctcaataacccttgaaaaatgactggaatcctggacagcgccaaggcagcaactgggatgggagagtgatctgctgccctctcctggcaatgtgaggaattgtcctaagcacagacaactccctccctgccttgcacaagtgcaggatgggggaaactggaaaaggagctgatggaggattggggaggtggatgctgtctaaggagacaaactgaattgaggggttgctgggactctgccggctcacacgctattcccatgtcatgggcccaggggccaagtcagtgcttccaaaggagggtgcatcctgagagaggctctggctcccccaacaaaaccctaaactcttgaaggacatcttccttctcagtataccctattgctgtgttgttgtaactatcactgtaacttttattcacttcagtgggcgatcactgagtttttcctccattgttgtaaaacatgtgttttgctcttgtgtgtaaaatgactgtgaatttagccactgccttctcctgattttaactcagctttctactgctaggaggttatctctgttctgggtttctcagctttctatcaaaacccaaatactgtcattcctcggtatccgtaggggattggttccaggaacctcccttgaagataccaacattgcaggtgcccaagcccctgatagagaacagcgcagcatttgcagacaacctatgtacacactgcatgcactttcaatcagctctagattacttctgatacctaattcaatgtaaatgctgtgtcagtagttgtctagggaataatgacaagaagaaaattttgtacatgttcagtacgtaggaaaaagaaagagagatcagactgtcactgtgtctatgtagaaagggaagacataagagattccattttgaaaaagacctgtactttaaacagttgctttgctgagatgttgttaatttgtagctttgccccagccactttgccttagccactttgacccaacctggagctcacaaaaatatgtgttgtataaaatcaaggtttaagggatctagggctgtgcaggatatgccttgttaacaaaatgtttacaagcagtatacttggtaaaggtcatcgccattctctagtctcaataaaacaggagcacagtgcactgcggaaagccgcagggacctctgcccttgaaagtggggtattgtccaaggtttctccccatgtgatagtctgaaatatggctcgtgggatgagaaagacctgactgtgccccagcccgacacccataaagggtctgtgctgaggtggattagtaaaagaggaaagcctcttgcagttgagatagaggaaggccactgtctcctgcctgcccctgggaactgaatgtctcggtataaaacccgattgtacatttgttcaattctgagataggagaaaaaccgccctatggtgggaggcgagacatgtttgcagcaatgctgccttgttattctttactccgctgagatgtttgggtggagagaaacataaatctggcctacatgcacatccgggcatagtaccttcccttgaacttaatcatgacacagattcttttgctcacatgttttttgctgaccttctccttattatcaccctgctgtcctactacattcctttttgctgaaataatgaaaataatagtcaataaaaactgagggaactcaaaggccggtgccagtgcaggtccttggtgtgccgaatactggtcccctggacccactgttgtttctct

SEQ ID NO: 17207 - DNA, 1671 bp, Homo sapiens
tgggcaggccccgggccgcatgcggaccctagaggcaaccagcgggctggatccgcacagcggccctggggaatggatcgtgtacaggggacaaagctacacatgtctttcattttggaggggggaaaaaagaaaaaacggaaatgaaagattgaaaatgtgtgggctctccgtcctttcctttgctcctgcgcgctctctggggtggggggctcagcgagcttcaagaggtggccgagattcccccaccccgcccccagatccccgggagaggtcagcacggcccctcccgtgggtgtcacagagaccgataccggtcccgctccccgggaaggagtgggtctgggtccagtccgcaggaccccctcgcggatgctgacgcagaatggagttgaggtgggggcagcgctggaccctagggcccctgcctgcctcctggggagcccggtgacccaggcagccctggtgaggccgcaggagtctgggccctagcgacgcccccgggctcccacaggacgaatgtagacggtgaggccaaggacgccctgctgccctcgggactgtccctccagcccccagctttccgtggttattgggccccctctgcagaggggcaggggagcccaccctggatcctgaggcgccgagcttgagggaccccagagctccagccaggccgctttctttgcggatggtgaagctgaggtcccgaggagggcaggggcaggtcccgggcgctcctcaggcaaagggagccgatttaggggctggggtcacaggaggcgcttctgcgacctctagggccctagagcccgggaggatgagagactgggggcctttcgtccacccctggggctgggcagacgctcagcctgtgcaacccgaagctgcttctgcccagtcccagccgcggcccctttaagagggggtggtgcttcagcctggcgccagggacgctgccagcatgcaggccccgacggaagccgagactgcgcttcgtgcgaggcccgggcagcatcggcggcgtggtcagagcgagtctcggagaagatgtggtggcttccgtttgttggtggaggaggtggcaggcctcggcgggtaacccagagaacacagccgaagtggaatgtggggacgtctgcgacaccggggacagagcaactgtggatgaagagggctacatctggttcctggggaggagtcatgacactatcaatgcctctgggtggtgaaggcattgattgtcctgaccccacagtttctgtcccatgacaaggaccagctgactaaggagctgcagcagcatgtaaagtcagtgacagccccatcatgtaagtacccgaggaagctaagtgagggcagatggaaggggtcagttcccagtactcctgccccatgtctcctagggtggctgtgcagggggaagcttggagactcacagtagtggcttttttttctgcataagaagcaatttggcttagggatggggtgttctcttaaaaatgtatttaaactgacaaattagaacaatgatctattaaaagccaggagacatagattacaatcctaattcaggtgattacacacaacatatgttcttaagcactttctatactgctggccactttataagagtgtctaagataaatctagtcatacaatgctgaactc

SEQ ID NO: 17208 - DNA, 2006 bp, Homo sapiens
tgggcaggccccgggccgcatgcggaccctagaggcaaccagcgggctggatccgcacagcggccctggggaatggatcgtgtacaggggacaaagctacacatgtctttcattttggaggggggaaaaaagaaaaaacggaaatgaaagattgaaaatgtgtgggctctccgtcctttcctttgctcctgcgcgctctctggggtggggggctcagcgagcttcaagaggtggccgagattcccccaccccgcccccagatccccgggagaggtcagcacggcccctcccgtgggtgtcacagagaccgataccggtcccgctccccgggaaggagtgggtctgggtccagtccgcaggaccccctcgcggatgctgacgcagaatggagttgaggtgggggcagcgctggaccctagggcccctgcctgcctcctggggagcccggtgacccaggcagccctggtgaggccgcaggagtctgggccctagcgacgcccccgggctcccacaggacgaatgtagacggtgaggccaaggacgccctgctgccctcgggactgtccctccagcccccagctttccgtggttattgggccccctctgcagaggggcaggggagcccaccctggatcctgaggcgccgagcttgagggaccccagagctccagccaggccgctttctttgcggatggtgaagctgaggtcccgaggagggcaggggcaggtcccgggcgctcctcaggcaaagggagccgatttaggggctggggtcacaggaggcgcttctgcgacctctagggccctagagcccgggaggatgagagactgggggcctttcgtccacccctggggctgggcagacgctcagcctgtgcaacccgaagctgcttctgcccagtcccagccgcggcccctttaagagggggtggtgcttcagcctggcgccagggacgctgccagcatgcaggccccgacggaagccgagactgcgcttcgtgcgaggcccgggcagcatcggcggcgtggtcagagcgagtctcggagaagatgtggtggcttccgtttgttggtggaggaggtggcaggcctcggcgggtaacccagagaacacagccgaagtggaatgtggggacgtctgcgacaccggggacagagcaactgtggatgaagagggctacatctggttcctggggaggagtcatgacactatcaatgcctctgggtggtgaaggcattgattgtcctgaccccacagtttctgtcccatgacaaggaccagctgactaaggagctgcagcagcatgtaaagtcagtgacagccccatgttgtaagggaagcatggcaccagcatctgcttctgatgagggcctcaggaagcttcccatcatggcatatggcaaagagggagcaagcaaatcatggtgagaaaggaagcaagagtgagcgggaggaaatgccaggctcttttgaacaaccggatctcgcatgaagtcatagagtgagaactcattcattactgcaggacaacaccaagtcatttgtgaagattccatccccgtgacccaaacacctccgggtaggcccacctccaacactggaggtcacatttcaacatgagatttggaggggacaaacatctaaaccatatcaagatttttcatttatttgtctaaattgattcctatgtatttcatatttttgtagctattgtaaatgagattgctttcttgatttcttttttcagattattcaccattgacatatataaatgctactaatttctgtatgttgagtttgtatccagcaacttactgaattagtttaccagttctagcagttttttggtggagtctttaggtttttctaagtgtaagttcatgtcatctgtgaacaaggctatgatttctttctttccaattttagtactctttatttttttcccttgcctaattgctcttccaggacttccaatattatgttaaataaaagtggtgaaaagtga

SEQ ID NO: 17209 - DNA, 1750 bp, Homo sapiens
attgacaatcctgcccatgttctcactcttgagagtgtggcactggggcagaagcagcaaagacgaccactgcatactttgcagctcccagacagaggcgcacttggcttccaatgcacaaggcccccttcgataacaccttttcagggtgcaggataatagagtaaagtgtgggtggactggagtgaagtgcagcccaggatgatagcaccagctcagaacgtcctcagcgaggccagcaacaatttggagaatattgagatggagctgtccaatgagccagagggtccctgagagatgagatggccttggcctggattccccacccctcactcacaaaagcagcttggtccatggagctggggagcactgttcaataataatgaacagcccaccaggcatgcctcccatcagagcccagtgagggggcaggtgagcgctgtctccccagcacctgctcctgcctgggccagtggccctgacccttctgacaaatccctaagtgcgccaactgctacgtggtttctcaccatctgcagcccaaactctgcctccaaagcctagtggatccacccaatgggccttacctcccactctccccacacattctgctgtaactgagactcgcctgctccctgggctgcaacgctcatgtttacctggacttcctcacaccgtccccaccacctgaattatcctgctcctttccaccccgaacaatggtaggaacagaagcagcacagaagagatagcttcaagtcctccactaaacagagagtgcctgcataatcccacaaacgaacataaagttaaccatcttacagttacagaggcccgacgtccacagttagcctcagccaggctgaagtcacagtgtcagcacggctggctcgttctggagctcctgggagacgtggctcccttgcctttcccagctcctagaggcatcatgagttccttggcttatggtcccatagcacatggacttctgcttctgtggccacatctccatctttgactctggccctccagagtccctcttttgaggactcctgtgattacattaccagacgttgtaagggaagcatggcaccagcatctgcttctgatgagggcctcaggaagcttcccatcatggcatatggcaaagagggagcaagcaaatcatggtgagaaaggaagcaagagtgagcgggaggaaatgccaggctcttttgaacaaccggatctcgcatgaagtcatagagtgagaactcattcattactgcaggacaacaccaagtcatttgtgaagattccatccccgtgacccaaacacctccgggtaggcccacctccaacactggaggtcacatttcaacatgagatttggaggggacaaacatctaaaccatatcaagatttttcatttatttgtctaaattgattcctatgtatttcatatttttgtagctattgtaaatgagattgctttcttgatttcttttttcagattattcaccattgacatatataaatgctactaatttctgtatgttgagtttgtatccagcaacttactgaattagtttaccagttctagcagttttttggtggagtctttaggtttttctaagtgtaagttcatgtcatctgtgaacaaggctatgatttctttctttccaattttagtactctttatttttttcccttgcctaattgctcttccaggacttccaatattatgttaaataaaagtggtgaaaagtga

SEQ ID NO: 17210 - DNA, 1879 bp, Homo sapiens
tgggcaggccccgggccgcatgcggaccctagaggcaaccagcgggctggatccgcacagcggccctggggaatggatcgtgtacaggggacaaagctacacatgtctttcattttggaggggggaaaaaagaaaaaacggaaatgaaagattgaaaatgtgtgggctctccgtcctttcctttgctcctgcgcgctctctggggtggggggctcagcgagcttcaagaggtggccgagattcccccaccccgcccccagatccccgggagaggtcagcacggcccctcccgtgggtgtcacagagaccgataccggtcccgctccccgggaaggagtgggtctgggtccagtccgcaggaccccctcgcggatgctgacgcagaatggagttgaggtgggggcagcgctggaccctagggcccctgcctgcctcctggggagcccggtgacccaggcagccctggtgaggccgcaggagtctgggccctagcgacgcccccgggctcccacaggacgaatgtagacggtgaggccaaggacgccctgctgccctcgggactgtccctccagcccccagctttccgtggttattgggccccctctgcagaggggcaggggagcccaccctggatcctgaggcgccgagcttgagggaccccagagctccagccaggccgctttctttgcggatggtgaagctgaggtcccgaggagggcaggggcaggtcccgggcgctcctcaggcaaagggagccgatttaggggctggggtcacaggaggcgcttctgcgacctctagggccctagagcccgggaggatgagagactgggggcctttcgtccacccctggggctgggcagacgctcagcctgtgcaacccgaagctgcttctgcccagtcccagccgcggcccctttaagagggggtggtgcttcagcctggcgccagggacgctgccagcatgcaggccccgacggaagccgagactgcgcttcgtgcgaggcccgggcagcatcggcggcgtggtcagagcgagtctcggagaagatgtggtggcttccgtttgttggtggaggaggtggcaggcctcggcgggtaacccagagaacacagccgaagtggaatgtggggacgtctgcgacaccggggacagagcaactgtggatgaagagggctacatctggttcctggggaggagtcatgacactatcaatgcctctgggtggtgaaggcattgattgtcctgaccccacagtttctgtcccatgacaaggaccagctgactaaggagctgcagcagcatgtaaagtcagtgacagccccatggcattgtataaacatcaggtgtctatggaacaaatgcaaagagagtacacaaaagaagcaaaagggactgtctttgcacgatgcagaaaattagacctgcatggcacgtttagccctaaatttaggaatctaccccactagacaggaaatatcttttcaattaacaaatggcctctccactccttctttccttggaaagtttactgaacaatgattgggcaccgtaaactttgttttcatgtcaaacagtacctgccctccagtggtttatcatctattttgtgggacatggcacaaaggaagaaaaactgtttggtcctcaggaagtctgtaacctcaccagacgaggcatccatctcacacttgcttctccgggaccactagagagccacatgagaccatgtgcaatgaaatgctgaattcacaaccacttaccactgaaaatgagcagcacagaaaatcagtgtttttagttaggtggcgctatcagggcaggcttcctgaaagaagctggctttgaactgccctaggctgggaagaagtagaaaac

SEQ ID NO: 17211 - DNA, 1747 bp, Homo sapiens
tgggcaggccccgggccgcatgcggaccctagaggcaaccagcgggctggatccgcacagcggccctggggaatggatcgtgtacaggggacaaagctacacatgtctttcattttggaggggggaaaaaagaaaaaacggaaatgaaagattgaaaatgtgtgggctctccgtcctttcctttgctcctgcgcgctctctggggtggggggctcagcgagcttcaagaggtggccgagattcccccaccccgcccccagatccccgggagaggtcagcacggcccctcccgtgggtgtcacagagaccgataccggtcccgctccccgggaaggagtgggtctgggtccagtccgcaggaccccctcgcggatgctgacgcagaatggagttgaggtgggggcagcgctggaccctagggcccctgcctgcctcctggggagcccggtgacccaggcagccctggtgaggccgcaggagtctgggccctagcgacgcccccgggctcccacaggacgaatgtagacggtgaggccaaggacgccctgctgccctcgggactgtccctccagcccccagctttccgtggttattgggccccctctgcagaggggcaggggagcccaccctggatcctgaggcgccgagcttgagggaccccagagctccagccaggccgctttctttgcggatggtgaagctgaggtcccgaggagggcaggggcaggtcccgggcgctcctcaggcaaagggagccgatttaggggctggggtcacaggaggcgcttctgcgacctctagggccctagagcccgggaggatgagagactgggggcctttcgtccacccctggggctgggcagacgctcagcctgtgcaacccgaagctgcttctgcccagtcccagccgcggcccctttaagagggggtggtgcttcagcctggcgccagggacgctgccagcatgcaggccccgacggaagccgagactgcgcttcgtgcgaggcccgggcagcatcggcggcgtggtcagagcgagtctcggagaagatgtggtggcttccgtttgttggtggaggaggtggcaggcctcggcgggtaacccagagaacacagccgaagtggaatgtggggacgtctgcgacaccggggacagagcaactgtggatgaagagggctacatctggttcctggggaggagtcatgacactatcaatgcctctgggtaggtgtgactgatgccaggctggctgttgtcatcctcatatgcctcctgggatcttgcttgcccagacagtctttcatgcattggtgacaggaccctcagcccaatttgaatagagccatgtctacaatgccctgatcccaggttttggtgcacctccctaacccctgcatacagaagaatcaatcaaaatgaaattcaagagtgtcttgaagacataataagacactgtgcaatttagagaagggccttggaatgagactgagaaggaagactctgttttggtccccataggttcagggagcttatttcatgtgtgtgctcctctaatgcagcacaggatgtcacagaacaaacatagtaataataacaactaacctttagctattgtttattttttatttattattattattaatctattataaatctatgaatacaacaaatctattaagatagattattataaatctattatttgttataattatttagctaacctggagtacttactatgtgaaa

SEQ ID NO: 17212 - DNA, 1493 bp, Homo sapiens
tgggcaggccccgggccgcatgcggaccctagaggcaaccagcgggctggatccgcacagcggccctggggaatggatcgtgtacaggggacaaagctacacatgtctttcattttggaggggggaaaaaagaaaaaacggaaatgaaagattgaaaatgtgtgggctctccgtcctttcctttgctcctgcgcgctctctggggtggggggctcagcgagcttcaagaggtggccgagattcccccaccccgcccccagatccccgggagaggtcagcacggcccctcccgtgggtgtcacagagaccgataccggtcccgctccccgggaaggagtgggtctgggtccagtccgcaggaccccctcgcggatgctgacgcagaatggagttgaggtgggggcagcgctggaccctagggcccctgcctgcctcctggggagcccggtgacccaggcagccctggtgaggccgcaggagtctgggccctagcgacgcccccgggctcccacaggacgaatgtagacggtgaggccaaggacgccctgctgccctcgggactgtccctccagcccccagctttccgtggttattgggccccctctgcagaggggcaggggagcccaccctggatcctgaggcgccgagcttgagggaccccagagctccagccaggccgctttctttgcggatggtgaagctgaggtcccgaggagggcaggggcaggtcccgggcgctcctcaggcaaagggagccgatttaggggctggggtcacaggaggcgcttctgcgacctctagggccctagagcccgggaggatgagagactgggggcctttcgtccacccctggggctgggcagacgctcagcctgtgcaacccgaagctgcttctgcccagtcccagccgcggcccctttaagagggggtggtgcttcagcctggcgccagggacgctgccagcatgcaggccccgacggaagccgagactgcgcttcgtgcgaggcccgggcagcatcggcggcgtggtcagagcgagtctcggagaagatgtggtggcttccgtttgttggtggaggaggtggcaggcctcggcgggtaacccagagaacacagccgaagtggaatgtggggacgtctgcgacaccggggacagagcaactgtggatgaagagggctacatctggttcctggggaggagtcatgacactatcaatgcctctgggtggtgaaggcattgattgtcctgaccccacagtttctgtcccatgacaaggaccagctgactaaggagctgcagcagcatgtaaagtcagtgacagccccataatgaatacaaccaatcaagacagataacgccaagtgctggagaggaggtggagaaatcgaaaccctcatacactgccagtgggaatataaaatggtgcagccacttttttggaagatagtatgtcagtttcttaaaatgttaaaaataaaactgctttaaaccc

SEQ ID NO: 17213 - DNA, 261 bp, Homo sapiens
gaagccctggaggctgcctgaatttgtgccaataagtacatgatgaaaagttgcggcgaggatggctttcatatccaagtgcggctccaccccttccacgttatgcacatcaacaagacgtcctgtgctgggctgacaggctccaaacaggtatatgaggtgcctttgaaaagccccagggcactttggccagggttcacattggtacacgacatcgtgtccatcgacaccaagtctgcagcacagggcgcatgttattga

SEQ ID NO: 17214 - DNA, 345 bp, Homo sapiens
gtgtgtcaagattgcgccattgcactccagcctgggcaacgagcgaaactccatttcaaaaaagaaagtagagtggtagagaaagttggaagaatgaattttttaaatgagggtaataataaatgtatgagtctgcggggaggcagtagagattgaaaactgaaatagaatttggtcgttattaacattttgaggctgggtatggtggcccatgcttgtaatgccagcactttgggaggctgaggcaagtggattgctcgagtccaggagttcaagaccagcctgggcaacatggtgaaaccctgtctctaccaaaaatacacaaattagctgggagtggtggca

SEQ ID NO: 17215 - DNA, 2441 bp, Homo sapiens
accgggaggcggggccaggggtcgcaaggcggaagagcccctctcgcctccgacccggcgcctcgcactccgttcactctcggttcctcttcgcattcttgccagtcccgtagcgctgggctggtttcctccgaggtctctaagagcctcctactgcgccccgctcgccgcccggaagcccccagcccctcaaggacgcatcacctaatgccgcggtcacggccaccgtcacaagcgcccccagccccaccccaccccggcctgcccgccgtccttctcccgcccccgcccctgcctgccagctccaccgggccgtaggtgcggacgacctcaaaattcctcggcccgcgaaggccgccagctgcggggaggggaggggaggcgcggtcccgcagcgcccccaggctcatgtcccaggttgtgcctttttagccaagaagcatggaagtcattcacggcaggccctactgttgcagggagcttgaaggagctgacatactgtccaacaccttttactctaatgaattgcacaaccccctccagacggttactcgcccaactgcctcagaggacaggtatcaggaattaagggagtcacttcaacaatgtaggcttccttggggcgctgaaagagagtatggtgggataataccgatttcactccccgaggaccacaggccaaagtatgagcctcctcgtgtcatgggcaaaggacatcagcattatggatttggtggagaaacctggccaagaaagcttcctgttgaacaattttattatttgacccagaacaaaaaaagtgatgtctatggaaatgattctttgatacccaagccgcctaattcaacagtaggagagatctgcttgccatatccaattgaacacccctaccacacacacatctgtcgcggcaccatgttccccaccttcacgtcacctgaggacctctacacgggcattaaagcccgcacccagcagccctttcctcccacggtgccaagcaaggcttatgattcaacagttttgaagacaagaggtaatccttatagatatgaactgattgatattcccatggattcaaagaagaaagcactgacttggccaggtcaaggtgtatattatgattttcccagaggtgttgagaaaaataagccagtattctacccaaaacctcctaaaaccttcgctcctaacacttctttaaattcatgggaccctatttgctctgccaaagaagccaacatacaaagaaatcttgagaggtcccactggctcacttcgtacactcatgattttacaggtctggggcccatggacccccttgaactggatgattaccatgaaaagatggtagcagagttaacacgaaagataggatttgacccagagccgcaagaaaaattccaccctgtcttcaaacctcccagaccgttggaaggacgaattgcccgattaattcagaaccgacgttctctggaggctatagtccagcaaagaccacgttcctgtccagattgtactcctagagttttgtgtaattttcatacctttgtacccagttctaaagaaatggtggcacttagtgataacataccagccggtgtgacccataaaaaccaggatattgaagagaagatcatagaagaacagagcttgctgtctacctatgaactcccatcttgttacccaacaaaagacctaactagcatttatgacataaagccatttccaaaaatcacagatactaaaaagacagaagatttatactggagacagcagtcactaaaaacccaacccacaccttactgtaaaccagaccactggattcactatgaaaatcttaaatctcccctacgtgatcagtataatatgtgtccagaccctgttagccttagtaaacctagtgttttacaaaataaacaagacacggaagctttcactttagaacattttttaagtaagccagaagaagagttgttcttgaatatggaaaacaatgaagaaacaagacctgttcttggttggattcctagagctggagtgaccaaacctcagaccaacctgctggagcttaagaactctttttcaaaaactggtgcacaaaagcgtttccataaatcaattctagaagaccataaagacctcagggataatgagcattcggggatgaagcaccaattctatggccataattcctattatttctataattgagatactcattcttcccttcaaaacccagcctcttgcaagaagctaaaaaatataacagaatttccttcgtattgctggattctgttttctagattaaaccacaaggaccttgttagtgaggtttacattttcaggaatttaagttagtatctggttggaggaacccagaaaaggtgatgttatgacttcttgaaaagtttaacaatttggcaataaaatattagaac

SEQ ID NO: 17216 - DNA, 2654 bp, Homo sapiens
accgggaggcggggccaggggtcgcaaggcggaagagcccctctcgcctccgacccggcgcctcgcactccgttcactctcggttcctcttcgcattcttgccagtcccgtagcgctgggctggtttcctccgaggtctctaagagcctcctactgcgccccgctcgccgcccggaagcccccagcccctcaaggacgcatcacctaatgccgcggtcacggccaccgtcacaagcgcccccagccccaccccaccccggcctgcccgccgtccttctcccgcccccgcccctgcctgccagctccaccgggccgtaggtgcggacgacctcaaaattcctcggcccgcgaaggccgccagctgcggggaggggaggggaggcgcggtcccgcagcgcccccaggctcatgtcccaggttgtgcctttttagccaagaagcatggaagtcattcacggcaggccctactgttgcagggagcttgaaggagctgacatactgtccaacaccttttactctaatgaattgcacaaccccctccagacggttactcgcccaactgcctcagaggacaggtatcaggaattaagggagtcacttcaacaatgtaggcttccttggggcgctgaaagagagtatggtgggataataccgatttcactccccgaggaccacaggccaaagtatgagcctcctcgtgtcatgggcaaaggacatcagcattatggatttggtggagaaacctggccaagaaagcttcctgttgaacaattttattatttgacccagaacaaaaaaagtgatgtctatggaaatgattctttgatacccaagccgcctaattcaacagtaggagagatctgcttgccatatccaattgaacacccctaccacacacacatctgtcgcggcaccatgttccccaccttcacgtcacctgaggacctctacacgggcattaaagcccgcacccagcagccctttcctcccacggtgccaagcaaggcttatgattcaacagttttgaagacaagaggtaatccttatagatatgaactgattgatattcccatggattcaaagaagaaagcactgacttggccaggtcaaggtgtatattatgattttcccagaggtgttgagaaaaataagccagtattctacccaaaacctcctaaaaccttcgctcctaacacttctttaaattcatgggaccctatttgctctgccaaagaagccaacatacaaagaaatcttgagaggtcccactggctcacttcgtacactcatgattttacaggtctggggcccatggacccccttgaactggatgattaccatgaaaagatggtagcagagttaacacgaaagataggatttgacccagagccgcaagaaaaattccaccctgtcttcaaacctcccagaccgttggaaggacgaattgcccgattaattcagaaccgacgttctctggaggctatagtccagcaaagaccacgttcctgtccagattgtactcctagagttttgtgtaattttcatacctttgtacccagttctaaagaaatggtggcacttagtgataacataccagccggtgtgacccataaaaaccaggatattgaagagaagatcatagaagaacagagcttgctgtctacctatgaactcccatcttgttacccaacaaaagacctaactagcatttatgacataaagccatttccaaaaatcacagatactaaaaagacagaagatttatactggagacagcagtcactaaaaacccaacccacaccttactgtaaaccagaccactggattcactatgaaaatcttaaatctcccctacgtgatcagtataatatgtgtccagaccctgttagccttagtaaacctagtgttttacaaaataaacaagacacggaagctttcactttagaacattttttaagtaagccagaagaagagttgttcttgaatatggaaaacaatgaagaaacaagacctgttcttggttggattcctagagctggagtgaccaaacctcagaccaacctgctggagcttaagaactctttttcaaaaactggtgcacaaaagcgtttccataaatcaattctagaagaccataaagacctcagggataatgagcattcggggatgaagcaccaattctatggccataattcctattatttctataattgagatactcattcttcccttcaaaacccagcctcttgcaagaagctaaaaaatataacagaatttccttcgtattgctggattctgttttctagattaaaccacaaggaccttgttagtgaggtttacattttcaggaatttaagttagtatctggttggaggaacccagaaaaggtgatgttatgacttcttgaaaagtttaacaatttggcaataaaatattagaactagaaaaatttatagtctttaatctctcatcttcagattatacaaggaaattttccaaaatcacaaaaagcaatgtgtacaacaaagtttacatcattgtttcaccaaaaaaaattgaaaagctggaaagaactcaaatgatcaataattaatgaatgactatacaaattatagtatcttaataaaaatgagaacactgtccctttatgtaaa

SEQ ID NO: 17217 - DNA, 2750 bp, Homo sapiens
accgggaggcggggccaggggtcgcaaggcggaagagcccctctcgcctccgacccggcgcctcgcactccgttcactctcggttcctcttcgcattcttgccagtcccgtagcgctgggctggtttcctccgaggtctctaagagcctcctactgcgccccgctcgccgcccggaagcccccagcccctcaaggacgcatcacctaatgccgcggtcacggccaccgtcacaagcgcccccagccccaccccaccccggcctgcccgccgtccttctcccgcccccgcccctgcctgccagctccaccgggccgtaggtgcggacgacctcaaaattcctcggcccgcgaaggccgccagctgcggggaggggaggggaggcgcggtcccgcagcgcccccaggctcatgtcccaggtatgtccagacccccgaggcaccgcttgcagggcagtgacagcccgtgaggctcggcctcgacccctggcacccttggtcccagctacgccggctcctggccttcccccaagtccgagagagaggtgggattctccccgacgcagttggaaaccgggaatcccctttagggtcccgttcgtgctgcactactgactccaccatctgcaaagggattcttgtccagaatccccgaaggctttaggacagcgcttattttgttgaatgaagagtctctaattttcggaaagaccacaggctaaaagtcaagttgtgcctttttagccaagaagcatggaagtcattcacggcaggccctactgttgcagggagcttgaaggagctgacatactgtccaacaccttttactctaatgaattgcacaaccccctccagacggttactcgcccaactgcctcagaggacaggtatcaggaattaagggagtcacttcaacaatgtaggcttccttggggcgctgaaagagagtatggtgggataataccgatttcactccccgaggaccacaggccaaagtatgagcctcctcgtgtcatgggcaaaggacatcagcattatggatttggtggagaaacctggccaagaaagcttcctgttgaacaattttattatttgacccagaacaaaaaaagtgatgtctatggaaatgattctttgatacccaagccgcctaattcaacagtaggagagatctgcttgccatatccaattgaacacccctaccacacacacatctgtcgcggcaccatgttccccaccttcacgtcacctgaggacctctacacgggcattaaagcccgcacccagcagccctttcctcccacggtgccaagcaaggcttatgattcaacagttttgaagacaagaggtaatccttatagatatgaactgattgatattcccatggattcaaagaagaaagcactgacttggccaggtcaaggtgtatattatgattttcccagaggtgttgagaaaaataagccagtattctacccaaaacctcctaaaaccttcgctcctaacacttctttaaattcatgggaccctatttgctctgccaaagaagccaacatacaaagaaatcttgagaggtcccactggctcacttcgtacactcatgattttacaggtctggggcccatggacccccttgaactggatgattaccatgaaaagatggtagcagagttaacacgaaagataggatttgacccagagccgcaagaaaaattccaccctgtcttcaaacctcccagaccgttggaaggacgaattgcccgattaattcagaaccgacgttctctggaggctatagtccagcaaagaccacgttcctgtccagattgtactcctagagttttgtgtaattttcatacctttgtacccagttctaaagaaatggtggcacttagtgataacataccagccggtgtgacccataaaaaccaggatattgaagagaagatcatagaagaacagagcttgctgtctacctatgaactcccatcttgttacccaacaaaagacctaactagcatttatgacataaagccatttccaaaaatcacagatactaaaaagacagaagatttatactggagacagcagtcactaaaaacccaacccacaccttactgtaaaccagaccactggattcactatgaaaatcttaaatctcccctacgtgatcagtataatatgtgtccagaccctgttagccttagtaaacctagtgttttacaaaataaacaagacacggaagctttcactttagaacattttttaagtaagccagaagaagagttgttcttgaatatggaaaacaatgaagaaacaagacctgttcttggttggattcctagagctggagtgaccaaacctcagaccaacctgctggagcttaagaactctttttcaaaaactggtgcacaaaagcgtttccataaatcaattctagaagaccataaagacctcagggataatgagcattcggggatgaagcaccaattctatggccataattcctattatttctataattgagatactcattcttcccttcaaaacccagcctcttgcaagaagctaaaaaatataacagaatttccttcgtattgctggattctgttttctagattaaaccacaaggaccttgttagtgaggtttacattttcaggaatttaagttagtatctggttggaggaacccagaaaaggtgatgttatgacttcttgaaaagtttaacaatttggcaataaaatattagaac

SEQ ID NO: 17218 - DNA, 2720 bp, Homo sapiens
accgggaggcggggccaggggtcgcaaggcggaagagcccctctcgcctccgacccggcgcctcgcactccgttcactctcggttcctcttcgcattcttgccagtcccgtagcgctgggctggtttcctccgaggtctctaagagcctcctactgcgccccgctcgccgcccggaagcccccagcccctcaaggacgcatcacctaatgccgcggtcacggccaccgtcacaagcgcccccagccccaccccaccccggcctgcccgccgtccttctcccgcccccgcccctgcctgccagctccaccgggccgtaggtgcggacgacctcaaaattcctcggcccgcgaaggccgccagctgcggggaggggaggggaggcgcggtcccgcagcgcccccaggctcatgtcccaggtatgtccagacccccgaggcaccgcttgcagggcagtgacagcccgtgaggctcggcctcgacccctggcacccttggtcccagctacgccggctcctggccttcccccaagtccgagagagaggtgggattctccccgacgcagttggaaaccgggaatcccctttagggtcccgttcgtgctgcactactgactccaccatctgcaaagggattcttgtccagaatccccgaaggctttaggacagcgcttattttgttgaatgaagagtctctaattttcggaaagaccacaggctaaaagtcaagttgtgcctttttagccaagaagcatggaagtcattcacggcaggccctactgttgcagggagcttgaaggagctgacatactgtccaacaccttttactctaatgaattgcacaaccccctccagacggttactcgcccaactgcctcagaggacaggtatcaggaattaagggagtcacttcaacaatgtaggcttccttggggcgctgaaagagagtatggtgggataataccgatttcactccccgaggaccacaggccaaagtatgagcctcctcgtgtcatgggcaaaggacatcagcattatggatttggtggagaaacctggccaagaaagcttcctgttgaacaattttattatttgacccagaacaaaaaaagtgatgtctatggaaatgattctttagagatctgcttgccatatccaattgaacacccctaccacacacacatctgtcgcggcaccatgttccccaccttcacgtcacctgaggacctctacacgggcattaaagcccgcacccagcagccctttcctcccacggtgccaagcaaggcttatgattcaacagttttgaagacaagaggtaatccttatagatatgaactgattgatattcccatggattcaaagaagaaagcactgacttggccaggtcaaggtgtatattatgattttcccagaggtgttgagaaaaataagccagtattctacccaaaacctcctaaaaccttcgctcctaacacttctttaaattcatgggaccctatttgctctgccaaagaagccaacatacaaagaaatcttgagaggtcccactggctcacttcgtacactcatgattttacaggtctggggcccatggacccccttgaactggatgattaccatgaaaagatggtagcagagttaacacgaaagataggatttgacccagagccgcaagaaaaattccaccctgtcttcaaacctcccagaccgttggaaggacgaattgcccgattaattcagaaccgacgttctctggaggctatagtccagcaaagaccacgttcctgtccagattgtactcctagagttttgtgtaattttcatacctttgtacccagttctaaagaaatggtggcacttagtgataacataccagccggtgtgacccataaaaaccaggatattgaagagaagatcatagaagaacagagcttgctgtctacctatgaactcccatcttgttacccaacaaaagacctaactagcatttatgacataaagccatttccaaaaatcacagatactaaaaagacagaagatttatactggagacagcagtcactaaaaacccaacccacaccttactgtaaaccagaccactggattcactatgaaaatcttaaatctcccctacgtgatcagtataatatgtgtccagaccctgttagccttagtaaacctagtgttttacaaaataaacaagacacggaagctttcactttagaacattttttaagtaagccagaagaagagttgttcttgaatatggaaaacaatgaagaaacaagacctgttcttggttggattcctagagctggagtgaccaaacctcagaccaacctgctggagcttaagaactctttttcaaaaactggtgcacaaaagcgtttccataaatcaattctagaagaccataaagacctcagggataatgagcattcggggatgaagcaccaattctatggccataattcctattatttctataattgagatactcattcttcccttcaaaacccagcctcttgcaagaagctaaaaaatataacagaatttccttcgtattgctggattctgttttctagattaaaccacaaggaccttgttagtgaggtttacattttcaggaatttaagttagtatctggttggaggaacccagaaaaggtgatgttatgacttcttgaaaagtttaacaatttggcaataaaatattagaac

SEQ ID NO: 17219 - DNA, 918 bp, Homo sapiens
accgggaggcggggccaggggtcgcaaggcggaagagcccctctcgcctccgacccggcgcctcgcactccgttcactctcggttcctcttcgcattcttgccagtcccgtagcgctgggctggtttcctccgaggtctctaagagcctcctactgcgccccgctcgccgcccggaagcccccagcccctcaaggacgcatcacctaatgccgcggtcacggccaccgtcacaagcgcccccagccccaccccaccccggcctgcccgccgtccttctcccgcccccgcccctgcctgccagctccaccgggccgtaggtgcggacgacctcaaaattcctcggcccgcgaaggccgccagctgcggggaggggaggggaggcgcggtcccgcagcgcccccaggctcatgtcccaggttgtgcctttttagccaagaagcatggaagtcattcacggcaggccctactgttgcagggagcttgaaggagctgacatactgtccaacaccttttactctaatgaattgcacaaccccctccagacggttactcgcccaactgcctcagaggacaggtatcaggaattaagggagtcacttcaacaatgtaggcttccttggggcgctgaaagagagtatggtgggataataccgatttcactccccgaggaccacaggccaaagtatgagcctcctcgtgtcatgggcaaaggacatcagcattatggatttggtggagaaacctggccaagaaagcttcctgttgaacaattttattatttgacccagaacaaaaaaagtgatgtctatggaaatgattctttgatacccaagccgcctaattcaacagtaggtttgcagtgagccaagatcatgccactgcactccagcctgagcaacagagtgaactctgtttaa

SEQ ID NO: 17220 - DNA, 2085 bp, Homo sapiens
taccacttctgctgttcatggtagtagtggaaggtaaatttggaaatggcattgacataaaatgaaaatgtttacggacacttttcttttttgcttttttattgtatttggataaagatccacttaaaagttatctgttttttcctgtttttttttttttttccccaaagtgtagttatgttttcactattgctgcttctatagagggcattgtgatagagagttacagatgaaacattaaatgccacagtgagtagaaataattactacaaaaagtaataaatatgattacttggtaatatcattctccatctaaaatactagtttcacctgtgagcagatttcagctcagtttatagttaaaaacaatgagggtaaaatgggattcatgctcagggaatgaatcagccatagttagagtgggaaattattattttcttcatttaaaggtagattttatgtttatttccctaaattgcataagataaaattgtctgtttaataaaaagacatttattaccattattaacagtcattttagagccaaatttaagaaaaggatattgaaagggtctttattggccttgtttgggtaactctatgctgttagatagaagagacttaggtaaataactttttatgtctgaggtgagtacacaatattggttcttggaaaaatagctgtttcttcataagatacccaagtgataattttttttcccctagactgtcaggcctatgagtaaatactaaatctattagctgtccccactcataaaccaaaccaaaccaatacaaacagatgaggagaggaaatgtagtaaaaatactggctgggtcttatgattgggatgagtgattttataagataatatggtgataattttattctaggattttatttttggcctaatataggaatgtttaaaaaaggcttttctatgaaaattagaaatttatacttgaaattaaaagtctagaagggggaggaccttaaagctaagctaccagtaagacaatgaataattcagaagagaacactattcttttactgactgagtgcccaagatgccaatttccatgaagtcttgatttatatatatgtacacatgttatgcacatacatgtttgttttctaacagttattttttaagcttttgagataattttagacttacagaagagttgtaaaagtagtagagttcttgtatactctgcacccaccttgcccttatgttaacatcttacgtaacaatagaacatttgtcaaaattaagaaattaaccttgatataatactaactaaagtagaaagtttaaaaagtagagattttagtcttttcactaatgtccttttactgttccaagacccagccttgcatttagctatcatgcctacgtcctgtcttccagtctgtgacagtgtatcataacaggggatacctgatgttgtaatgtatttctggtgttgttaaccttgatcactatgctaaggtggtgtctgctaggattcgctactgtaaacttactgtgttttccttgtaattattgaatatttgctggagatacccggagactatgcaaatgtcccgtttctgcttaaacttttgctcattttactatccattggcagatcttgcttgtggcagttactactgtggtgttctaatggtgattttctatttctctcaatccttctacatttattattggaattcttctgtaaggaagagttgtcagttctggatttatatttttaactataataagatattcaggataagtatagatttagaacttaaagatgttaaatcatgttaaaattattccaaataccaatatcaaagaaaactaagttggtaatctatctcagaaaatatatgaacttaagaaggaaaatagtatttatgatttgtagaattggttcaacttttgacttaatactgactttggactgaattcaaagttttcttgaaatttcacatctggactttttaaagtgtctacatttatattactttggggatcattttgtcaaagtcttgaataaagttacccagtcctggcatgataaacacaaaaaaat

SEQ ID NO: 17221 - DNA, 190 bp, Homo sapiens
ctaaaaagagcagctattctaaccaaacttcagggtgcagaggaagaaattaatgacacaatggaaaatgatgagctatttcgtactcttgcatcttataaacttattgcaccaagatacagatggcaaagaagtaaatggggacgtacatgtcctgtgaatttaaaagatggtaacatttattcaggat

SEQ ID NO: 17222 - DNA, 410 bp, Homo sapiens
gagatcgcaccactgcactctagcctgggcgacagagcaaggctccatctcaaaaaaaaaaaaaagaattgaactttttcttgaggacaattggaagttattacagggtttttaaaagtcaacatggcagggcacagtggctcacacctctaacctcactgctttggaaggaagccaaggcaagaggatcacttgaggccgggagttcaagaccctcttgggaaaactagcaagaccctgtctatacaaaacaatttaaaaattagccaggtgtagaggcacttgcctatagtcctagctactggggaggctgaggcagaggatcatttgggctcaggagttccaggatgcagtgagctttgaaggcgccattttatgccaacctgcacagcagtgagaccctctcggtc

SEQ ID NO: 17223 - DNA, 426 bp, Homo sapiens
gacatggagaatagcttgaagaagagataaggttaaagggagcttttcttttagaagtactttttcaaagaagggtctagtgagctaagtttcatcttctggtactcattgatcaaactgacctttctattctcataagcgtttctacccaaagttgtgtgtggaaggagtgtatagcagagaggaaatccctttcaacagagtcagctgctaactgatttcctataagcacactggattaagggcagccacagtggtttctactgtatgtatgaaccgaatggaggaatgttttcaaagattgatttggtgtggattgcaattgtaatggaaggcataacttgggatcccgggctgtaacttgctcttttgtttcccacccccctgacatgtatgtgtgctttaataaagctttctcacttgtca

SEQ ID NO: 17224 - DNA, 843 bp, Homo sapiens
gtgaatcgcatcgtttatcggacaggtggtgacataatctggatgtccctgggcctaaatgctgcctagagtatcctagatgatggatgtgagatgagttgcgcatctcttcatcagaaacagatgggctgacgagtctggcgcagggatgatagagatacattcaggatggggtgataggagtccagatgtgctatttgaagtgccaaagctgaaaagtggaaagagtgcattggaagctgagagtgagagtctggatagcttcacagctgactcggatagcacctccaggagagactctctggataaatctggcctctttccagaatggaagaagatgtctgctcccaaatctcaagtagaaaaggaaactcagcctggaggtcaaaatgtggtatttgtggatgagggtgagatgatatttaagaagaacaccagaaaaatcctcaggccttcagagtacactaaatctgtgatagatcttcgcccagaagatgtggtacatgaaagtggctccttgggagacagaagcaaatccgtcccaggcctcaatgtggatatggaagaggaagaagaagaagaagacattgaccacctagtgaagttacatcgccagaagctagccagaagcagcatgcaaagtggctcctccatggtaagttctattagatctgtggttacaggcatgttggggtactaggaagaaaagaagcacctccctagagcagattcgggacctggggaaaccatcctagtcactcttttcaggtaagtaagatcatttgtttgttcctatcctcaatttagactataggtgcttagtgtacatctaggtgacttcct

SEQ ID NO: 17225 - DNA, 625 bp, Homo sapiens
gtacctctacctcatcttttccctgtgtgccagtacgtactacgaaagacagcctcatgcatgtctaagaaagggtgtgtgcaagaggcttaacatcttatagttcaataaagaccaggaaatatacaagttgaggaaatattgaggtttcaggaacctgtatagctttgccgtgttgtttatgttctccactgttttgtagggaactagtaaaaaaagaaaaagaaaaaataaagtgaaagaggcgtgttgtctagtttcaaaggagaggagagaaggtaagtgtgattctcatttcctttttcactctctgtctaccttgggctctttgactcccatgactaccaagtgtatattatcagatacattttttcttcctgaggtccagccctgtgtctccaactatttcctgggcccagttacctggatatcaagtatgcaacactaacttaatagggttaaaacaaaactttttgccttacttccaaacctgtttctttccttacatcttctattgctatgagggctgtcactagccagtcagttgtttaatcttgactgtgaactaggcatctttgacttcaccttcttcatcctctctgctcagtcagtctccctattctgt

SEQ ID NO: 17226 - DNA, 4030 bp, Homo sapiens
  misc_feature (1)..(2): n is a, c, g, or t
  misc_feature (2628)..(2628): n is a, c, g, or t
nncggccccgcgaacggcgagaagacgacagaaggggagggtgagaagggccggctgccggagctggggcgatcttcccggagccggagaccctcccttgaaaccggcactgggacttctcgatctctggaggcacctgttgcaagtgacagcgctcggccgtcgagcggggtcgctaacccgcactctcttcggacctacgacatcgcggcttctctggcgttggccagtcagccacagggaactagtaaaaaaagaaaaagaaaaaataaagtgaaagaggcgtgttgtctagtttcaaaggagaggagagaagagactgagtcgccctgtgttgcccaggctggtcttgaactcctaggctcaagagatcctcctgcctcagcctcccaaagtgctgggattacaggcaactctggtagctctccttgtctggttgttttgaagaaagaagagtagaagaaaaagttgagtaaatcatgtcggagttactggacctttcttttctgtctgaggaggaaaaggatttgattctcagtgttctacagcgagatgaagaggtccggaaagcagatgagaaaaggattaggcgactaaagaatgagttactggagataaaaaggaaaggggccaagaggggcagccaacactacagtgatcggacctgtgcccggtgccaggagagcctgggccgtttgagtcccaaaaccaatacttgtcggggttgtaatcacctggtgtgtcgggactgccgcatacaggaaagcaatggtacctggaggtgcaaggtgtgcgccaaggaaatagagttgaagaaagcaactggggactggttttatgaccagaaagtgaatcgctttgcttaccgcacaggtagtgagataatcaggatgtccctgcgccacaaacctgcagtgagtaaaagagagacagtgggacagtccctccttcatcagacacagatgggtgacatctggccaggaagaaagatcattcaggagcggcagaaggagcccagtgtgctatttgaagtgccaaagctgaaaagtggaaagagtgcattggaagctgagagtgagagtctggatagcttcacagctgactcggatagcacctccaggagagactctctggataaatctggcctctttccagaatggaagaagatgtctgctcccaaatctcaagtagaaaaggaaactcagcctggaggtcaaaatgtggtatttgtggatgagggtgagatgatatttaagaagaacaccagaaaaatcctcaggccttcagagtacactaaatctgtgatagatcttcgcccagaagatgtggtacatgaaagtggctccttgggagacagaagcaaatccgtcccaggcctcaatgtggatatggaagaggaagaagaagaagaagacattgaccacctagtgaagttacatcgccagaagctagccagaagcagcatgcaaagtggctcctccatgagtacgatcggcagcatgatgagcatctacagtgaagctggtgatttcgggaacatctttgtgactggcaggattgccttttccctgaagtatgagcagcaaacccagagtctggttgtccatgtgaaggagtgccatcagctggcctatgctgatgaagccaagaagcgctctaacccatatgtgaagacttaccttctgcctgacaagtcccgccaaggaaaaagaaaaaccagcatcaagcgggacactgttaatccactatatgatgagacgctgaggtatgagatcccagaatctctcctggcccagaggaccctgcagttctcagtttggcatcatggtcgttttggcagaaacactttccttggagaggcagagatccagatggattcctggaagcttgataagaaactggatcattgcctccctttacatggaaagatcagtgctgagtccccgactggcttgccatcacacaaaggcgagttggtggtttcattgaaatacatcccagcctccaaaacccctgttggaggtgaccggaaaaagagtaaaggtggggaagggggagagctccaggtgtggatcaaagaagccaagaacttgacggctgccaaagcaggagggacttcagacagctttgtcaagggatacctccttcccatgaggaacaaggccagtaaacgtaaaactcctgtgatgaagaagaccctgaatcctcactacaaccatacatttgtctacaatggtgtgaggctggaagatctacagcatatgtgcctggaactgactgtgtgggaccgggagcccctggccagcaatgacttcctgggaggggtcaggctgggtgttggcactgggatcagtaatggggaagtggtggactggatggactcgactggggaagaagtgagcctgtggcagaagatgcgacagtacccagggtcttgggcagaagggactctgcagctccgttcctcaatggccaagcagaagctgggtttatgagtccctgtcctcttctgcaggtccagccctggcgagggcaggtcagaggaagtgaagaaatcaagagcaaagatttataatttaatgtgtatgtgtgtatgtgtgtatgtgtgtgtgtgtgtgtgtgtgtgtntgtgtacaaacatgtattttctgcaaatctcattatgctggctagagtgatgcagacttgttcttctttttaaagcagtctcaagaataagcatttctttaaaatgtttctgtgtataatctagtttattttcagagtccattttttcttatgtctttataaggttcacttaacttaaaaacagcttttaaaacaactttttatcttctgtcttgctatcattgttcctacttccctaggaagccctggctacctttcgcattaggaccagtctgggttttaaggctctgggaagcagggttggttagtaaagacaggaatgttggggagaggtgagtagttccttcctctttctcctctccaatttatgcttttaacttattttctacctggataaacttctggaacttggcttttaaatttaacttttctagtttttaagcagtttccaccttgctttggtctaatgcttttctttgaaatgctaacagaattcccaagctttttccagttctagatatctttactagacctttgggggactcttataatggagctgcttttgaaaagcactttaattagataatgtattttgactaaatcacgaggatgcccagtgagagcttctagctgatctcagaggaccagagtgactgagggtaaagtgtctcacagcccatgctgaattttctgcattttaaactgatactgcagtcattggagagagagctcctcatttctcgaatgaaagatgagatatattcatcctcatgtaccacatctgtcttagtgtttgcgtctggggtgtgttatcaaacagagcatggtctacatcccactgtgtcaaccagaagagccaagtgttatctcaattggcccagtgtttctccaggctggggactgttaagggctctaagggaatgtagacagagtctccctgttattctgacttcctgcttgatgagctttcagttcctgtttttgctattgtttcctaaatttgacctacatattacatgggtgtagtgtgttgaggcttttcaaagaagggtctagtgagctaagtttcatcttctggtactcattgatcaaactgacctttctattctcataagcgtttctacccaaagttgtgtgtggaaggagtgtatagcagagaggaaatccctttcaacagagtcagctgctaactgatttcctataagcacactggattaagggcagccacagtggtttctactgtatgtatgaaccgaatggaggaatgttttcaaagattgatttggtgtggattgcaattgtaatggaaggcataacttgggatcccgggctgtaacttgctcttttgtttcccacccccctgacatgtatgtgtgctttaataaagctttctcacttgtca

SEQ ID NO: 17227 - DNA, 3849 bp, Homo sapiens
  misc_feature (1)..(2): n is a, c, g, or t
  misc_feature (2447)..(2447): n is a, c, g, or t
nncggccccgcgaacggcgagaagacgacagaaggggagggtgagaagggccggctgccggagctggggcgatcttcccggagccggagaccctcccttgaaaccggcactgggacttctcgatctctggaggcacctgttgcaagtgacagggaactagtaaaaaaagaaaaagaaaaaataaagtgaaagaggcgtgttgtctagtttcaaaggagaggagagaaggcaactctggtagctctccttgtctggttgttttgaagaaagaagagtagaagaaaaagttgagtaaatcatgtcggagttactggacctttcttttctgtctgaggaggaaaaggatttgattctcagtgttctacagcgagatgaagaggtccggaaagcagatgagaaaaggattaggcgactaaagaatgagttactggagataaaaaggaaaggggccaagaggggcagccaacactacagtgatcggacctgtgcccggtgccaggagagcctgggccgtttgagtcccaaaaccaatacttgtcggggttgtaatcacctggtgtgtcgggactgccgcatacaggaaagcaatggtacctggaggtgcaaggtgtgcgccaaggaaatagagttgaagaaagcaactggggactggttttatgaccagaaagtgaatcgctttgcttaccgcacaggtagtgagataatcaggatgtccctgcgccacaaacctgcagtgagtaaaagagagacagtgggacagtccctccttcatcagacacagatgggtgacatctggccaggaagaaagatcattcaggagcggcagaaggagcccagtgtgctatttgaagtgccaaagctgaaaagtggaaagagtgcattggaagctgagagtgagagtctggatagcttcacagctgactcggatagcacctccaggagagactctctggataaatctggcctctttccagaatggaagaagatgtctgctcccaaatctcaagtagaaaaggaaactcagcctggaggtcaaaatgtggtatttgtggatgagggtgagatgatatttaagaagaacaccagaaaaatcctcaggccttcagagtacactaaatctgtgatagatcttcgcccagaagatgtggtacatgaaagtggctccttgggagacagaagcaaatccgtcccaggcctcaatgtggatatggaagaggaagaagaagaagaagacattgaccacctagtgaagttacatcgccagaagctagccagaagcagcatgcaaagtggctcctccatgagtacgatcggcagcatgatgagcatctacagtgaagctggtgatttcgggaacatctttgtgactggcaggattgccttttccctgaagtatgagcagcaaacccagagtctggttgtccatgtgaaggagtgccatcagctggcctatgctgatgaagccaagaagcgctctaacccatatgtgaagacttaccttctgcctgacaagtcccgccaaggaaaaagaaaaaccagcatcaagcgggacactgttaatccactatatgatgagacgctgaggtatgagatcccagaatctctcctggcccagaggaccctgcagttctcagtttggcatcatggtcgttttggcagaaacactttccttggagaggcagagatccagatggattcctggaagcttgataagaaactggatcattgcctccctttacatggaaagatcagtgctgagtccccgactggcttgccatcacacaaaggcgagttggtggtttcattgaaatacatcccagcctccaaaacccctgttggaggtgaccggaaaaagagtaaaggtggggaagggggagagctccaggtgtggatcaaagaagccaagaacttgacggctgccaaagcaggagggacttcagacagctttgtcaagggatacctccttcccatgaggaacaaggccagtaaacgtaaaactcctgtgatgaagaagaccctgaatcctcactacaaccatacatttgtctacaatggtgtgaggctggaagatctacagcatatgtgcctggaactgactgtgtgggaccgggagcccctggccagcaatgacttcctgggaggggtcaggctgggtgttggcactgggatcagtaatggggaagtggtggactggatggactcgactggggaagaagtgagcctgtggcagaagatgcgacagtacccagggtcttgggcagaagggactctgcagctccgttcctcaatggccaagcagaagctgggtttatgagtccctgtcctcttctgcaggtccagccctggcgagggcaggtcagaggaagtgaagaaatcaagagcaaagatttataatttaatgtgtatgtgtgtatgtgtgtatgtgtgtgtgtgtgtgtgtgtgtgtntgtgtacaaacatgtattttctgcaaatctcattatgctggctagagtgatgcagacttgttcttctttttaaagcagtctcaagaataagcatttctttaaaatgtttctgtgtataatctagtttattttcagagtccattttttcttatgtctttataaggttcacttaacttaaaaacagcttttaaaacaactttttatcttctgtcttgctatcattgttcctacttccctaggaagccctggctacctttcgcattaggaccagtctgggttttaaggctctgggaagcagggttggttagtaaagacaggaatgttggggagaggtgagtagttccttcctctttctcctctccaatttatgcttttaacttattttctacctggataaacttctggaacttggcttttaaatttaacttttctagtttttaagcagtttccaccttgctttggtctaatgcttttctttgaaatgctaacagaattcccaagctttttccagttctagatatctttactagacctttgggggactcttataatggagctgcttttgaaaagcactttaattagataatgtattttgactaaatcacgaggatgcccagtgagagcttctagctgatctcagaggaccagagtgactgagggtaaagtgtctcacagcccatgctgaattttctgcattttaaactgatactgcagtcattggagagagagctcctcatttctcgaatgaaagatgagatatattcatcctcatgtaccacatctgtcttagtgtttgcgtctggggtgtgttatcaaacagagcatggtctacatcccactgtgtcaaccagaagagccaagtgttatctcaattggcccagtgtttctccaggctggggactgttaagggctctaagggaatgtagacagagtctccctgttattctgacttcctgcttgatgagctttcagttcctgtttttgctattgtttcctaaatttgacctacatattacatgggtgtagtgtgttgaggcttttcaaagaagggtctagtgagctaagtttcatcttctggtactcattgatcaaactgacctttctattctcataagcgtttctacccaaagttgtgtgtggaaggagtgtatagcagagaggaaatccctttcaacagagtcagctgctaactgatttcctataagcacactggattaagggcagccacagtggtttctactgtatgtatgaaccgaatggaggaatgttttcaaagattgatttggtgtggattgcaattgtaatggaaggcataacttgggatcccgggctgtaacttgctcttttgtttcccacccccctgacatgtatgtgtgctttaataaagctttctcacttgtca

SEQ ID NO: 17228 - DNA, 1402 bp, Homo sapiens
  misc_feature (11)..(11): n is a, c, g, or t
cgacccgcttnctttctaactgctccaagcggtccctttctctctgttaatgcccccttgccatctcccttctcgggtgtctttcccattcccggcgagctttcccctgttcttctcgatgccgtttccgacgttcgtccattttttcttatgtctttataaggttcacttaacttaaaaacagcttttaaaacaactttttatcttctgtcttgctatcattgttcctacttccctaggaagccctggctacctttcgcattaggaccagtctgggttttaaggctctgggaagcagggttggttagtaaagacaggaatgttggggagaggtgagtagttccttcctctttctcctctccaatttatgcttttaacttattttctacctggataaacttctggaacttggcttttaaatttaacttttctagtttttaagcagtttccaccttgctttggtctaatgcttttctttgaaatgctaacagaattcccaagctttttccagttctagatatctttactagacctttgggggactcttataatggagctgcttttgaaaagcactttaattagataatgtattttgactaaatcacgaggatgcccagtgagagcttctagctgatctcagaggaccagagtgactgagggtaaagtgtctcacagcccatgctgaattttctgcattttaaactgatactgcagtcattggagagagagctcctcatttctcgaatgaaagatgagatatattcatcctcatgtaccacatctgtcttagtgtttgcgtctggggtgtgttatcaaacagagcatggtctacatcccactgtgtcaaccagaagagccaagtgttatctcaattggcccagtgtttctccaggctggggactgttaagggctctaagggaatgtagacagagtctccctgttattctgacttcctgcttgatgagctttcagttcctgtttttgctattgtttcctaaatttgacctacatattacatgggtgtagtgtgttgaggcttttcaaagaagggtctagtgagctaagtttcatcttctggtactcattgatcaaactgacctttctattctcataagcgtttctacccaaagttgtgtgtggaaggagtgtatagcagagaggaaatccctttcaacagagtcagctgctaactgatttcctataagcacactggattaagggcagccacagtggtttctactgtatgtatgaaccgaatggaggaatgttttcaaagattgatttggtgtggattgcaattgtaatggaaggcataacttgggatcccgggctgtaacttgctcttttgtttcccacccccctgacatgtatgtgtgctttaataaagctttctcacttgtca

SEQ ID NO: 17229 - DNA, 2416 bp, Homo sapiens
  misc_feature (1)..(2): n is a, c, g, or t
  misc_feature (2410)..(2410): n is a, c, g, or t
nncggccccgcgaacggcgagaagacgacagaaggggagggtgagaagggccggctgccggagctggggcgatcttcccggagccggagaccctcccttgaaaccggcactgggacttctcgatctctggaggcacctgttgcaagtgacagcgctcggccgtcgagcggggtcgctaacccgcactctcttcggacctacgacatcgcggcttctctggcgttggccagtcagccacagggaactagtaaaaaaagaaaaagaaaaaataaagtgaaagaggcgtgttgtctagtttcaaaggagaggagagaagagactgagtcgccctgtgttgcccaggctggtcttgaactcctaggctcaagagatcctcctgcctcagcctcccaaagtgctgggattacaggcaactctggtagctctccttgtctggttgttttgaagaaagaagagtagaagaaaaagttgagtaaatcatgtcggagttactggacctttcttttctgtctgaggaggaaaaggatttgattctcagtgttctacagcgagatgaagaggtccggaaagcagatgagaaaaggattaggcgactaaagaatgagttactggagataaaaaggaaaggggccaagaggggcagccaacactacagtgatcggacctgtgcccggtgccaggagagcctgggccgtttgagtcccaaaaccaatacttgtcggggttgtaatcacctggtgtgtcgggactgccgcatacaggaaagcaatggtacctggaggtgcaaggtgtgcgccaaggaaatagagttgaagaaagcaactggggactggttttatgaccagaaagtgaatcgctttgcttaccgcacaggtagtgagataatcaggatgtccctgcgccacaaacctgcagtgagtaaaagagagacagtgggacagtccctccttcatcagacacagatgggtgacatctggccaggaagaaagatcattcaggagcggcagaaggagcccagtgtgctatttgaagtgccaaagctgaaaagtggaaagagtgcattggaagctgagagtgagagtctggatagcttcacagctgactcggatagcacctccaggagagactctctggataaatctggcctctttccagaatggaagaagatgtctgctcccaaatctcaagtagaaaaggaaactcagcctggaggtcaaaatgtggtatttgtggatgagggtgagatgatatttaagaagaacaccagaaaaatcctcaggccttcagagtacactaaatctgtgatagatcttcgcccagaagatgtggtacatgaaagtggctccttgggagacagaagcaaatccgtcccaggcctcaatgtggatatggaagaggaagaagaagaagaagacattgaccacctagtgaagttacatcgccagaagctagccagaagcagcatgcaaagtggctcctccatgagtacgatcggcagcatgatgagcatctacagtgaagctggtgatttcgggaacatctttgtgactggcaggattgccttttccctgaagtatgagcagcaaacccagagtctggttgtccatgtgaaggagtgccatcagctggcctatgctgatgaagccaagaagcgctctaacccatatgtgaagacttaccttctgcctgacaagtcccgccaaggaaaaagaaaaaccagcatcaagcgggacactgttaatccactatatgatgagacgctgaggtatgagatcccagaatctctcctggcccagaggaccctgcagttctcagtttggcatcatggtcgttttggcagaaacactttccttggagaggcagagatccagatggattcctggaagcttgataagaaactggatcattgcctccctttacatggaaagatcagtgctgagtccccgactggcttgccatcacacaaaggcgagttggtggtttcattgaaatacatcccagcctccaaaacccctgttggaggtgaccggaaaaagagtaaaggtggggaagggggagagctccaggtgtggatcaaagaagccaagaacttgacggctgccaaagcaggagggacttcagacagctttgtcaagggatacctccttcccatgaggaacaaggccagtaaacgtaaaactcctgtgatgaagaagaccctgaatcctcactacaaccatacatttgtctacaatggtgtgaggctggaagatctacagcatatgtgcctggaactgactgtgtgggaccgggagcccctggccagcaatgacttcctgggaggggtcaggctgggtgttggcactggtgagatcccctcccccacaatactgcaggacactgtttggactgtggggtcttctagagtggnctgcta

SEQ ID NO: 17230 - DNA, 1396 bp, Homo sapiens
  misc_feature (1)..(2): n is a, c, g, or t
nncggccccgcgaacggcgagaagacgacagaaggggagggtgagaagggccggctgccggagctggggcgatcttcccggagccggagaccctcccttgaaaccggcactgggacttctcgatctctggaggcacctgttgcaagtgacagcgctcggccgtcgagcggggtcgctaacccgcactctcttcggacctacgacatcgcggcttctctggcgttggccagtcagccacagggaactagtaaaaaaagaaaaagaaaaaataaagtgaaagaggcgtgttgtctagtttcaaaggagaggagagaagagactgagtcgccctgtgttgcccaggctggtcttgaactcctaggctcaagagatcctcctgcctcagcctcccaaagtgctgggattacaggcaactctggtagctctccttgtctggttgttttgaagaaagaagagtagaagaaaaagttgagtaaatcatgtcggagttactggacctttcttttctgtctgaggaggaaaaggatttgattctcagtgttctacagcgagatgaagaggtccggaaagcagatgagaaaaggattaggcgactaaagaatgagttactggagataaaaaggaaaggggccaagaggggcagccaacactacagtgatcggacctgtgcccggtgccaggagagcctgggccgtttgagtcccaaaaccaatacttgtcggggttgtaatcacctggtgtgtcgggactgccgcatacaggaaagcaatggtacctggaggtgcaaggtgtgcgccaaggaaatagagttgaagaaagcaactggggactggttttatgaccagaaagtgaatcgctttgcttaccgcacaggtagtgagataatcaggatgtccctgcgccacaaacctgcagtgagtaaaagagagacagtgggacagtccctccttcatcagacacagatgggtgacatctggccaggaagaaagatcattcaggagcggcagaaggagcccagtgtgctatttgaagtgccaaagctgaaaagtggaaagagtgcattggaagctgagagtgagagtctggatagcttcacagctgactcggatagcacctccaggagagactctctggataaatctggcctctttccagaatggaagaagatgtctgctcccaaatctcaagtagaaaaggaaactcagcctggaggtcaaaatgtggtatttgtggatgagggtgagatgatatttaagaagaacaccagaaaaatcctcaggccttcaggtaactggtttcccttactggtctttcaggactgaagttctgagtacccttgatgggctcttggtatggagaagaataggtctctttgatttggctttttttggtcttc

SEQ ID NO: 17231 - DNA, 649 bp, Homo sapiens
tggaacatttttctgcatcttgctttgttgacttaaccctatgtcttggatatctttccatgtcagcatgtacagattcactgaattcttttttgatgactgcatgccatatgccataccaggacactacaattattcatttaactctttctatagtgattgacatttaggtcgtttccactttttggctattactaacaatgctggtagcaagattctctgtcatgctgtcagtccttcgtgagtttgtatggcaaccttgcttgaagatctttgagagtatttggaatctagtaactatgcccccaaagtggcataatagtgggtattgcagaagactctttgttggttctgccctatttccttctaaagaaactgccatagaaacctgtggctgccatggcctagggacggtggattatattcatatgaagaaggatcctcttttgccctgatgctgttcttggggggtaattttagaatttttttcagagagaagtcccaacaattcttgagaagcccagcttgacctgttgggtttccctgtgtttcagatcagtgctgagtccccgactggcttgccatcacacaaaggcgagttggtggtttcattgaaatacatcccagcctccaaaacccctgttggagg

SEQ ID NO: 17232 - DNA, 538 bp, Homo sapiens
tgcttactggcaggcactgtgctaggcactgaggagacaggacaggcacggttctgttatggagctcgctgcctttaggagcaagcaaagaaagtgctgcataaacaaagctcaagataaatctagaggtggaaggggctcacttgctatggctgacatcccttacaggtaaaggtggggaagggggagagctccaggtgtggatcaaagaagccaagaacttgacggctgccaaagcaggagggacttcagacagctttgtcaaggggtgagtccctagaccagccccaaattaaccagtttcagaacaagagagctaagagaagaatttaactttctctgtggatattatccagtgtgtcttaccactcccggcaaccaaatttgttcctgaaattaggtaatgacaaaaccttcaccacctttgcactggtctgggctgtagacttgataatccaaagaggagggctgcagacaggttctgacttttgtctgactcatgttcttaattaattctgggtgaaaatctgtgtcttct

SEQ ID NO: 17233 - DNA, 4485 bp, Homo sapiens
  misc_feature (1)..(2): n is a, c, g, or t
  misc_feature (2628)..(2628): n is a, c, g, or t
nncggccccgcgaacggcgagaagacgacagaaggggagggtgagaagggccggctgccggagctggggcgatcttcccggagccggagaccctcccttgaaaccggcactgggacttctcgatctctggaggcacctgttgcaagtgacagcgctcggccgtcgagcggggtcgctaacccgcactctcttcggacctacgacatcgcggcttctctggcgttggccagtcagccacagggaactagtaaaaaaagaaaaagaaaaaataaagtgaaagaggcgtgttgtctagtttcaaaggagaggagagaagagactgagtcgccctgtgttgcccaggctggtcttgaactcctaggctcaagagatcctcctgcctcagcctcccaaagtgctgggattacaggcaactctggtagctctccttgtctggttgttttgaagaaagaagagtagaagaaaaagttgagtaaatcatgtcggagttactggacctttcttttctgtctgaggaggaaaaggatttgattctcagtgttctacagcgagatgaagaggtccggaaagcagatgagaaaaggattaggcgactaaagaatgagttactggagataaaaaggaaaggggccaagaggggcagccaacactacagtgatcggacctgtgcccggtgccaggagagcctgggccgtttgagtcccaaaaccaatacttgtcggggttgtaatcacctggtgtgtcgggactgccgcatacaggaaagcaatggtacctggaggtgcaaggtgtgcgccaaggaaatagagttgaagaaagcaactggggactggttttatgaccagaaagtgaatcgctttgcttaccgcacaggtagtgagataatcaggatgtccctgcgccacaaacctgcagtgagtaaaagagagacagtgggacagtccctccttcatcagacacagatgggtgacatctggccaggaagaaagatcattcaggagcggcagaaggagcccagtgtgctatttgaagtgccaaagctgaaaagtggaaagagtgcattggaagctgagagtgagagtctggatagcttcacagctgactcggatagcacctccaggagagactctctggataaatctggcctctttccagaatggaagaagatgtctgctcccaaatctcaagtagaaaaggaaactcagcctggaggtcaaaatgtggtatttgtggatgagggtgagatgatatttaagaagaacaccagaaaaatcctcaggccttcagagtacactaaatctgtgatagatcttcgcccagaagatgtggtacatgaaagtggctccttgggagacagaagcaaatccgtcccaggcctcaatgtggatatggaagaggaagaagaagaagaagacattgaccacctagtgaagttacatcgccagaagctagccagaagcagcatgcaaagtggctcctccatgagtacgatcggcagcatgatgagcatctacagtgaagctggtgatttcgggaacatctttgtgactggcaggattgccttttccctgaagtatgagcagcaaacccagagtctggttgtccatgtgaaggagtgccatcagctggcctatgctgatgaagccaagaagcgctctaacccatatgtgaagacttaccttctgcctgacaagtcccgccaaggaaaaagaaaaaccagcatcaagcgggacactgttaatccactatatgatgagacgctgaggtatgagatcccagaatctctcctggcccagaggaccctgcagttctcagtttggcatcatggtcgttttggcagaaacactttccttggagaggcagagatccagatggattcctggaagcttgataagaaactggatcattgcctccctttacatggaaagatcagtgctgagtccccgactggcttgccatcacacaaaggcgagttggtggtttcattgaaatacatcccagcctccaaaacccctgttggaggtgaccggaaaaagagtaaaggtggggaagggggagagctccaggtgtggatcaaagaagccaagaacttgacggctgccaaagcaggagggacttcagacagctttgtcaagggatacctccttcccatgaggaacaaggccagtaaacgtaaaactcctgtgatgaagaagaccctgaatcctcactacaaccatacatttgtctacaatggtgtgaggctggaagatctacagcatatgtgcctggaactgactgtgtgggaccgggagcccctggccagcaatgacttcctgggaggggtcaggctgggtgttggcactgggatcagtaatggggaagtggtggactggatggactcgactggggaagaagtgagcctgtggcagaagatgcgacagtacccagggtcttgggcagaagggactctgcagctccgttcctcaatggccaagcagaagctgggtttatgagtccctgtcctcttctgcaggtccagccctggcgagggcaggtcagaggaagtgaagaaatcaagagcaaagatttataatttaatgtgtatgtgtgtatgtgtgtatgtgtgtgtgtgtgtgtgtgtgtgtntgtgtacaaacatgtattttctgcaaatctcattatgctggctagagtgatgcagacttgttcttctttttaaagcagtctcaagaataagcatttctttaaaatgtttctgtgtataatctagtttattttcagagtccattttttcttatgtctttataaggttcacttaacttaaaaacagcttttaaaacaactttttatcttctgtcttgctatcattgttcctacttccctaggaagccctggctacctttcgcattaggaccagtctgggttttaaggctctgggaagcagggttggttagtaaagacaggaatgttggggagaggtgagtagttccttcctctttctcctctccaatttatgcttttaacttattttctacctggataaacttctggaacttggcttttaaatttaacttttctagtttttaagcagtttccaccttgctttggtctaatgcttttctttgaaatgctaacagaattcccaagctttttccagttctagatatctttactagacctttgggggactcttataatggagctgcttttgaaaagcactttaattagataatgtattttgactaaatcacgaggatgcccagtgagagcttctagctgatctcagaggaccagagtgactgagggtaaagtgtctcacagcccatgctgaattttctgcattttaaactgatactgcagtcattggagagagagctcctcatttctcgaatgaaagatgagatatattcatcctcatgtaccacatctgtcttagtgtttgcgtctggggtgtgttatcaaacagagcatggtctacatcccactgtgtcaaccagaagagccaagtgttatctcaattggcccagtgtttctccaggctggggactgttaagggctctaagggaatgtagacagagtctccctgttattctgacttcctgcttgatgagctttcagttcctgtttttgctattgtttcctaaatttgacctacatattacatgggtgtagtgtgttgaggcttttcaaagaagggtctagtgagctaagtttcatcttctggtactcattgatcaaactgacctttctattctcataagcgtttctacccaaagttgtgtgtggaaggagtgtatagcagagaggaaatccctttcaacagagtcagctgctaactgatttcctataagcacactggattaagggcagccacagtggtttctactgtatgtatgaaccgaatggaggaatgttttcaaagattgatttggtgtggattgcaattgtaatggaaggcataacttgggatcccgggctgtaacttgctcttttgtttcccacccccctgacatgtatgtgtgctttaataaagctttctcacttgtcaaacgtttgtgtttgttagttctataaatgcttttgtctctgatgtcctcactgttgcttttcccctggcttgaaggataagaaccaaagtgataaatgctcttccctaaccatcctatgctgattgaagaaaattcacctttccccgcattgctgcctgataccttaaatgcctgatactttcgctgagcttgatccctcgtcctttgtatttggtatctaaggagaacactgagaaatcatctttaaagtggcaccacttttctatcttgtaacaaaggaactcttcctttagctttgcagaccctcctatactggaggaaggagagagatgttcatacaggaggtgaggggagacattccctgctataagcacttctttctggatccttcaatttctctgggaggcggggactttttcttttactcctcctaccattatgtagttttgagaga

SEQ ID NO: 17234 - DNA, 1672 bp, Homo sapiens
  misc_feature (1)..(2): n is a, c, g, or t
nncggccccgcgaacggcgagaagacgacagaaggggagggtgagaagggccggctgccggagctggggcgatcttcccggagccggagaccctcccttgaaaccggcactgggacttctcgatctctggaggcacctgttgcaagtgacagcgctcggccgtcgagcggggtcgctaacccgcactctcttcggacctacgacatcgcggcttctctggcgttggccagtcagccacagggaactagtaaaaaaagaaaaagaaaaaataaagtgaaagaggcgtgttgtctagtttcaaaggagaggagagaagagactgagtcgccctgtgttgcccaggctggtcttgaactcctaggctcaagagatcctcctgcctcagcctcccaaagtgctgggattacaggcaactctggtagctctccttgtctggttgttttgaagaaagaagagtagaagaaaaagttgagtaaatcatgtcggagttactggacctttcttttctgtctgaggaggaaaaggatttgattctcagtgttctacagcgagatgaagaggtccggaaagcagatgagaaaaggattaggcgactaaagaatgagttactggagataaaaaggaaaggggccaagaggggcagccaacactacagtgatcggacctgtgcccggtgccaggagagcctgggccgtttgagtcccaaaaccaatacttgtcggggttgtaatcacctggtgtgtcgggactgccgcatacaggaaagcaatggtacctggaggtgcaaggtgtgcgccaaggaaatagagttgaagaaagcaactggggactggttttatgaccagaaagtgaatcgctttgcttaccgcacaggtagtgagataatcaggatgtccctgcgccacaaacctgcagtgagtaaaagagagacagtgggacagtccctccttcatcagacacagatgggtgacatctggccaggaagaaagatcattcaggagcggcagaaggagcccagtgtgctatttgaagtgccaaagctgaaaagtggaaagagtgcattggaagctgagagtgagagtctggatagcttcacagctgactcggatagcacctccaggagagactctctggataaatctggcctctttccagaatggaagaagatgtctgctcccaaatctcaagtagaaaaggaaactcagcctggaggtcaaaatgtggtatttgtggatgagggtgagatgatatttaagaagaacaccagaaaaatcctcaggccttcagagtacactaaatctgtgatagatcttcgcccagaagatgtggtacatgaaagtggctccttgggagacagaagcaaatccgtcccaggcctcaatgtggatatggaagaggaagaagaagaagaagacattgaccacctagtgaagttacatcgccagaagctagccagaagcagcatgcaaagtggctcctccatggtaagttctattagatctgtggttacaggcatgttggggtactaggaagaaaagaagcacctccctagagcagattcgggacctggggaaaccatcctagtcactcttttcaggtaagtaagatcatttgtttgttcctatcctcaatttagactataggtgcttagtgtacatctaggtgacttcct

SEQ ID NO: 17235 - DNA, 3233 bp, Homo sapiens
  misc_feature (4)..(4): n is a, c, g, or t
  misc_feature (2434)..(2434): n is a, c, g, or t
ggcncgagccggaagtgttgtggccgccgccgccgcgcgtcgcggaggcacgtgtggagccccggcagcaggagcgtcgcaggtccttggcccttgccagacattagcaccatgagcttcgtggcatacgaggagctgatcaaggagggtgacacggccatcctgtcactgggccatggtgcaatggtggcagtgcgtgtgcagcgtggggcacagacccagacccggcatggtgtcctgcggcactcagttgaccttatcggccgccccttcggctccaaggtgacgtgcggccgaggtggctgggtgtatgtgctgcaccccacgcccgagctctggacgctgaacctgccgcaccgcacgcagatcctctactccacagacatcgccctcatcaccatgatgttggagcttcggcccggctctgtggtctgtgagtctggcaccggcagtggctctgtgtcccacgccatcatccgcaccattgcacccacgggtcacctgcacacggtggagttccaccagcagcgggcagagaaggcccgggaggagttccaggagcaccgtgtgggccgctgggtgactgtgcgcacccaggacgtgtgccgcagtggctttggcgtgagccacgtggccgacgccgtcttcctggacatcccatcaccctgggaggccgtgggccacgcctgggacgccctcaaggtcgaaggcgggcgcttctgctccttctcaccgtgcatcgagcaggtgcaacgcacatgccaggcgctggcagcgcgcggcttctcagagctgagcaccctggaggtgctgccacaggtctacaacgtgcgcactgtcagcctgccaccgcccgacctgggcacaggcacagatggccctgccggctccgacaccagccccttccgcagcggcacgcccatgaaggaggccgtgggccacaccggctacctgaccttcgccaccaagaccccaggctagggggccgcctcccagggcaccagggagctgggagcactgaagggctgggcagggaggccagaggcaccttatatggtcagcgatgcctgccagacacagacggtggggtggggcttgggggcctcctgggtggccagagtgggacagcaggaagggcggctgtgatggaggagcagtgctggggctgggcctcagccattcctgtccagccctgtggcccatcccagctgctgtttgttgccaatatgaagtatccactgccacaggctcccctgggtgttgaagccaaagggtgcaggtgggggagtctgaccccctcccaggtgggcctaagcaggaagggggtggaggagggaggggggcattgaccctgagaccacgctgcgtctgacccctgggcccccacggccctggctgccccacggggcctgagaccatctcgtgcttctccagtccccgggccgaggctccagccttggccagaagctggggtgagctgacccagaatccctgccctgctctccccagcgctaggagaccaggccagcccaggaaccagggaggtgaccctgctctctggcctcctggctgatgtcacagcactgagctcagcccaggccttcgtccactcatgtccaagaggcggggcatcccccacccagccagagcccctgacatgggctgcactcgctgaggccaggcagcgctgcggagaggagcggcagagtgggttgtctgccgcaggcaaccaggcaagtgtgtcggggctggggtgtgaatgccagcctgtgagtcccggaactatgtgggtacccctacccctcacagaagccaagggcatggaggaggtccctccacagtgacaacggtgtggggtaggggaggtgcattcaggacaccacccagggacagtgcctatgtgatcacctcttaaaggctaagcttaggggcatttcccaaagtggggacagagggcaggacgcccaggctgggggctctcctcgcccgccctggtgtctgacagcctcaaggaaggagcagtgcctgtgtcagccatggggcccttggagctgccgctggtgcctagggggcctgggtttctgcccaggcagccagtggctgttgggagcctctgtttcccctgtgctgggggccttgagtgctatgctagcaggggcctggccccaagtgtgagtgatgagcaataaacgtaccgtccccctctgttctgagtgatccctagcagccaaggccacccccagctgctgtctaggccagccctacctgcgctctgcccctggtccctgctcctccctgtcctggtttggcatgataggcgctccagtctccaggacaaaggggcaaatgtgtggccacccccatctggctgcagaaaaggccactccttcctggggttggggtggtccaggagtgctgggccttcttccacagncctgggctggaattcagtgtggctgcctgggttacttgtatgcgcccctgaaggaagggtccactccaggccgcctggtccctgcgaagtgtcacactgtgggtcaccgggggctgtggctaatgtggtccgggaggcctgtgtccctgagagttgctcagccctgctccgagggcttgtcctctccttccaggacccagcttcccttctaaccttgttactcacctggggcacagaggaggggcccccagtcaggttcaacatggaagtgggtgaccctaatgccaggagctttggggtcaggctgtccctggggtgtcatgaactgggtgacgcacacccctgagatctcagttcccccaagcctgccctgcccctcctggccacagcaaaggcctgcatggtgtctgatgggtggacaccgggaggtgtttctttgaggcgcagctccatggtttgtaggacacataggcctcaggcactgtagggtccaggttgtgcccattttccagccggggctggttgccctggtggcagccctgggtgagtcaccagggtccgcacatggagagcgggaggtcccagcccacccttagttgtcacatgggacagagttgctgtgtcaatcccctcggccctgctgctctgccctgcacacaggcccccatgatgaccttgagcctccaggcatccacccccaccgtatggccctctagacccagctgggcctcaccccactccctcagcttggatcctcacgtggcctggagccagcattaaactcctgtatgtccttcaa

SEQ ID NO: 17236 - DNA, 2205 bp, Homo sapiens
  misc_feature (4)..(4): n is a, c, g, or t
ggcncgagccggaagtgttgtggccgccgccgccgcgcgtcgcggaggcacgtgtggagccccggcagcaggagcgtcgcaggtccttggcccttgccagacattagcaccatgagcttcgtggcatacgaggagctgatcaaggagggtgacacggccatcctgtcactgggccatggtgcaatggtggcagtgcgtgtgcagcgtggggcacagacccagacccggcatggtgtcctgcggcactcagttgaccttatcggccgccccttcggctccaaggtgacgtgcggccgaggtggctgggtgtatgtgctgcaccccacgcccgagctctggacgctgaacctgccgcaccgcacgcagatcctctactccacagacatcgccctcatcaccatgatgttggagcttcggcccggctctgtggtctgtgagtctggcaccggcagtggctctgtgtcccacgccatcatccgcaccattgcacccacgggtcacctgcacacggtggagttccaccagcagcgggcagagaaggcccgggaggagttccaggagcaccgtgtgggccgctgggtgactgtgcgcacccaggacgtgtgccgcagtggctttggcgtgagccacgtggccgacgccgtcttcctggacatcccatcaccctgggaggccgtgggccacgcctgggacgccctcaaggtcgaaggcgggcgcttctgctccttctcaccgtgcatcgagcaggtgcaacgcacatgccaggcgctggcagcgcgcggcttctcagagctgagcaccctggaggtgctgccacaggtctacaacgtgcgcactgtcagcctgccaccgcccgacctgggcacaggcacagatggccctgccggctccgacaccagccccttccgcagcggcacgcccatgaaggaggccgtgggccacaccggctacctgaccttcgccaccaagaccccaggctagggggccgcctcccagggcaccagggagctgggagcactgaagggctgggcagggaggccagaggcaccttatatggtcagcgatgcctgccagacacagacggtggggtggggcttgggggcctcctgggtggccagagtgggacagcaggaagggcggctgtgatggaggagcagtgctggggctgggcctcagccattcctgtccagccctgtggcccatcccagctgctgtttgttgccaatatgaagtatccactgccacaggctcccctgggtgttgaagccaaagggtgcaggtgggggagtctgaccccctcccaggtgggcctaagcaggaagggggtggaggagggaggggggcattgaccctgagaccacgctgcgtctgacccctgggcccccacggccctggctgccccacggggcctgagaccatctcgtgcttctccagtccccgggccgaggctccagccttggccagaagctggggtgagctgacccagaatccctgccctgctctccccagcgctaggagaccaggccagcccaggaaccagggaggtgaccctgctctctggcctcctggctgatgtcacagcactgagctcagcccaggccttcgtccactcatgtccaagaggcggggcatcccccacccagccagagcccctgacatgggctgcactcgctgaggccaggcagcgctgcggagaggagcggcagagtgggttgtctgccgcaggcaaccaggcaagtgtgtcggggctggggtgtgaatgccagcctgtgagtcccggaactatgtgggtacccctacccctcacagaagccaagggcatggaggaggtccctccacagtgacaacggtgtggggtaggggaggtgcattcaggacaccacccagggacagtgcctatgtgatcacctcttaaaggctaagcttaggggcatttcccaaagtggggacagagggcaggacgcccaggctgggggctctcctcgcccgccctggtgtctgacagcctcaaggaaggagcagtgcctgtgtcagccatggggcccttggagctgccgctggtgcctagggggcctgggtttctgcccaggcagccagtggctgttgggagcctctgtttcccctgtgctgggggccttgagtgctatgctagcaggggcctggccccaagtgtgagtgatgagcaataaacgtaccgtccccctc

SEQ ID NO: 17237 - DNA, 2575 bp, Homo sapiens
  misc_feature (4)..(4): n is a, c, g, or t
ggcncgagccggaagtgttgtggccgccgccgccgcgcgtcgcggaggcacgtgtggagccccggcagcaggagcgtcgcaggtccttggcccttgccagacattagcaccatgagcttcgtggcatacgaggagctgatcaaggagggtgacacggccatcctgtcactgggccatggtgcaatggtggcagtgcgtgtgcagcgtggggcacagacccagacccggcatggtgtcctgcggcactcagttgaccttatcggccgccccttcggctccaaggtgacgtgcggccgaggtggctgggtgtatgtgctgcaccccacgcccgagctctggacgctgaacctgccgcaccgcacgcagatcctctactccacagacatcgccctcatcaccatgatgttggagcttcggcccggctctgtggtctgtgagtctggcaccggcagtggctctgtgtcccacgccatcatccgcaccattgcacccacgggtcacctgcacacggtggagttccaccagcagcgggcagagaaggcccgggaggagttccaggagcaccgtgtgggccgctgggtgactgtgcgcacccaggacgtgtgccgcagtggctttggcgtgagccacgtggccgacgccgtcttcctggacatcccatcaccctgggaggccgtgggccacgcctgggacgccctcaaggtcgaaggcgggcgcttctgctccttctcaccgtgcatcgagcaggtgcaacgcacatgccaggcgctggcagcgcgcggcttctcagagctgagcaccctggaggtgctgccacaggtctacaacgtgcgcactgtcagcctgccaccgcccgacctgggcacaggcacagatggccctgccggctccgacaccagccccttccgcagcggcacgcccatgaaggaggccgtgggccacaccggctacctgaccttcgccaccaagaccccaggctagggggccgcctcccagggcaccagggagctgggagcactgaagggctgggcagggaggccagaggcaccttatatggtcagcgatgcctgccagacacagacggtggggtggggcttgggggcctcctgggtggccagagtgggacagcaggaagggcggctgtgatggaggagcagtgctggggctgggcctcagccattcctgtccagccctgtggcccatcccagctgctgtttgttgccaatatgaagtatccactgccacaggctcccctgggtgttgaagccaaagggtgcaggtgggggagtctgaccccctcccaggtgggcctaagcaggaagggggtggaggagggaggggggcattgaccctgagaccacgctgcgtctgacccctgggcccccacggccctggctgccccacggggcctgagaccatctcgtgcttctccagtccccgggccgaggctccagccttggccagaagctggggtgagctgacccagaatccctgccctgctctccccagcgctaggagaccaggccagcccaggaaccagggaggtgaccctgctctctggcctcctggctgatgtcacagcactgagctcagcccaggccttcgtccactcatgtccaagaggcggggcatcccccacccagccagagcccctgacatgggctgcactcgctgaggccaggcagcgctgcggagaggagcggcagagtgggttgtctgccgcaggcaaccaggcaagtgtgtcggggctggggtgtgaatgccagcctgtgagtcccggaactatgtgggtacccctacccctcacagaagccaagggcatggaggaggtccctccacagtgacaacggtgtggggtaggggaggtgcattcaggacaccacccagggacagtgcctatgtgatcacctcttaaaggctaagcttaggggcatttcccaaagtggggacagagggcaggacgcccaggctgggggctctcctcgcccgccctggtgtctgacagcctcaaggaaggagcagtgcctgtgtcagccatggggcccttggagctgccgctggtgcctagggggcctgggtttctgcccaggcagccagtggctgttgggagcctctgtttcccctgtgctgggggccttgagtgctatgctagcaggggcctggccccaagtgtgagtgatgagcaataaacgtaccgtccccctcaaaaaaaaaaaaaaaaacaaaaaaaaaaaaaaaaaaaaaaaaacaaaaaggaaaaaaaaaaaaaaaaaaaaaaaaaaaaagagaggggggggcaaaaaaaaaattaccccgcagggaggaggacaaaaataacagtcctaaacgaatctttttataaaagaaggcggccacgataaaggatggcattataataaagcaagagagagcgctgtagaatcacaggcagggagaagaaaggtaagatagatattgtggagaagcctctatggggagggaactatatgtgacacacacaaggaaataggccacgagaataaatattatgatgatgataaccacgttatgggaagaagcgcaaggtgaggaatcc

SEQ ID NO: 17238 - DNA, 1869 bp, Homo sapiens
  misc_feature (4)..(4): n is a, c, g, or t
ggcncgagccggaagtgttgtggccgccgccgccgcgcgtcgcggaggcacgtgtggagccccggcagcaggagcgtcgcaggtccttggcccttgccagacattagcaccatgagcttcgtggcatacgaggagctgatcaaggagggtgacacggccatcctgtcactgggccatggtgcaatggtggcagtgcgtgtgcagcgtggggcacagacccagacccggcatggtgtcctgcggcactcagttgaccttatcggccgccccttcggctccaaggtgacgtgcggccgaggtggctgggtgtatgtgctgcaccccacgcccgagctctggacgctgaacctgccgcaccgcacgcagatcctctactccacagacatcgccctcatcaccatgatgttggagcttcggcccggctctgtggtctgtgagtctggcaccggcagtggctctgtgtcccacgccatcatccgcaccattgcacccacgggtcacctgcacacggtggagttccaccagcagcgggcagagaaggcccgggaggagttccaggagcaccgtgtgggccgctgggtgactgtgcgcacccaggacgtgtgccgcagtggctttggcgtgagccacgtggccgacgccgtcttcctggacatcccatcaccctgggaggccgtgggccacgcctgggacgccctcaaggtcgaaggcgggcgcttctgctccttctcaccgtgcatcgagcaggtgcaacgcacatgccaggcgctggcagcgcgcggcttctcagagctgagcaccctggaggtgctgccacaggtctacaacgtgcgcactgtcagcctgccaccgcccgacctgggcacaggcacagatggccctgccggctccgacaccagccccttccgcagcggcacgcccatgaaggaggccgtgggccacaccggctacctgaccttcgccaccaagaccccaggctagggggccgcctcccagggcaccagggagctgggagcactgaagggctgggcagggaggccagaggcaccttatatggtcagcgatgcctgccagacacagacggtggggtggggcttgggggcctcctgggtggccagagtgggacagcaggaagggcggctgtgatggaggagcagtgctggggctgggcctcagccattcctgtccagccctgtggcccatcccagctgctgtttgttgccaatatgaagtatccactgccacaggctcccctgggtgttgaagccaaagggtgcaggtgggggagtctgaccccctcccaggtgggcctaagcaggaagggggtggaggagggaggggggcattgaccctgagaccacgctgcgtctgacccctgggcccccacggccctggctgccccacggggcctgagaccatctcgtgcttctccagtccccgggccgaggctccagccttggccagaagctggggtgagctgacccagaatccctgccctgctctccccagcgctaggagaccaggccagcccaggaaccagggaggtgaccctgctctctggcctcctggctgatgtcacagcactgagctcagcccaggccttcgtccactcatgtccaagaggcggggcatcccccacccagccagagcccctgacatgggctgcactcgctgaggccaggcagcgctgcggagaggagcggcagagtgggttgttgccgctggtgcctagggggcctgggtttctgcccaggcagccagtggctgttgggagcctctgtttcccctgtgctgggggccttgagtgctatgctagcaggggcctggccccaagtgtgagtgatgagcaataaacgtaccgtccccctc

SEQ ID NO: 17239 - DNA, 1500 bp, Homo sapiens
  misc_feature (4)..(4): n is a, c, g, or t
ggcncgagccggaagtgttgtggccgccgccgccgcgcgtcgcggaggcacgtgtggagccccggcagcaggagcgtcgcaggtccttggcccttgccagacattagcaccatgagcttcgtggcatacgaggagctgatcaaggagggtgacacggccatcctgtcactgggccatggtgcaatggtggcagtgcgtgtgcagcgtggggcacagacccagacccggcatggtgtcctgcggcactcagttgaccttatcggccgccccttcggctccaaggtgacgtgcggccgaggtggctgggtgtatgtgctgcaccccacgcccgagctctggacgctgaacctgccgcaccgcacgcagatcctctactccacagacatcgccctcatcaccatgatgttggagcttcggcccggctctgtggtctgtgagtctggcaccggcagtggctctgtgtcccacgccatcatccgcaccattgcacccacgggtcacctgcacacggtggagttccaccagcagcgggcagagaaggcccgggaggagttccaggagcaccgtgtgggccgctgggtgactgtgcgcacccaggacgtgtgccgcagtggctttggcgtgagccacgtggccgacgccgtcttcctggacatcccatcaccctgggaggccgtgggccacgcctgggacgccctcaaggtcgaaggcgggcgcttctgctccttctcaccgtgcatcgagcaggtgcaacgcacatgccaggcgctggcagcgcgcggcttctcagagctgagcaccctggaggtgctgccacaggtctacaacgtgcgcactgtcagcctgccaccgcccgacctgggcacaggcacagatggccctgccggctccgacaccagccccttccgcagcggcacgcccatgaaggaggccgtgggccacaccggctacctgaccttcgccaccaagaccccaggctagggggccgcctcccagggcaccagggagctgggagcactgaagggctgggcagggaggccagaggcaccttatatggtcagcgatgcctgccagacacagacggtggggtggggcttgggggcctcctgggtggccagagtgggacagcaggaagggcggctgtgatggaggagcagtgctggggctgggcctcagccattcctgtccagccctgtggcccatcccagctgctgtttgttgccaatatgaagtatccactgccacaggctcccctgggtgttgaagccaaagggtgcaggtgggggagtctgaccccctcccaggtgggcctaacagtgcctgtgtcagccatggggcccttggagctgccgctggtgcctagggggcctgggtttctgcccaggcagccagtggctgttgggagcctctgtttcccctgtgctgggggccttgagtgctatgctagcaggggcctggccccaagtgtgagtgatgagcaataaacgtaccgtccccctc

SEQ ID NO: 17240 - DNA, 2873 bp, Homo sapiens
  misc_feature (4)..(4): n is a, c, g, or t
  misc_feature (2074)..(2074): n is a, c, g, or t
ggcncgagccggaagtgttgtggccgccgccgccgcgcgtcgcggaggcacgtgtggagccccggcagcaggagcgtcgcaggcaccggcagtggctctgtgtcccacgccatcatccgcaccattgcacccacgggtcacctgcacacggtggagttccaccagcagcgggcagagaaggcccgggaggagttccaggagcaccgtgtgggccgctgggtgactgtgcgcacccaggacgtgtgccgcagtggctttggcgtgagccacgtggccgacgccgtcttcctggacatcccatcaccctgggaggccgtgggccacgcctgggacgccctcaaggtcgaaggcgggcgcttctgctccttctcaccgtgcatcgagcaggtgcaacgcacatgccaggcgctggcagcgcgcggcttctcagagctgagcaccctggaggtgctgccacaggtctacaacgtgcgcactgtcagcctgccaccgcccgacctgggcacaggcacagatggccctgccggctccgacaccagccccttccgcagcggcacgcccatgaaggaggccgtgggccacaccggctacctgaccttcgccaccaagaccccaggctagggggccgcctcccagggcaccagggagctgggagcactgaagggctgggcagggaggccagaggcaccttatatggtcagcgatgcctgccagacacagacggtggggtggggcttgggggcctcctgggtggccagagtgggacagcaggaagggcggctgtgatggaggagcagtgctggggctgggcctcagccattcctgtccagccctgtggcccatcccagctgctgtttgttgccaatatgaagtatccactgccacaggctcccctgggtgttgaagccaaagggtgcaggtgggggagtctgaccccctcccaggtgggcctaagcaggaagggggtggaggagggaggggggcattgaccctgagaccacgctgcgtctgacccctgggcccccacggccctggctgccccacggggcctgagaccatctcgtgcttctccagtccccgggccgaggctccagccttggccagaagctggggtgagctgacccagaatccctgccctgctctccccagcgctaggagaccaggccagcccaggaaccagggaggtgaccctgctctctggcctcctggctgatgtcacagcactgagctcagcccaggccttcgtccactcatgtccaagaggcggggcatcccccacccagccagagcccctgacatgggctgcactcgctgaggccaggcagcgctgcggagaggagcggcagagtgggttgtctgccgcaggcaaccaggcaagtgtgtcggggctggggtgtgaatgccagcctgtgagtcccggaactatgtgggtacccctacccctcacagaagccaagggcatggaggaggtccctccacagtgacaacggtgtggggtaggggaggtgcattcaggacaccacccagggacagtgcctatgtgatcacctcttaaaggctaagcttaggggcatttcccaaagtggggacagagggcaggacgcccaggctgggggctctcctcgcccgccctggtgtctgacagcctcaaggaaggagcagtgcctgtgtcagccatggggcccttggagctgccgctggtgcctagggggcctgggtttctgcccaggcagccagtggctgttgggagcctctgtttcccctgtgctgggggccttgagtgctatgctagcaggggcctggccccaagtgtgagtgatgagcaataaacgtaccgtccccctctgttctgagtgatccctagcagccaaggccacccccagctgctgtctaggccagccctacctgcgctctgcccctggtccctgctcctccctgtcctggtttggcatgataggcgctccagtctccaggacaaaggggcaaatgtgtggccacccccatctggctgcagaaaaggccactccttcctggggttggggtggtccaggagtgctgggccttcttccacagncctgggctggaattcagtgtggctgcctgggttacttgtatgcgcccctgaaggaagggtccactccaggccgcctggtccctgcgaagtgtcacactgtgggtcaccgggggctgtggctaatgtggtccgggaggcctgtgtccctgagagttgctcagccctgctccgagggcttgtcctctccttccaggacccagcttcccttctaaccttgttactcacctggggcacagaggaggggcccccagtcaggttcaacatggaagtgggtgaccctaatgccaggagctttggggtcaggctgtccctggggtgtcatgaactgggtgacgcacacccctgagatctcagttcccccaagcctgccctgcccctcctggccacagcaaaggcctgcatggtgtctgatgggtggacaccgggaggtgtttctttgaggcgcagctccatggtttgtaggacacataggcctcaggcactgtagggtccaggttgtgcccattttccagccggggctggttgccctggtggcagccctgggtgagtcaccagggtccgcacatggagagcgggaggtcccagcccacccttagttgtcacatgggacagagttgctgtgtcaatcccctcggccctgctgctctgccctgcacacaggcccccatgatgaccttgagcctccaggcatccacccccaccgtatggccctctagacccagctgggcctcaccccactccctcagcttggatcctcacgtggcctggagccagcattaaactcctgtatgtccttcaa

SEQ ID NO: 17241 - DNA, 1990 bp, Homo sapiens
  misc_feature (1191)..(1191): n is a, c, g, or t
taaactaacggctgaggtatgaggctgggttgttgaatcaggccgaggaaacccctcccaggtgggcctaagcaggaagggggtggaggagggaggggggcattgaccctgagaccacgctgcgtctgacccctgggcccccacggccctggctgccccacggggcctgagaccatctcgtgcttctccagtccccgggccgaggctccagccttggccagaagctggggtgagctgacccagaatccctgccctgctctccccagcgctaggagaccaggccagcccaggaaccagggaggtgaccctgctctctggcctcctggctgatgtcacagcactgagctcagcccaggccttcgtccactcatgtccaagaggcggggcatcccccacccagccagagcccctgacatgggctgcactcgctgaggccaggcagcgctgcggagaggagcggcagagtgggttgtctgccgcaggcaaccaggcaagtgtgtcggggctggggtgtgaatgccagcctgtgagtcccggaactatgtgggtacccctacccctcacagaagccaagggcatggaggaggtccctccacagtgacaacggtgtggggtaggggaggtgcattcaggacaccacccagggacagtgcctatgtgatcacctcttaaaggctaagcttaggggcatttcccaaagtggggacagagggcaggacgcccaggctgggggctctcctcgcccgccctggtgtctgacagcctcaaggaaggagcagtgcctgtgtcagccatggggcccttggagctgccgctggtgcctagggggcctgggtttctgcccaggcagccagtggctgttgggagcctctgtttcccctgtgctgggggccttgagtgctatgctagcaggggcctggccccaagtgtgagtgatgagcaataaacgtaccgtccccctctgttctgagtgatccctagcagccaaggccacccccagctgctgtctaggccagccctacctgcgctctgcccctggtccctgctcctccctgtcctggtttggcatgataggcgctccagtctccaggacaaaggggcaaatgtgtggccacccccatctggctgcagaaaaggccactccttcctggggttggggtggtccaggagtgctgggccttcttccacagncctgggctggaattcagtgtggctgcctgggttacttgtatgcgcccctgaaggaagggtccactccaggccgcctggtccctgcgaagtgtcacactgtgggtcaccgggggctgtggctaatgtggtccgggaggcctgtgtccctgagagttgctcagccctgctccgagggcttgtcctctccttccaggacccagcttcccttctaaccttgttactcacctggggcacagaggaggggcccccagtcaggttcaacatggaagtgggtgaccctaatgccaggagctttggggtcaggctgtccctggggtgtcatgaactgggtgacgcacacccctgagatctcagttcccccaagcctgccctgcccctcctggccacagcaaaggcctgcatggtgtctgatgggtggacaccgggaggtgtttctttgaggcgcagctccatggtttgtaggacacataggcctcaggcactgtagggtccaggttgtgcccattttccagccggggctggttgccctggtggcagccctgggtgagtcaccagggtccgcacatggagagcgggaggtcccagcccacccttagttgtcacatgggacagagttgctgtgtcaatcccctcggccctgctgctctgccctgcacacaggcccccatgatgaccttgagcctccaggcatccacccccaccgtatggccctctagacccagctgggcctcaccccactccctcagcttggatcctcacgtggcctggagccagcattaaactcctgtatgtccttcaa

SEQ ID NO: 17242 - DNA, 875 bp, Homo sapiens
ccagcttctggccaaggctgggtcagctcaccccagcttctggccaaggctggagcctcggcccggggactggagaagcacgagatggtctcaggccccgtggggcagccaggccgtgggggcccaggggtcagaagctggggtgagctgacccagaatccctgccctgctctccccagcgctaggagaccaggccagcccaggaaccagggaggtgaccctgctctctggcctcctggctgatgtcacagcactgagctcagcccaggccttcgtccactcatgtccaagaggcggggcatcccccacccagccagagcccctgacatgggctgcactcgctgaggccaggcagcgctgcggagaggagcggcagagtgggttgtctgccgcaggcaaccaggcaagtgtgtcggggctggggtgtgaatgccagcctgtgagtcccggaactatgtgggtacccctacccctcacagaagccaagggcatggaggaggtccctccacagtgacaacggtgtggggtaggggaggtgcattcaggacaccacccagggacagtgcctatgtgatcacctcttaaaggctaagcttaggggcatttcccaaagtggggacagagggcaggacgcccaggctgggggctctcctcgcccgccctggtgtctgacagcctcaaggaaggagcagtgcctgtgtcagccatggggcccttggagctgccgctggtgcctagggggcctgggtttctgcccaggcagccagtggctgttgggagcctctgtttcccctgtgctgggggccttgagtgctatgctagcaggggcctggccccaagtgtgagtgatgagcaataaacgtaccgtccccctc

SEQ ID NO: 17243 - DNA, 652 bp, Homo sapiens
gaagggtgatgggagggtcgggtcctcactccgggaatccttgggaccgaactccgccattgccaagcctcagtcttttcatctctgatttaggctcatagtccctgtctcttgtcctagaccaagaaaggcttcagaggccaggccagagtgcagcgctattgggctccctgtcaggcagtggcagagactgaggctgagctagccacaccccgcccatgcccactgctgggatgtaggcctcgaagccttctacctagaccctaggccctcatcctgcctcctgacttgctcatgcctacacacacccctccccaggtccttggcccttgccagacattagcaccatgagcttcgtggcatacgaggagctgatcaaggagggtgacacggccatcctgtcactgggccatggtgcaatggtggcagtgcgtgtgcagcgtggggcacagacccagacccggcatggtgtcctgcggcactcagttgaccttatcggccgccccttcggctccaaggtgacgtgcggccgaggtggctgggtgtatgtgctgcaccccacgcccgagctctggacgctgaacctgccgcaccgcacgcagatcctctactccacagacatcgccctcatcaccatgatgttggagcttcg

SEQ ID NO: 17244 - DNA, 6939 bp, Homo sapiens
tttccagccaacgccaaacagtgactgttgacaatttcatattgtcatcaggggaaccaaggcttattcagatgcctatttcagaacctaggacagttccattgaaaaggcgcaggcgttcgggctggctgactagatggatcaggcctggctgcctgatggctatattcctccttcctccctctccacttccatctcaacccttgaggctgcatattgaatagttggagaattcagtgaactaagagatgcaaatgcacagtacaaaattcaaatgtccaattcggggcagggctgcatctaactttaatggcaaccactgcatgtgatgtctggggactctatagatacatggcctcagaccctgaagacatctggattctgtcactggattgttcacaaagtgaggctgaactttccacaggacgaagtcttcaggctggccgcctccctcgggaacctggggcttgagccaggtgccgccctatggatgggagatgacggcaaaccgagatgggcgagactacttcatcaatcacatgacacaggcaatcccttttgacgaccctcggttagagagctgccaaatcatccctccggctcctcggaaggtggagatgagaagggaccccgtgctgggatttggttttgtggcaggcagtgaaaagccagtggtcgttcgctcagtaacaccaggtggcccctctgaaggcaagctgatcccgggagatcagattgtaatgattaatgatgaaccggtcagcgctgcacccagagagcgggtcatcgatctggtcagaagctgcaaagaatcgatactcctcactgtcattcagccttacccttctcccaaatcagcatttattagtgctgcaaaaaaggcaagattaaagtccaatcctgtcaaagtacgcttctctgaggaggtcatcatcaacggccaagtgtcggaaactgttaaggacaactcacttctttttatgccaaatgttttgaaagtctatctggaaaatgggcagaccaaatcatttcgttttgactgcagcacttccattaaggatgtcatcttaacccttcaagagaagctctccatcaaaggcattgaacacttctctctcatgctggagcagaggacagaaggggctggaacgaagctgctcttgcttcatgaacaggagactctaactcaggtgacacagaggcccagctcccataagatgagatgtcttttccgaattagcttcgtcccaaaagatccaattgaccttttaaggagagatccagttgctttcgagtatctctatgttcagagttgtaacgatgtggttcaggagcgatttgggccggagctgaaatatgacatagccctgcggctggccgcattacaaatgtacattgcaaccgttaccaccaagcaaacgcagaaaatctccctcaaatacatcgaaaaagaatggggattagagacttttcttccctctgctgtgctgcaaagcatgaaagagaagaacataaagaaagcactttcacaccttgtcaaagcaaatcaaaacttggtaccaccgggtaaaaagctctctgcactacaagccaaggtccattatctcaagttcctcagtgacctacgattgtatgggggccgtgtgttcaaggcaacattagtgcaggcagaaaagcgctcggaagtgactctcctggttgggccccggtatggcataagccatgtcatcaacaccaaaaccaatctggtggctcttttagccgactttagccacgtcaacaggatcgaaatgttttccgaggaggagagcttggtgcgggtagaactccacgtgctagatgtgaagcctatcacgcttctgatggaatcctcagatgccatgaacctggcctgcttgacggctggatactaccggctgcttgttgattccaggaggtcgatatttaacatggccaacaagaaaaacacagcgacccaggaaacaggacctgaaaacaaggggaagcataacctccttggcccagattggaactgtataccccaaatgaccacctttattggcgaaggggaacaagaagcccagataacatacatagattcaaagcagaagacggtggagatcacagacagcaccatgtgtccaaaagagcaccggcacttgtacatagacaatgcctatagttcagatggacttaaccagcagctgagccagcccggggaggccccctgtgaggcagactacagaagtctagctcagcggtccctattgaccctctcaggaccagaaactctgaagaaagcacaggaatctccgagaggagctaaagtgtcctttatttttggagacttcgccttggatgatggtattagtcccccaacccttggctatgaaacgctactagatgagggtcctgaaatgctggagaagcagagaaatctctacattggcagtgccaatgacatgaagggcctggatctcactccagaggcagagggcatccagtttgtggaaaattctgtttatgcaaacataggcgatgtgaagagcttccaggccgcggaggggatcgaggaacccctcttgcatgacatctgttatgcagaaaacactgatgacgcggaggacgaggacgaggtgagctgcgaggaggacctcgtggtgggggagatgaaccagccggccatcctcaacctgtctgggtcaagcgatgacatcattgacctcacatccctgccccctccagaaggtgatgacaatgaggatgacttcctgttgcgttccttgaacatggccattgccgcacccccacctggctttagagacagttcagatgaagaggactctcagagccaggcagcttccttccccgaggacaaggagaaaggcagcagcctgcaaaatgatgagatccccgtgtccctcattgacgctgtgcccaccagcgccgaaggcaagtgtgagaagggactggataatgccgtcgtctccacgctgggagctctagaggctctatccgtgtcagaagaacagcagaccagtgacaattcaggtgtagccatcttgcgggcttatagtcctgagtcttcgtcagactcgggcaatgaaactaactcttctgaaatgactgagagttctgaactggccacagcacaaaaacagtcagaaaacctctcccgcatgttcttggccactcacgaaggctaccacccccttgcagaagagcagaccgagttcccggcctccaagacccccgctgggggcttgcctccaaagtcctcgcacgccctggctgctaggccagcaaccgacctcccgcccaaagttgtgccttccaagcagttacttcactcagaccacatggagatggagcctgaaactatggagactaagtcggtcactgactattttagcaaactgcacatggggtcggtggcatactcctgcactagcaaaaggaaaagcaagctggccgatggtgaggggaaggcaccccctaatgggaacacaacaggaaaaaaacagcaggggaccaaaacggcagagatggaggaggaggccagtggtaaatttggtactgtgtcttcacgagacagtcaacacctgagcacttttaatctggagagaactgcctttcgcaaggacagtcaaagatggtatgtggccactgaaggtgggatggctgaaaaaagtggattagaagcagcaacagggaaaacctttccaagagcttctggtcttggggcaagggaggccgaagggaaggaagaaggagctcctgatggagaaaccagtgatggctcaggacttggtcaaggggaccgcttcttaactgacgtgacctgtgcatcttcagccaaagacttagataacccagaggacgctgactcgtccacctgcgaccatccttccaagcttcctgaggctgatgagagtgtggcccgcctttgtgactaccacttggccaagcggatgtcatcactgcaaagcgagggccatttttctctgcagagctcccaaggctcttcagtggatgcaggctgtggcacaggcagcagtggcagtgcctgtgccacacccgtggagtcgccgctctgcccctccctggggaagcacttgattcctgacgcttctgggaaaggcgtgaattacattccttcagaggagagagcccctgggcttcccaaccacggagccacctttaaggaactgcacccacagacagaagggatgtgtccacggatgacagtgcctgctctgcacacagccattaacaccgaacccctgtttggcacattgagagatggatgccatcggctccccaagattaaggaaaccacagtgtagctttgacagagcctgggaaggagagacgaggaggcatgccttcagcttggtctcaacatcctgaagctgatcccatcctgctaccatcaaacattcactcggaatcaaaggtgccaattccaaatcaagaccctaatgatttctcccaagcaaatcaggcatacggagaggctgtgagctggcggccaccggatctgagaggggggagcctcaggacacctcccagccagaaggctctgagacatagcagcagtatcctctccggatctgtcgatttggagaccttccgagagagaaccaagggtgcagtcagcttaaagtgtccaggcatcacagaagcacaggaggccagttctgaaaggcgagcagaactccccctggggaggaagctcaccaaaagtttttcccaaagctcaatgcacttgagctctgaggggaggtttcacaaaaggtccccagtggctcataaagactcaaagctgtataggacattacccttgcggaagctggagggcagcaattggagatgccggggacccttcagctattgcttcctgaaccgagggcaggatgaagatggtgaggaagaagaggagaggggagaggccaccgtccaggtctcttgcctctatagaccacaggtgactcaagccatgccagaaccaagcagcccatgcctggctgtggcgattcagaagcaacgaggggagctatccagagggtcagtgctgaaggtctgggcagaagacctgcgagacccagatgacttggacttcagcaacctggcttttgatgcccggattgcaagaataaatgccctaaaggagagcacatatgcaatgcctgatgggttccttgcagcccaaaatgatgccaatgagctgctctgtctcgtcagggcaaccaaggagaagagggaggagtcacgccctgaagcgtacgaccttacactttctcagtacaagcaactgttatccattgagtccagacagttgggaagtgcctgtaggaaaatggcgatggctgagaaaagcccggaggagatgctcctagctatgacttccagctttcaagtgctctgttgcctaacagaagcttgcatgcgattagttaaagtcgtgaactcagaaacacagcggcaggaaattgtagggaagatcgatgaagtggtcataaattacatttgtctactgaaagctgccgaagcagccactggaaagaaccctggggaccctaatgttggactctcggcgcgacactcaaccaccatggccgctctcgtaagcacactgacacgttctctcaagaggcttttaaacaaataaatatggaagtcacgtcataatctacctttgcaaagccatacatgaacttttatttactttgtgtgtatgatgaacagatgtctcctttcttctctctgtatattttgttattttatataaaataggagataaaagtcacactgatgaaatgttgaaatgtactaatcagatgtattctgtttatattatacatatatatacacgtaaaagaaatatccaagaaagtgatgacatttggctatttttcatatagttaaaactccaggtatatgatgtgaaattttaaattctaccatgttagagcaaaacaatgaatcctatcccctttctttccaagtagctacttggaaaccatatcattcatatttagaagtaaaacacaaaacaaaaaagagagagaaaagaaaagaaatcacaatgtatataaaacagtacttatgttttaaaattatgatttttaagcattggaaatagcaaaaagacatttaaaattcaagaagctattatgaattactagagaatatatctgtaataaattaattttttgctcatagtatttggttactggatgctttcttccaagaatcccacatatttaatttgggtttttgctactggggctacaaattggtggggatggattctactgtgtcagcacaaatgctcttcacagtggttctagcatttaaaaaacttcccggggagaagaacagaggggatgatgggcagtttcctaggtaacacctagagttatagaatatctcattacataaaatgtatggaattaataataccaaaattaattatttgatggaaagatctgctttgactaaatgtcaaaaatctgcaaaccaaagacattatcttcccctcatcccaactcaactacgaaacttaaaattccctttagagtgataggacatttagtaaagtatttgcaaacttaaaaaaaggaacatttaatgatcatcaaaattaagtacagattcagtaatgtagaccagaccacacaccagcacctgtgagtctcatctcagatcacagctctcagcatagggcttcatgcatcaccgcctctacagaggctaaggctgccagtcaaatttggaattatagcgtagtactgggacaaaatctcaaatcttggatgttccagaaaatcagggagtgatggctactgtaatcatgggagccatgagtaaatagttaagtatttattaaataaatacttaatctggattggctgataaaaatatgaaatctgaaaa

SEQ ID NO: 17245 - DNA, 993 bp, Homo sapiens
gattaatagttcatttttttttcccacttggattttgggaattattgcagtctttcttattggtactaattaggtatcactatacttagaattgttaaatctgaatcttatgtaagtaggctttgatataatgtataaattaataaatatattcaagctgggcgcggtagctcacatctataatcccagcactttgggaggctgaggagggcagatcacctcaggtcgggagttctagaccagcctgaccaacatggtgaaaccccgtctctactaaaaatacaaaaattagccgtgcgtagtggccggcacctgtagtcccagctacatgggaggctgaggcaggagaattacttgaaccggggaggtggaggttacagtgagccggaatcgccccattgcactccagcctgggtgacagagcaagactccgtctcaaaaatatatatatatatattcgtagtatagttagacacgaattcttattttttttttttaaacctctgtgtgctaggcgctgctctctgtatggcataaaagctgggtttttacactactgtacagagtattctcagcctcaaaccagcgtctggctagttttgacagtgtggagcaatggtgacccatggtccttaggatgactgctcagggacaatttctagtgattcctgcagttttgataaattataatgaaaggtagattgatttctttctaaagagaacgttactttcagagaaagccgggaactctttcagggttagttcaagcaaggaaatctagttttggatttttcagtcccccttaactctcaatatctggttctgaattgcagcttattctcccctctttcattaatagtgtgataatatgcttatagtttgcattcctctgatggtcaatatcttgtgtaagtatggaggaaaccagtaagccaaaaccaccagagtctcaggtcagttttaagtccaaattcagatcttacatatactcca

SEQ ID NO: 17246 - DNA, 423 bp, Homo sapiens
gagtgtctgatatatagtggggactccatgaactcgttccttcctggatgagctggtttagaacatctagaaatggtcatagtggaaataggggtattttaatttttatcacctggttaatattgggaagttcactgagcctttagatagatgtgccctttgatatcttccttgattttcttggggggagaaaagcttagaatataaactcagaaggttcaaatcccatctcctcttttcccagcaacatctccatgagcatctccaacttttctggcttctccttctccatctacgtaatgagagcaatcataagtccttggaggattgtagcgaggatcaaatcataacgtatgatgctgcctggtagtagtaactggttcctacacaagttttacctagtgacaacttgaaagctaacac

SEQ ID NO: 17247 - DNA, 432 bp, Homo sapiens
agtattgtaacatcacggtgtagtaggaaagaatgttggcgaattgaatccagttttaggctctgctcctattaggcaagtggcttcttttttcctgggcctcagtttcctcatctgtaaaatgagtgaattatattagctgctctccagaaacctttagccatgtgcacagtttgaataatttcattttaatttggaaaagaataaacttgttaagcatttgaaaatcaaatagaaaacatgagggaagaaagctatatttagtgtagacatttacattttttaaattaaactctacattatgatattggtaataagaattagaatgagacagtctttactattctctccctagctctaatatggcacagatgtgataataaagtccatatgcagccttgaagaaagtgtttgattagacataaaatgtta

SEQ ID NO: 17248 - DNA, 297 bp, Homo sapiens
tattagttgtaagccaaaacatgttttaaaagttgctggaatagcattgaacaatttaactttcattgaaataggcatatatatgccttctcttgataaaggagacgtgcatatggatattgaataagtttcatttcaagataatgaaataggcacttagccttcatcctctgtctatagttcagaaggatcacatcttctcctgtcttggagttcctggttaacttttagttaaaaatggtgactcctctcctccagcagaccccttccctactttctgtctacacattgacctgt

SEQ ID NO: 17249 - DNA, 1029 bp, Homo sapiens
atccctgctccggacaggtgtggggtgcacactgaaaatgccacgctccttcctggtgaagagcaagaaggctcacacctaccaccagccccgtgtgcaggaagatgaaccgctctggcctcctgcccttaccccggtgcccagagaccaggctccaagcaacagccctgtccttagcactctattcccaaaccagtgcctggactggaccaacctcaaacgagagccggagctggagcaggaccagaacttggccaggatggccccggcaccagagggccccattgtgctgtcccgaccccaggatggggactctccactgtccgactcacccccattctacaagcctagcttctcctgggacaccttggccacaacctatggccacagctaccggcaggccccctccaccatgcagtcagccttcctggagcactccgtcagcctgtacggcagtcctcttgtgcccagcactgagcccgccttggacttcagcctccgctactccccaggcatggatgcgtaccactgtgtgaagtgcaacaaggtcttctccacccctcacgggctcgaagtgcatgtgcgacgctcccatagtgggacccggcccttcgcctgtgacatctgcggcaaaaccttcggccacgctgtgagcctggagcagcacacgcacgtccactcccaggagcgcacttcgagtgccgcatgtgcggcaaggccttcaagcgctcgtccacgctgtccacccacctgctcatccactcagacacgcggccctacccctgccagttctgcggcaagcgtttccaccagaagtccgacatgaagaagcacacctacatccacacaggtgagaagccgcacaagtgccaggtgtgcggaaaggccttcagccagagctccaacctcatcacccacagccgcaagcacacaggcttcaagcccttcagctgtgagctgtgcaccaaaggcttccagcgcaaggtggacctgcggcggcaccgcgagagccagcacaatctcaagtga

SEQ ID NO: 17250 - DNA, 456 bp, Homo sapiens
ctacgcaagtctagattctgccttgaatccagcttcctgtgtccagtgccagacagcgagacaggatactggcagttcggactgccctggacattgccccatccttgggcaatgctggcatggcatggtgaaatgaaagccctaggtcttcccgaaagctgcccttgcctctgccaagacaggagatcagaaataacccggtcttgtttttatgcctccagcgagtgggcccactccatgcctttccaagcaaccacattcctccttgctgtagttgtgggacactgggttgaagcaccccttgacctttatctggtagatgagaataacaatccctgtctggctgggtggatgtgctgctttacgggagattatttaatacatgttacataggtagcatggtacctgggaggaaagagatgtctcagaaatgttacatgccagttttcatcatcc

SEQ ID NO: 17251 - DNA, 387 bp, Homo sapiens
aaattcagatgttaaaaaacttctaatatattataaaacagtcaaaatttcccccaaggagttagcaaggtcaaacatatgaacatatatacaaatattttagttaatggaactggaggccattatcctaactgaaatatctcagaaacagaaagtcaaatacttcatgtttccacttataagtgggagctaaacaatgggtacatgtggtcctacagagtgaaataatagacactggcgattacagaaggtgggagggtaagaggagggtcaggctcaaaaaaattacctgttgggtacaacgttcgctattcagaagatgggtatgctaaaagcccagacttcaccacgacacaatgaatgtgaaacctgcacttgtactctcta

SEQ ID NO: 17252 - DNA, 639 bp, Homo sapiens
gagaacgccgggaccgaactcttgctgcagggttttgagcgccgcttcctggcggtgcgcacactgcgctccttcccctggcagagcttagaggcaaagttaagagactcatcagattctgagctgctgcgggatattttgcagaagactgtgaggcatcctgtgtgtgtgaagcacccgccgtcagtcaagtatgcctggtgctttctctcagaactcatcaaaaagtcctcaggaggctcggtcacactctccaagagcacagccatcatctcccacggtaccacaggcctggtcacatgggatgccgccctctaccttgcagaatgggccatcgagaacccggcagccttcattaacaggactgtcctagagcttggcagtggtgccggcctcacaggccttgccatctgcaagatgtgccgcccccgggcatacatcttcagcgaccctcacagccggatcctcgagcagctccgagggaatgtccttctcaatggcctctcattagaggcagacatcactggcaacttagacagccccagggtgacagtggcccagctggactgggacgtagcaatggtccatcagctctctgccttccagccagatgttgtcattgcagcaggtaatgcccag

SEQ ID NO: 17253 - DNA, 381 bp, Homo sapiens
taactccctcacttggacttgagacccttccctaactccctcacttggacttgagacccttcacaacccagcagcgctccacctccaacttgacatcatgctttctggaaacttccccgtatgtcccactttcccacacttggtgccctggagcaccttccggcctctacatgctgtacgttcccctgtgagcaccctcctctcggcctctggccaacacagtcccacccatctgtgggtaacaagggggtgtgggtgttcttttcagccttgctaaactgtctgaatcaaggatcacaaactacagcctgcaggccaaatccagcccacagcctgtgtttgtaaataaagctttgttggaacaaagccacaccccttaat

SEQ ID NO: 17254 - DNA, 1611 bp, Homo sapiens
gagaacgccgggaccgaactcttgctgcagggttttgagcgccgcttcctggcggtgcgcacactgcgctccttcccctggcagagcttagaggcaaagttaagagactcatcagattctgagctgctgcgggatattttgcagaagactgtgaggcatcctgtgtgtgtgaagcacccgccgtcagtcaagtatgcctggtgctttctctcagaactcatcaaaaagcacgaggctgtccacacggagcctttggacaaactgtacgaggtgctcgcggagactctgatggccaaggagtccacccagggccaccggagctatttgctgtcctcaggaggctcggtcacactctccaagagcacagccatcatctcccacggtaccacaggcctggtcacatgggatgccgccctctaccttgcagaatgggccatcgagaacccggcagccttcattaacagacgtgctgtattgcccagaagccatcgtgtcgctggtcggggtcctgcagaggctggctgcctgccgggagcacaagcgggctcctgaggtctacgtggcctttaccgtccgcaacccagagacatgccagctgttcaccaccgagctaggccgggatgggatcagatgggaagcggaagctcatcatgaccagaaactgtttccctatggagagcacttggagatggcaatgctgaacctcacactgtaggactcacacatgactccaaagggattgtgagaatcaagtcactctcgtgggaagaatttttatatgggaaagtggataaaactttcattggactggaatgtttggagattattaaactccaaatcaggaatcaaaactgccctctaataagacattagctgtctaggcgtgtgggtgccccctttctgccagcagttctggttctcaagaaaatcatcataaatcagacatgaaaattctggctccaaaaatagcattttctttctgcaaataaaaacgtgtgtatcaaggatgacgttcccccaacgtggacacactcagttcctcagaaagccaagcccgctgcagctgccacatccctggacacactcggttcctcacaaagccaagcccgctgcagctgccacatcccagggcttatggtgcagcaggcgcttttttcaagacaggaatgaaagtgttaggaacacggcagaaaggtgacacctggagaccaaatgcaggatgaggagtactgcagaggtcacagggaagtcacagaacagtaatacgctagcaggggcatggggcatgaagaacagaagacaggaagcatttcagagactccaaagaagaaatcagggccaaccacagcttcccgggtcattcaccaggtgacaccactgccgtcatttcagcttctggccactgggaggcgctgctcgaaaggctttgccctgagaccccaagaagctgcgggaaggacagcaggggccctggggttttagcctctggcccaggagttatgtgtccataaccaaagggagcacagtctgcacccagctctcatcccatcagagctgctgagactcttgcaggttcttccagaactggtttagcttgcctgcaggatcaga

SEQ ID NO: 17255 - DNA, 1709 bp, Homo sapiens
gagaacgccgggaccgaactcttgctgcagggttttgagcgccgcttcctggcggtgcgcacactgcgctccttcccctggcagagcttagaggcaaagttaagagactcatcagattctgagctgctgcgggatattttgcagaagactgtgaggcatcctgtgtgtgtgaagcacccgccgtcagtcaagtatgcctggtgctttctctcagaactcatcaaaaagcacgaggctgtccacacggagcctttggacaaactgtacgaggtgctcgcggagactctgatggccaaggagtccacccagggccaccggagctatttgctgtcctcaggaggctcggtcacactctccaagagcacagccatcatctcccacggtaccacaggcctggtcacatgggatgccgccctctaccttgcagaatgggccatcgagaacccggcagccttcattaacagacgtgctgtattgcccagaagccatcgtgtcgctggtcggggtcctgcagaggctggctgcctgccgggagcacaagcgggctcctgaggtctacgtggcctttaccgtccgcaacccagagacatgccagctgttcaccaccgagctaggccgggatgggatcagatgggaagcggaagctcatcatgaccagaaactgtttccctatggagagcacttggagatggcaatgctgaacctcacactgtaggactcacacatgactccaaagggattgtgagaatcaagtcactctcgtgggaagaatttttatatgggaaagtggataaaactttcattggactggaatgtttggagattattaaactccaaatcaggaatcaaaactgccctctaataagacattagctgtctaggcgtgtgggtgccccctttctgccagcagttctggttctcaagaaaatcatcataaatcagacatgaaaattctggctccaaaaatagcattttctttctgcaaataaaaacgtgtgtatcaaggatgacgttcccccaacgtggacacactcagttcctcagaaagccaagcccgctgcagctgccacatccctggacacactcggttcctcacaaagccaagcccgctgcagctgccacatcccagggcttatggtgcagcaggcgcttttttcaagacaggaatgaaagtgttaggaacacggcagaaaggtgacacctggagaccaaatgcaggatgaggagtactgcagaggtcacagggaagtcacagaacagtaatacgctagcaggggcatggggcatgaagaacagaagacaggaagcatttcagagactccaaagaagaaatcagggccaaccacagcttcccggtccctaactccctcacttggacttgagacccttcacaacccagcagcgctccacctccaacttgacatcatgctttctggaaacttccccgtatgtcccactttcccacacttggtgccctggagcaccttccggcctctacatgctgtacgttcccctgtgagcaccctcctctcggcctctggccaacacagtcccacccatctgtgggtaacaagggggtgtgggtgttcttttcagccttgctaaactgtctgaatcaaggatcacaaactacagcctgcaggccaaatccagcccacagcctgtgtttgtaaataaagctttgttggaacaaagccacaccccttaat

SEQ ID NO: 17256 - DNA, 1509 bp, Homo sapiens
gagaacgccgggaccgaactcttgctgcagggttttgagcgccgcttcctggcggtgcgcacactgcgctccttcccctggcagagcttagaggcaaagttaagagactcatcagattctgagctgctgcgggatattttgcagaagactgtgaggcatcctgtgtgtgtgaagcacccgccgtcagtcaagtatgcctggtgctttctctcagaactcatcaaaaagtcctcaggaggctcggtcacactctccaagagcacagccatcatctcccacggtaccacaggcctggtcacatgggatgccgccctctaccttgcagaatgggccatcgagaacccggcagccttcattaacagacgtgctgtattgcccagaagccatcgtgtcgctggtcggggtcctgcagaggctggctgcctgccgggagcacaagcgggctcctgaggtctacgtggcctttaccgtccgcaacccagagacatgccagctgttcaccaccgagctaggccgggatgggatcagatgggaagcggaagctcatcatgaccagaaactgtttccctatggagagcacttggagatggcaatgctgaacctcacactgtaggactcacacatgactccaaagggattgtgagaatcaagtcactctcgtgggaagaatttttatatgggaaagtggataaaactttcattggactggaatgtttggagattattaaactccaaatcaggaatcaaaactgccctctaataagacattagctgtctaggcgtgtgggtgccccctttctgccagcagttctggttctcaagaaaatcatcataaatcagacatgaaaattctggctccaaaaatagcattttctttctgcaaataaaaacgtgtgtatcaaggatgacgttcccccaacgtggacacactcagttcctcagaaagccaagcccgctgcagctgccacatccctggacacactcggttcctcacaaagccaagcccgctgcagctgccacatcccagggcttatggtgcagcaggcgcttttttcaagacaggaatgaaagtgttaggaacacggcagaaaggtgacacctggagaccaaatgcaggatgaggagtactgcagaggtcacagggaagtcacagaacagtaatacgctagcaggggcatggggcatgaagaacagaagacaggaagcatttcagagactccaaagaagaaatcagggccaaccacagcttcccgggtcattcaccaggtgacaccactgccgtcatttcagcttctggccactgggaggcgctgctcgaaaggctttgccctgagaccccaagaagctgcgggaaggacagcaggggccctggggttttagcctctggcccaggagttatgtgtccataaccaaagggagcacagtctgcacccagctctcatcccatcagagctgctgagactcttgcaggttcttccagaactggtttagcttgcctgcaggatcaga

SEQ ID NO: 17257 - DNA, 1753 bp, Homo sapiens
gagaacgccgggaccgaactcttgctgcagggttttgagcgccgcttcctggcggtgcgcacactgcgctccttcccctggcagagcttagaggcaaagttaagagactcatcagattctgagctgctgcgggatattttgcagaagactgtgaggcatcctgtgtgtgtgaagcacccgccgtcagtcaagtatgcctggtgctttctctcagaactcatcaaaaagcacgaggctgtccacacggagcctttggacaaactgtacgaggtgctcgcggagactctgatggccaaggagtccacccagggccaccggagctatttgctgtcctcaggaggctcggtcacactctccaagagcacagccatcatctcccacggtaccacaggcctggtcacatgggatgccgccctctaccttgcagaatgggccatcgagaacccggcagccttcattaacagacgtgctgtattgcccagaagccatcgtgtcgctggtcggggtcctgcagaggctggctgcctgccgggagcacaagcgggctcctgaggtctacgtggcctttaccgtccgcaacccagagacatgccagctgttcaccaccgagctaggtgaacccccacgcccacccgggcctacatggtgcccgagctgtccctgcaggactccagtggaagtgaaagaactgggcgctggggaaaagctaggatgctccacactcccacactatgcggggaactcgggcagaggccggccgggatgggatcagatgggaagcggaagctcatcatgaccagaaactgtttccctatggagagcacttggagatggcaatgctgaacctcacactgtaggactcacacatgactccaaagggattgtgagaatcaagtcactctcgtgggaagaatttttatatgggaaagtggataaaactttcattggactggaatgtttggagattattaaactccaaatcaggaatcaaaactgccctctaataagacattagctgtctaggcgtgtgggtgccccctttctgccagcagttctggttctcaagaaaatcatcataaatcagacatgaaaattctggctccaaaaatagcattttctttctgcaaataaaaacgtgtgtatcaaggatgacgttcccccaacgtggacacactcagttcctcagaaagccaagcccgctgcagctgccacatccctggacacactcggttcctcacaaagccaagcccgctgcagctgccacatcccagggcttatggtgcagcaggcgcttttttcaagacaggaatgaaagtgttaggaacacggcagaaaggtgacacctggagaccaaatgcaggatgaggagtactgcagaggtcacagggaagtcacagaacagtaatacgctagcaggggcatggggcatgaagaacagaagacaggaagcatttcagagactccaaagaagaaatcagggccaaccacagcttcccgggtcattcaccaggtgacaccactgccgtcatttcagcttctggccactgggaggcgctgctcgaaaggctttgccctgagaccccaagaagctgcgggaaggacagcaggggccctggggttttagcctctggcccaggagttatgtgtccataaccaaagggagcacagtctgcacccagctctcatcccatcagagctgctgagactcttgcaggttcttccagaactggtttagcttgcctgcaggatcaga

SEQ ID NO: 17258 - DNA, 437 bp, Homo sapiens
tacctttatcttgccaaatccaattagacaggtctgtctgcagtctacctgactgcacagatgcatttaacataatagtcttctgcctccctcttgaaatacattttcacttggtttttgggcccctctcctttctttttttctcttttccagtgccttctcaacttccttagcttgtccttttgccatccctgacccgttaatgggtaggggggcctgtgccttagtcctagagcccccaattcttctcttccttagtcatcccattcaggtttctgactttaaacatcatctacaagctgatgatccccaaatctatacctctagctgtgacttttgactgaactctagactcttacatccaattacctactcaatgtctctatttggttgtctaacagatacgtcaaccttaatatgacctaactctcagtttc

SEQ ID NO: 17259 - DNA, 346 bp, Homo sapiens
gtaggattaaacaatgaaagacaggttatatttttctaacctgtgttttgctgagctgaagcatgaaatatcaaatatttataataaagtattcatagttaagtacactgaatcattaaaatgttggaaatattgaaatggatgatcgatcttattggagtccttgtgtgatacaggaacttctgtatttactgttaacaagaaaaactcaaaaggttacattcctttttagattcagagctcaaatagaattgatttaaaatttaaagcacttctaataagacatttcagcattgcataagttaaacatggagaaaaaaataaatacatttatgtttttctatta

SEQ ID NO: 17260 - DNA, 344 bp, Homo sapiens
agtctcaatttacatttgttgcctgccagatttctggaagaaaacaagtatttattagcttcttaaaatgtatggaagcactgtgctaggcattgttaagaaattatttcaggtgtgagccactgcgcctggcctatatgaattttatatttacctgctcccttcaccaggagatcatgctgctgtgatatcgggttttcttaacagcataaggaagacttgcccccttgccctatcaaagagaatagttttggaggggagaagtggggccaaaaaagatgcagttttcatttgtatagggaaatgtgaaaataaaattgccaactcctttagttaataacaaa

SEQ ID NO: 17261 - DNA, 572 bp, Homo sapiens
ggaagggcatgtgactgactccctcagcgccctgcagtcttgtcccctctggtcccaaaagtgtatcctgccttcgctttgcgataggtttcttcctgccctttgcctggaaattttatctctggttcttgcaaacattatttacagctgtctaattttttctgtctacctcacagctgccaaactaaagtaggtgggaagccattttccctctctaggtcaatgaataccccccgttctccacccgcgcttttgaagattccagcactgctgccaagtcaacccatctgcaggagaacgctttggaaaaaacagactttaaaaagaaaagcaaactgctcttagcccctgatagcttctccacaggagagggaatatggacagagctgaggttcaagacacatgtgctgtttgagctgaatctgtgctgttttcttctttccgtggttacccaacaacgaaggcgtgttgtaccttcttgccttcaaacctgttcctcctcccgtcagatgtccttactcctcaatttgaagttttccttcataggatttctgagaaggactttggaaaaa

SEQ ID NO: 17262 - DNA, 295 bp, Homo sapiens
tgacttacctgatctgattgatgcatttgcagttccaggagatgcctacaccgattatgtagctacgagatggtaccgagctcctgaacttcttgtgggagatactcagtatggttcttcagtcgatatatgggctattggttgtgtttttgcagagctcctgacaggccagccactgtggcctggaaaatcagatgtggaccaactttatctgataatcagaacactaggtatgaattgcattttatggcaacagagttgctgaattgttatagcattcatatgttactataat

SEQ ID NO: 17263 - DNA, 275 bp, Homo sapiens
aaaagcttatatacttaaattaggaatccttaactctcgaacaaaatggtatgtttcccaaatatttctgtctgtatttaaggctggaggtaactgaggcttcattgaaactggttaataatctttgtctaatgaaccttgatttaaaagttggaagtcaaatatgagcacaaaatatttctgtaatggtattagaaaataaaacttccctcttttctcactctctttctcttttaacctctcttcctttccttcaacctcttttctctctcttc

SEQ ID NO: 17264 - DNA, 178 bp, Homo sapiens
gtatttaatataaaaatatatgtaaacagaaggatatagaacagagtggatatttctaatgaattctgtattatatatacatatatctgcactgtttaaatgttttatagtgggaaaaatgttttaattagaaaaaatagactttttcaataaaaccttttttgacttatctcaaaat

SEQ ID NO: 17265 - DNA, 479 bp, Homo sapiens
aattctactaacatgtaggcttaaatgataaccagccactgttctctggcttgcttttctataattccttgcctcttaggagatgtggccagaggtcacaggattggtgacttttccaattgttcctatagataacactacttttatattgcctaagattgttattctgagatgtttttcagaattctgcattctggcaaatgaatgactgcacctgacccgtgactcatgactcaactagtcctgtggaccccgccttgaggtggactcagtgcaccaggaccattttccacacccctacaatttcatccccaaccaatcagcagcactcattccctagcctgctgttcaccaaattagccatgaaacccctacctagactagcctctgagttctgagagaggctgatttgagtaataaagtaataaactcctgttctgcttggctagccctgtttattaaacttgttctctactgca

SEQ ID NO: 17266 - DNA, 193 bp, Homo sapiens
caaatttatgtgacttgaataaatcttttggtaaataaaactatgttgttattgttggtttaataaaaataactgtcttctgagctaacaaaaaaatatacatgtgcttaatggcaaggttcttgcttttacgatacttgcctaatgtacagtaatataaaaaacagttaataaaaaatttaacttgtgatga

SEQ ID NO: 17267 - DNA, 494 bp, Homo sapiens
ttggactttgttgcaaggatagaagactttctgtatctccaggttcttgccttggtgtaccagaagaatcaatcacacatggtcttggagaatgagtgcaaagttttattgagtgcaggtagctctctgctgctcttccaccagtatgctctccacaaccagccgcttgtgtgttcttccactgatgtgtcctctcaatgtccagacgcttctgtctctgccttgctaggatcttgggcttttatagaccttggatggggaggtggtgagccagggtggtcttgggaaatgcaacatttgggcgtgaagtcaggagtgcctgttctcacctaggtccgtgggggtaaagccctagctagggaccatgccttcctctacccagcacttcccttcctcattctgtatcatttaaagagaccacactcctcccttcccagcactcctgtatcagtaggaagatagaagaaaactctagatcaccatcaagttcaagt

SEQ ID NO: 17268 - DNA, 465 bp, Homo sapiens
tccttggccagagatcttatttccctcttattgagaaacagaggacagcctccatgagccccctgggtgtgcctacccatctccacctgagaagatctcctacctccatttggcccagtttgccaactggcttaacaagaaaaactgctctccagagataccaccttgatcttcactgccccaggatcttctctgacagttaactctttgtctcttgtacttttgattcctccctgtccctgtgtggtttacagactcacacattgtcttccatctgtgactctattccattgctttgggtacttcccaggttcagaacctcatcttctctcacctgggctcctcattgatccctccagctgcagctgctttcttcccagaattttatgccagaattatttcattaaaatacacgtgtgattatgttagtcccctacccaaaaactcagagatctccaaaaagaa

SEQ ID NO: 17269 - DNA, 456 bp, Homo sapiens
acagtctcaatctcatcagaagagaggtcctataaactcgttaaacctgttatcaacccagtacccatgacagtcattctcctgagctggctgtagtccctgtccatttcctttttaccatttttctcacattcccagtctccaaaaagaggaaaggatagagacttttgatgacttcattcccataaggtgtgactcagctactgtcacgtcataccagacaaacaaggatgctttggagtggaggaccaaggaaaaggaagtaaccaaacccaatggatgaggaagacaagctgatttggaagggaagtgaggaagaggatgaataaagaagttggaaaaaaggggacccaagcacactcaaatgcaaaagcagagatttattgaaaagcattgagagactgattggaaaccgagaaagaaaatggttatattttttaagtctcagtcccattt

SEQ ID NO: 17270 - DNA, 508 bp, Homo sapiens
ctcattcagttgcaagaactccattagtatgttggcagagtctgtcacagaaatgcttttcaagggcattatttgaagtatgatatgacattgcctcccttaaatatttctcaggctttgcaaacttagaggataactttgccaaatcttgtaagtttttgtttcccattactgatttttttttcacaaatagtcattaaacactcatttgttaaaggcttaacacactccatttttctgccaaatttatatttgcacccaaactatgtttcagcaattcagaattaaattaatgcagtacatcctatttatcaatatggcagaccagctgctggaggacaagggatgatttacacccgactgtgagtctgtgtgtttgtctgtacacgtgtgtgtgtgtatatacatcttgcataaacctgtgagctcttccctggtatttatttcacactggagaattcctgataaaataatcctttaaatatcttgacatgtggtttaaatcatc

SEQ ID NO: 17271 - DNA, 675 bp, Homo sapiens
agagatcccggcttaggagtatcacagtgagaccggtctcaacaaaaataaaataggctgggcgcagttgctcatgcctgcaaccccagcacgttgggagaccaaggtgggtggatcacttgaggtcaggatttcaggaccagcctggccaacacggtgaaaccccatctctactaaaaatacaaaaattagttgggcatggtggcatgcctatggtcccagctactcaagaggctgaggtaggaggatcgcttgagactgagaggtgaagtctacagtgggctatgatcacgccactacactccagcttgagcaacagagtgagacccatctcagaaaaaagaaaaaagagaggatgatcccaggcaagctaattagcctctttgggcttcatgctcatgatctgtaaaatgggcacactaataatatctacatcataggactgtggtgaggtttaatggtcagtatctataaagcacttaagaccatgctaggcacctaagaagagctctatgtgagttggctatttttcttggccttgcctgtttcttctagtaactacctaggctgtgacttccctaatttttctaaaaaatgaataaaaagcctagattttcttgcaatgcaaggtatagaagaggaaatagaagcagaggtttcacagtgtggtacccc

SEQ ID NO: 17272 - DNA, 813 bp, Homo sapiens
tgacatggaaatgtagactcagtaaatgtgtacaaacgtggtgtatctagagctcctgctgtgtgtttacagagttggtgctgcatttaaggaggacagagatgcctttgttgtcatgctgaccacattcccttcctggtaagcagtactcactcctgagtcaggcccctaggttcaaatctcagccctaccatttattaagaggatgggccaggcatggtggctcactcctgtaatctcccagcacttcgggaggctgaggtgggggcattgcttgagcctaggagttcgggaccagcctgggcaacatagggagacccccatctctacttgggcatggtggcatgcctatggtcccagctactcaagaggctgaggtaggaggatcgcttgagactgagaggtgaagtctacagtgggctatgatcacgccactacactccagcttgagcaacagagtgagacccatctcagaaaaaagaaaaaagagaggatgatcccaggcaagctaattagcctctttgggcttcatgctcatgatctgtaaaatgggcacactaataatatctacatcataggactgtggtgaggtttaatggtcagtatctataaagcacttaagaccatgctaggcacctaagaagagctctatgtgagttggctatttttcttggccttgcctgtttcttctagtaactacctaggctgtgacttccctaatttttctaaaaaatgaataaaaagcctagattttcttgcaatgcaaggtatagaagaggaaatagaagcagaggtttcacagtgtggtacccc

SEQ ID NO: 17273 - DNA, 371 bp, Homo sapiens
aaattttagagtgcttgccactgggctttaaaaaagaaaaaaaagaaaaactttatgaggtcttcacttaaccatgttctctttagttagtaataggagtaaacaaacagctctttatagcgaggaaggaattatgccaatattaaatccagagcaaactttttttctgcaagtgtcaaaatttatcaacaattaatgaggagtatttctgtgcaaaggcaaatgaatgaattaactcaacacatatctccctctttggagagttcctctgaagaaatgttaacataacataatgggtgcttgtaacaatcaccgtacttttttttttttttttttttttttgagactgagtcttgctctgtcacccaggc

SEQ ID NO: 17274 - DNA, 347 bp, Homo sapiens
aaattccacaaaggtccaaattctagggcccagacagaagagaagagtcacatcatctagatgatgaatgaaaagatatgtcattattctcctttgggcagtgcttctgcagaaaagttgcaccttctaggtgttggactcagcaatatatcacaatgtctgcagtattttggaaggagaggagagtcaccattacttagtctatcttcaatttacagaccttggcttttctaccccaattcaagaagtcacttcttcagtcaaccaaaccaattacaaaattgtgttccaatgtcacatgttcaaaaataaacagttcctgaaaagatgtaagctttaaaaaaaat

SEQ ID NO: 17275 - DNA, 4230 bp, Homo sapiens
  misc_feature (1034)..(1034): n is a, c, g, or t
  misc_feature (1943)..(1943): n is a, c, g, or t
caacgcttttgacaagtcaaacttttctaaacatcaagaaaatcatgctgctgagaaatcctagaaatgtgaagaatgtgacaaagcctctaaatgattgtcacacttgatcgtagggcccagacagaagagaagagtcacatcatctagatgatgaatgaaaagatatgtcattattctcctttgggcagtgcttctgcagaaaagttgcaccttctaggtgttggactcagcaatatatcacaatgtctgcagtattttggaaggagaggagagtcaccattacttaggtgctaggcccagcaatacatctcaagcacttcttgggcaaagcccaagcagtaaaaaagagtcacattacctaggttctgggtatagcaatatgtcacaaatgcccctaagaagagggcccaggaaaagagagtcaccttggtgagaatgtcagagatattccatttttgggtattcacaaaaaagaataaagtcccataacctagaaggtgggctctgctccatgacacaaatcaccctagtgggcaggtccattaaagagaaggctgtcaaagcacatagatgctgggcaaagtgatatgtcataatccccatgatgataggcccagagacatgtcacaatgacctctttaggcagagaccaggcagaagaatcacatcacttgtgtgctggccctagtgataagtcactctcatttctgtggacatggcccaggcagaagagcagagtcacattacctaagcgctgggtcaagagatatgtcacaatcttttacatgggcaaaacccaggtaaaaaagaggagtaatatcagatagtaggtgttgccagagatatgtcaaaatgccccctgtatgaaagactcaggcagtcaaaacacattagttggtttcttaacctagtgatatgttataatctttcctgtgggtatgatgcaggcagaagacgagagtcatgtgatggatgcagagacatgtcacaaggtcttctgtgggcagggtccagactgaagccttccaccngctaggggttgagcccaatgatatgtcacaatacccaaattatgcagggcccaggcaaaaaaaacgagaggcacatcacctgggttctggatccaatgatatatcacaattttctattttggcaagacccaggcagaaagaaaagttacatcacctaggtgatgaatgaaaatacatattataatagttttgtgggcaggacccatgcgggagagtcacatcacctaggtgttggacccagaaatatgtcacaatatacagtgtatacagagctgaggcatgagacaatagtaacttcactcatttgttgagcccagctatacaatccttttttgggcacagccgaagtagtagaggagagttacatcaccttggtgctgggtccagcaatgtgtcaccatacctgctgaggggagggtacaggcaagagagccacatcacttaggtgaggggcccagagatatctcacagtaccccctgtgggtagaactcaggaaaaaggagagagtcacataatctagaagctgagctcagctgtatgttacaatcacccagtggacaggtcccaggcatgagagtagagtcacatcacataggtgctggaccaagcaatttgtcacaaccttcactgtggacaggtccccagaaaaagagaatcacatcatttaggtaacaaaacctgagttagtcactgttacttgtttgggcagaggtcaggaagaagtgtcacacaacatgtatgctggactaagcaatacgtcactctctctgttttaggtatggcccaggcaggagagaagggtcatatcacctaagctctggattcgcagataggccccaatctcttttttgggcaatgctcgggtaagagagcagagtcacatcaagtggttgatgggcccagagatntatcacattgccccttgtggacagggaccaggcaggggactcacatcacaatagaggtaggacaaggaatacatcacaatacgttttgagagcagaaccaaaaaagagtaacataatctttgtgttgagtgcagcaatatgttacacttttctttgtgggcagaacgtgtaaagaaggaaaaagttggccggacacggtggcctgtaatcccaacactttgggaggtcaaggtgggcagatcacctgaggtcaggagttcaagaccagcctggccaacatggcaaaacgctgtctctactaaaaatacaaaaattggctgggtgtggtggcgggcacctgtaattctagctactcaggaggctgaggcaggagagtcacctgaacctttgaggcagaggctgcagtaagcaaagatcacgccactgcactccagtgtgggtgacacagcaagactccatctcaaaagaaaaaaaaataaagaaaggaaaagtcacataagctaggcacttggcccagtgatatgtcatagtcacccatttgagaagggaacagcgaagagaagagagtcacatcacctctctggtggacacagagatatctcacaatgctctctgtaggcagggccagggcacaagagttatataactcgggtgttagaccaagcaacatgtcacaatggctgatatgggccagacacagacaagggagtcacatatttgggtgtagggctcagttatatgttgaaatgccccctgtgggcagcgacaaagcagaagattcacatcacctggatataaggcccggtgatacgttacaattcccctgtgagcagcgctaaagcagaagaatagggtaatatcacctaggggctgagtccagtgatatgtcacaattccatctgggctgggcccaggcagatgtgtcaaatcatgaaggttctgtgaaggtgcatatatcacaatcacacctgcaggaaggtccaataatgagattaacaatctcacacaggtccgggttctaggtatgagagtcaacacctgtgtgttggatccaaatagatgagtcgtagtctcaacaattgacttgatccatgtgtgagatcctagtttctatttgcattactattggtaccagtacctattaattcttccaccttctacatctttgttctgtatgaatgtatatacaaagattgatacatatacaagattatatgagtatttctatgtaaatatgtacacaaaaattgttcctccaaagacatttttcagtatcttagcatattctaagggtgcagatgtagaattatttctcttctctggctcagtagcatgtcagaatggaacataggtatagaatgttttttgtatagacaaagcttcactttcaggggcaaggtttgggaaataagctgatagtaaagtcatgtaacactttctgtgcaggttaacatttctggaccttgctttccttctcagtgtatgcatgagctattctcatgcaccactgggggccagtcttgattaatctacagttgaaatttagagaactggctgattgaatccacctgggctgagctaactgacattgaaatcagctgggctgagcttattggccagttaaaatcatctgggctcaaatatcggctgactggagtcacctgggctaaactaattggctgattttaatctcctgggattggttaattgactgtaatgacctgatttgagttaattgactgattgaaatcaaaagtgctgacctaattggctgattgaaatcacctagaatgaggtaactgactgattggatttacctgatctgagctaattggctgatcagaattacctagaccaaattaattggctaattggaatacactgggctgagctaattggctgattgaaataatcagggctgagtaagtgggttgcttgtattcacctcccctgagaagaataagtagggaaatgatctctgacttacctttttttttataagacatactcataaatggacattacatagatatatttatatattgtatgtgtttgtatgtgtttatctacatatattatatctgttaaccttcaagttaaagtgtgcaaaggaatctgaaatttgctttcaatattgcagtctatcttcaatttacagaccttggcttttctaccccaattcaagaagtcacttcttcagtcaaccaaaccaattacaaaattgtgttccaatgtcacatgttcaaaaataaacagttcctgaaaagatgtaagctttaaaaaaaat

SEQ ID NO: 17276 - DNA, 524 bp, Homo sapiens
caacgcttttgacaagtcaaacttttctaaacatcaagaaaatcatgctgctgagaaatcctagaaatgtgaagaatgtgacaaagcctctaaatgattgtcacacttgatcgtagggcccagacagaagagaagagtcacatcatctagatgatgaatgaaaagatatgtcattattctcctttgggcagtgcttctgcagaaaagttgcaccttctaggtgttggactcagcaatatatcacaatgtctgcagtattttggaaggagaggagagtcaccattacttaggtatggcccaggcaggagagaagggtcatatcacctaagctctggattcgcagataggccccaatctcttttttgggcaatgctcggtctatcttcaatttacagaccttggcttttctaccccaattcaagaagtcacttcttcagtcaaccaaaccaattacaaaattgtgttccaatgtcacatgttcaaaaataaacagttcctgaaaagatgtaagctttaaaaaaaat

SEQ ID NO: 17277 - DNA, 996 bp, Homo sapiens
cgcttcaaccactcgtgaacgcgagcgcaggcgcgccggaggaaacggaggctgcgcttgcgtatgtgtgatgccgccgccccaccgtctactttcccaccgaccccgcttacgtctaccgcctaccagtgcgtcccccgcggactgtcattccccgaggcttgcctgactgttcagcttctctctcccgcttgtcccagagatccaactccattcttccggtcttgtcatttcagaaacctcgcaagaagctcgcccttgtcgtctcccagcgggcttcttagctcccagcttgtttgatgggggtgcctctttttctttccaggtatagctgtccagcgacaccatcatgcattcatttctccaacaaacattttcatgggctcttgctctatactggggatgtagtggtaaatgaaatggacgaggccctgccctcgtggaacttacagtctggcaaaggaaacagacaataaaattctcagttgtctaaggaggcagagatgcatggggagaggatcagagtagggatgcggaagcagcgagtggtcaggagtgtgcgtgccaaaaggcaggagacctgtgggacgtgggggcagctggggccggaacttgcgctggaggaacaccccttgcctgctggggcgagaagaggaccctttccttgggtgaaattccccatattgttaaaaggacaattaaagaaatgaaagagaggtcacctgggtgaataggcaacttagatgggcctccctgtgttcctgtcatgcctccaattctgcgtccaggtgtccggaacacatttttttctgcctttgaaaccttccagtacctctggcagagatataccataccctccttgttacctgcgtgcggaatcttaactcatcgttgtgctacatctgcaccttctgcctttgtgccttgttttgtgttttccctctccggggagaatataataaacttagctgagtccgttctacatacaaggaaata

SEQ ID NO: 17278 - DNA, 258 bp, Homo sapiens
tccagactagtattgtgaacaaagatatgcgagaagaaccttataaaagactgcccagcctggcatcctcgctgtggcagcagctcacatgtggtttaggagtagccccaccaggtggtagacaccctgtaaggtctggatgtaggtggactcctgggtcacttgtaagccaaggggattccctcttcttccctccctctacctttcccaccccctaaccctgcatatgggacttccccagctttcccgcttttatga

SEQ ID NO: 17279 - DNA, 325 bp, Homo sapiens
gaggagcccacctgtcctcccggaagagatggcccctttcacttgagattccaggagattgcccagggagaaggtgtggagggaggggttttgagaaggaatatgaagcctccagtggtgagcagtaccagcaagacgaccaagaagaggcagttgggttggtcagttaggaggtcttgtcatccatcttggggttggcagagcaatagagacagacatcacatcaccatgggaagagaagagaataagaggaagatgaagattatattccatcagaagactggaaaaaggagattatggtgggaaggtctttgctggtgggaag

SEQ ID NO: 17280 - DNA, 2827 bp, Homo sapiens
gaggagcccacctgtcctcccggaagagatggcccctttcacttgagattccaggagattgcccagggagaaggtgtggagggaggggttttgagaaggaatatgaagcctccagtggtgagcagtaccagcaagacgaccaagaagaggcagttgggttggtcagttaggaggtcttgtcatccatcttggggttggcagagcaatagagacagacatcacatcaccatgggaagagaagagaataagaggaagaagtggagatgagaggaacaggtcacctcttccaactatgaagggaaagaggtggatgagtggaagtgacccgtttggactggtctttttttatgtagctaatatttggcctgtgcttttctggatcaggccctgatgagcattttgtcaacaatatctccctgaaaccttaagagaacatcctagggttgacgtggttttgcccactatacagaagagcttcaaaagatgaaggcactttcccaagatggggggcagagctgggatttgtgtcccattctgttgcccttcagagcctcactttcaccactgtccttgtcttccctgtagtcatgaggggaagaaggaggtggagggctgcctgcagttagggagctggggcaaaggcaccagggaggctcccggtgctcagataggactggaagtctgggacacatcatttttcagagggggaagaggccagggaagagagaggctatttttaatagccaaatagatatgagcccattaaaaaccaggaggaaaggaataaaatgtttaataaaatctttaagtatctgagtggaggacctctctaagctgaaaagcaaggaaatgacaccaagaagagaaaggccaacagcgaacagggataagtgatggcctgtgtcccaagtggcctggagtggacggcactagatggacagataggggcttagccttggatagcaagcatgcaacgacccacccacccaaacctgggaggcttagcactcggcaggtgacctcatctgttctcaagccatcactgggaggtactcaataaatatttgctggggtgaaataactgaaatgggaaattagatcaaagaggaaaaataccagcattaagctattgatgatacaagaagttcccaaggtgctgggattataggcatgagccaccgtgcgcagccccttattcttttttaaaattgtcttggtcatattgcacatttactttttcaggtacattttataatcagcttgtcaaagttctgtgaacaaaatgtctgttggaagtttgagaagaattgcattgaaggggaaattaacatctttagaatataagttcttcccatctgtggacatggtgtctgtctctttttaatcagaattgtatttgttttgttttgttttgtttttaatgccttttaataaaggttggttgcttttgtcataaagatttttcacagttcttaataggtttattcctgaaaaccttattagttttgttgcttttgtgagtggaaaaactttcccttttttcattttgctttccaaattttaatcagtttactaatcactatgcttcattcacagacacacacacagcaaatgtgctttgtccctgggcacacaaatgaaaacacagcacacatgtaaatcagagctaattggctgaaaatgaattagaatttttgaattaaattttaattatacaagtaatacatgaatacattttcctttaaataaaattagagcattttaggtaaagaagtctctactggcctccccagcctgacctcaggccccttccccactttagaggcagctgctgttaggcatttgctgttgatccaaaatgttctcctatgcgcattgaaacatgtcctgtgttctattgttgcttttgtttgcttgcatagatgtggtggtgtacacactggaggtgctgctcctgagctcagggcaccttacgggactctcctcatgtcgcgtgtcacctgccgcagctggctccactgcccctttcagctggccgctggcaaccagaactgattgtgctatgatttatttagttgttgcttattgatcgactattaaaaggcttccagtcttgtttcaataagacaaacctgtaacagcatccttgtacatgccacttttgctcatgtacaagtgtttttctggagcagatacttagaaacagaattgatgggtcatagagtctacacatcttaaattctaatagtaactgctaaaatgttcttcaaagtacctttctgatttaatttcatgccagcagtatgtgtgtccatttctccagaccatctccaagttttacattttaaccaatctggtgggtgaaaaataatatcttgttttagtttgcatttttctgaattaccaggatggctgaagtctgtgtctcctatccatttatatttccttctctgcattacttgtccaaatcttttgcccatttcttttttttagggtacgttgtcttttccttattgattttttagaagttctttatgtattttgtatactttatgtgtattgcaaatattttctgtattgtgattcttgtcatttaattgtattgtgtctttggagaaatcttaaattttgatacagtcaaatcgatctattttaattttatgtctttttttcaattttatttaagaaagcctttcctgtactgaggtcataagcatttttcctgtatttcttctctaacatttatcatttacatatatgtgtgtgtgtgtgtgtgtgtatgccttttttaccacatgcaaaaaataaattccatatgcatacatga

SEQ ID NO: 17281 - DNA, 2538 bp, Homo sapiens
tccagactagtattgtgaacaaagatatgcgagaagaaccttataaaagactgcccagcctggcatcctcgctgtggcagcagctcacatgtggtttaggagtagccccaccaggtggtagacaccctgtaaggtctggatgtaggtggactcctgggtcacttgtaagccaaggggattccctcttcttccctccctctacctttcccaccccctaaccctgcatatgggatttgtgtcccattctgttgcccttcagagcctcactttcaccactgtccttgtcttccctgtagtcatgaggggaagaaggaggtggagggctgcctgcagttagggagctggggcaaaggcaccagggaggctcccggtgctcagataggactggaagtctgggacacatcatttttcagagggggaagaggccagggaagagagaggctatttttaatagccaaatagatatgagcccattaaaaaccaggaggaaaggaataaaatgtttaataaaatctttaagtatctgagtggaggacctctctaagctgaaaagcaaggaaatgacaccaagaagagaaaggccaacagcgaacagggataagtgatggcctgtgtcccaagtggcctggagtggacggcactagatggacagataggggcttagccttggatagcaagcatgcaacgacccacccacccaaacctgggaggcttagcactcggcaggtgacctcatctgttctcaagccatcactgggaggtactcaataaatatttgctggggtgaaataactgaaatgggaaattagatcaaagaggaaaaataccagcattaagctattgatgatacaagaagttcccaaggtgctgggattataggcatgagccaccgtgcgcagccccttattcttttttaaaattgtcttggtcatattgcacatttactttttcaggtacattttataatcagcttgtcaaagttctgtgaacaaaatgtctgttggaagtttgagaagaattgcattgaaggggaaattaacatctttagaatataagttcttcccatctgtggacatggtgtctgtctctttttaatcagaattgtatttgttttgttttgttttgtttttaatgccttttaataaaggttggttgcttttgtcataaagatttttcacagttcttaataggtttattcctgaaaaccttattagttttgttgcttttgtgagtggaaaaactttcccttttttcattttgctttccaaattttaatcagtttactaatcactatgcttcattcacagacacacacacagcaaatgtgctttgtccctgggcacacaaatgaaaacacagcacacatgtaaatcagagctaattggctgaaaatgaattagaatttttgaattaaattttaattatacaagtaatacatgaatacattttcctttaaataaaattagagcattttaggtaaagaagtctctactggcctccccagcctgacctcaggccccttccccactttagaggcagctgctgttaggcatttgctgttgatccaaaatgttctcctatgcgcattgaaacatgtcctgtgttctattgttgcttttgtttgcttgcatagatgtggtggtgtacacactggaggtgctgctcctgagctcagggcaccttacgggactctcctcatgtcgcgtgtcacctgccgcagctggctccactgcccctttcagctggccgctggcaaccagaactgattgtgctatgatttatttagttgttgcttattgatcgactattaaaaggcttccagtcttgtttcaataagacaaacctgtaacagcatccttgtacatgccacttttgctcatgtacaagtgtttttctggagcagatacttagaaacagaattgatgggtcatagagtctacacatcttaaattctaatagtaactgctaaaatgttcttcaaagtacctttctgatttaatttcatgccagcagtatgtgtgtccatttctccagaccatctccaagttttacattttaaccaatctggtgggtgaaaaataatatcttgttttagtttgcatttttctgaattaccaggatggctgaagtctgtgtctcctatccatttatatttccttctctgcattacttgtccaaatcttttgcccatttcttttttttagggtacgttgtcttttccttattgattttttagaagttctttatgtattttgtatactttatgtgtattgcaaatattttctgtattgtgattcttgtcatttaattgtattgtgtctttggagaaatcttaaattttgatacagtcaaatcgatctattttaattttatgtctttttttcaattttatttaagaaagcctttcctgtactgaggtcataagcatttttcctgtatttcttctctaacatttatcatttacatatatgtgtgtgtgtgtgtgtgtgtatgccttttttaccacatgcaaaaaataaattccatatgcatacatga

SEQ ID NO: 17282 - DNA, 2753 bp, Homo sapiens
gaggagcccacctgtcctcccggaagagatggcccctttcacttgagattccaggagattgcccagggagaaggtgtggagggaggggttttgagaaggaatatgaagcctccagtggtgagcagtaccagcaagacgaccaagaagaggcagttgggttggtcagttaggaggtcttgtcatccatcttggggttggcagagcaatagagacagacatcacatcaccatgggaagagaagagaataagaggaagaagtggagatgagaggaacaggtcacctcttccaactatgaagggaaagaggtggatgagtggaagtgacccgtttggactggtctttttttatgtagctaatatttggcctgtgcttttctggatcaggccctgatgagcattttgtcaacaatatctccctgaaaccttaagagaacatcctagggttgacgtggttttgcccactatacagaagagcttcaaaagatgaaggcactttcccaagatggggggcagagctgggatttgtgtcccattctgttgcccttcagagcctcactttcaccactgtccttgtcttccctgtagtcatgaggggaagaaggaggtggagggctgcctgcagttagggagctggggcaaaggcaccagggaggctcccggtgctcagataggactggaagtctgggacacatcatttttcagagggggaagaggccagggaagagagaggctatttttaatagccaaatagatatgagcccattaaaaaccaggaggaaaggaataaaatgtttaataaaatctttaagtatctgagtggaggacctctctaagctgaaaagcaaggaaatgacaccaagaagagaaaggccaacagcgaacagggataagtgatggcctgtgtcccaagtggcctggagtggacggcactagatggacagataggggcttagccttggatagcaagcatgcaacgacccacccacccaaacctgggaggcttagcactcggcaggtgacctcatctgttctcaagccatcactgggaggtactcaataaatatttgctgggtcccaaggtgctgggattataggcatgagccaccgtgcgcagccccttattcttttttaaaattgtcttggtcatattgcacatttactttttcaggtacattttataatcagcttgtcaaagttctgtgaacaaaatgtctgttggaagtttgagaagaattgcattgaaggggaaattaacatctttagaatataagttcttcccatctgtggacatggtgtctgtctctttttaatcagaattgtatttgttttgttttgttttgtttttaatgccttttaataaaggttggttgcttttgtcataaagatttttcacagttcttaataggtttattcctgaaaaccttattagttttgttgcttttgtgagtggaaaaactttcccttttttcattttgctttccaaattttaatcagtttactaatcactatgcttcattcacagacacacacacagcaaatgtgctttgtccctgggcacacaaatgaaaacacagcacacatgtaaatcagagctaattggctgaaaatgaattagaatttttgaattaaattttaattatacaagtaatacatgaatacattttcctttaaataaaattagagcattttaggtaaagaagtctctactggcctccccagcctgacctcaggccccttccccactttagaggcagctgctgttaggcatttgctgttgatccaaaatgttctcctatgcgcattgaaacatgtcctgtgttctattgttgcttttgtttgcttgcatagatgtggtggtgtacacactggaggtgctgctcctgagctcagggcaccttacgggactctcctcatgtcgcgtgtcacctgccgcagctggctccactgcccctttcagctggccgctggcaaccagaactgattgtgctatgatttatttagttgttgcttattgatcgactattaaaaggcttccagtcttgtttcaataagacaaacctgtaacagcatccttgtacatgccacttttgctcatgtacaagtgtttttctggagcagatacttagaaacagaattgatgggtcatagagtctacacatcttaaattctaatagtaactgctaaaatgttcttcaaagtacctttctgatttaatttcatgccagcagtatgtgtgtccatttctccagaccatctccaagttttacattttaaccaatctggtgggtgaaaaataatatcttgttttagtttgcatttttctgaattaccaggatggctgaagtctgtgtctcctatccatttatatttccttctctgcattacttgtccaaatcttttgcccatttcttttttttagggtacgttgtcttttccttattgattttttagaagttctttatgtattttgtatactttatgtgtattgcaaatattttctgtattgtgattcttgtcatttaattgtattgtgtctttggagaaatcttaaattttgatacagtcaaatcgatctattttaattttatgtctttttttcaattttatttaagaaagcctttcctgtactgaggtcataagcatttttcctgtatttcttctctaacatttatcatttacatatatgtgtgtgtgtgtgtgtgtgtatgccttttttaccacatgcaaaaaataaattccatatgcatacatga

SEQ ID NO: 17283 - DNA, 339 bp, Homo sapiens
gtgaaataactgaaatgggaaattagatcaaagaggaaaaataccagcattaagctattgatgatacaagaagtgtccaggtgccgtggctcacgcctataatcccagcactttgggaggccaaggcgggtggatcacctgaggccaggagttcgagactagcctggccaacatggcaaaaccccatctctactaaaaatacaaaaaattagctgggcatggtggcatgcacctgtaaccccagctactcgggtgactgaggcatacgaatcgcttaaacccgggaggcggagctgcagtgagccgagatcatgctgctgcactccagcctcagtggca

SEQ ID NO: 17284 - DNA, 452 bp, Homo sapiens
ggattacaggagtgagcctctgttcccggccgaacttcaggatcttattggggatcttgtcttgctattttttgacctgcatcatataaaatgttgttgatgaaactgtaagagaaaggcattttaatgtttacttaaggcccagtcccaaatctctaaagaaaatgaatactgtttatttactgtaaactctgtaaaccgtagaccatatgtattcacattgtaaactgttaagcactatataaaggttgattgttaatatccttttatggtatgtcttgacagggcaagctggctttccattttttcttcctgcttttgtggacattcggttattaacctctaaagataaagttggatagatgtgtaatatgtagttgcaggtatgctgattcatcatctgaatggcattttattaagtgtttattgtgtgccaaagtaatattttagcc

SEQ ID NO: 17285 - DNA, 231 bp, Homo sapiens
actcgtgatcttctaaggtaactggaaaagtttctcctaaataccttaccttgcttttcttcatcagcctttcaaatccttggagtgtaatcgtgccaacttagagtttctctactctatgtaaagctccaatatgcatcctgcagtcccaacattttaaattagctcagtcaatccaaggaacaccactgtttatactttcccatctagaggaatggttctttattatgt

SEQ ID NO: 17286 - DNA, 278 bp, Homo sapiens
ggactcttgaatacatgattgaagcaactccaaacaggttaacagtctagaagtgttattgaatgtatttttctaacgtaaattaaatgttatttttttcttactgaaacacaccacctacttctttctagaggaagaacaattcacatgtaaatatggattttccatgagatgcaacattaacatatttttaaatcacataatttttaaggtttaataagaattatttcaggacttctgaaaataattaatgggaacctaagtagaatattttatca

SEQ ID NO: 17287 - DNA, 551 bp, Homo sapiens
  misc_feature (20)..(21): n is a, c, g, or t
  misc_feature (32)..(32): n is a, c, g, or t
  misc_feature (40)..(40): n is a, c, g, or t
  misc_feature (95)..(95): n is a, c, g, or t
gggcaggagtagcagctgcnncttggcgcgantgctggancgcgaactagagaaacacagacacgcctcatagagcaacagcgtctctcggagcntggagccgccaagctcgagctgagctttcgcttgccgtccaccactgcccaccactgtcgtttgctgccatcgcagacctgctgctgacttccatccctctggatccggcaaggtgtgtgctgtgctcctgatccagcaaggtgcccattgccagtcccgattgggctaaaggcttgccattgttcctgcacggctaagtgcctgggttcatcctaatcgagctgaacactagtcactgggttctacggttctcttccatgacccacggcttctaatagagctataacactcaccacatggcctaagattccattccttggaatccgtgaggccaagaaccccaggtcagagaacacgaggcttgccaccatcttggaagcgacccaccaccatcttggaagtggctcgccaccatcttgggagctctgtgagcaaggacccctggtaacacaacc

SEQ ID NO: 17288 - DNA, 169 bp, Homo sapiens
aaatatttgaaaagaactgcacaatctattagaaatgtctaaagcagggccgggcacagtggttcatgcctgtaatcccagaactttgagaggacaaggcggcagaatggcttgagcccaggagttcaagaccagcctgggcaacatagcaaaaccccaacactgcaac

SEQ ID NO: 17289 - DNA, 276 bp, Homo sapiens
aattaaaattaaattagtgatgtattatattagttgtgcttttatgtaatgtagtacattcataaatttttagattatatgtaaacttaattttttaaacattttttgacatgttaagtctgttgtacattcaatgaagtgttattatgccactcgctttaacctatcccaccttactcaagggtgtaggtaagagatggcaacagtttactatttggtaagagtggaataacatctctagtaatctctttttttcagtggctttaacctgcaaat

SEQ ID NO: 17290 - DNA, 373 bp, Homo sapiens
gacattttccatctagattaaagacctagattaagggattgtttgagtctattttataacagattgtcactgtctttcttactaggcacttcttcacttgaaagcctaggctgtggtctttctccttcaccagacagttaaacactgtagtgttggtcacatttttctaaaactatgttgtttatccacattcaattcctcttcttaagatctctctttaaaaattttggctatattcatggaaatttaaatttctgtttgggatggactttgttccccctttattactgtcaccattcctattattctctttggcctcccatgctggacacttatacttctataaatcttatagatggagctggtattattt

SEQ ID NO: 17291 - DNA, 460 bp, Homo sapiens
  misc_feature (278)..(278): n is a, c, g, or t
ctcatgcaggacgctgtaagcagtcatgaacgttctggtttatattccgaatgtgacagacagccaggaagctacgaagccattttagttttttgagcagaagcatgacatcagttgattcgtgtttttaaaaaagtatgtgctgttgaatggagaagatgctgaaggagggtgctgtggtttaaatgtgtgttccctccaaaattcatgcagaaacttaatcctaattgtggtgatattaagaggctggaccttttgggaagtgactgagtcatganggctctgcctccatggagggagtaatacccatacagaaggggcttcggaggccaggctcgatggctcatgcctgtaatctcagcacttttggaggtcaaggcgggaggatcgcttgagtccaggagttcttatttcccccttttggaccagcctgggcgacacaaggagaccctgtctctac

SEQ ID NO: 17292 - DNA, 397 bp, Homo sapiens
catctagggttttgaaataaatattttcttcagataactgtttactttttgataaacaccttctgacttgctactaggtagatattgaatgcataattatggagtgtcaggttatcatgtggaccaagtttcccatcattatctgggtaaaatctgacctatctttccataaggttagcgatgtacaacagcaatatatcattgagtggaaatagtacatgagacagaactagagcagatctggataggacaaataagttgcatgaaccagggactcagacttctttggtagcaactctaatggcattgccttgtctctttcaactcatgcctgtggcttcttggcgattcccttagtccatttgttagaagaaaaaacaacaacaacaacaacaac

SEQ ID NO: 17293 - DNA, 768 bp, Homo sapiens
caaaaaggggaaagacggtcagtgttgggcagaatgaaaagaaaagggaaccattgtacactgctggtgggaaagtaaatcaatactactattatcaaaaacaatacagaggttcttcaaaaaaattaccatatgatccagcaattcgacttctaggtaaatatccaaagaaaatgtaatcagtatttcaagagatatctgcactcccatattatttacattattcaccacagctgaaatatggatgcaacctaaatgtccattgacaaatgaatggataaagaaactgtggtatatacacacatggaatactctttagccttctaaaaggatatcctgtcatttggggaaacatgggtgaacccagaggataatgtgttatgtgaaataagccgagcaccgaaagacaaaaactccgtgatctcacttatatgtggaatctaaaaatgatagattcacagaagcagagtgtagacaggagccctgttggggaagtgggagatagaggagatattggttaaaggatagaaaattttagttagacaagaggaataagttcaagaatattgtctaacatggtgactatacttacaacaatgcattaatgatatattttgtacttgaaatttgcttagagtagattttaagtgttttcaccacaaaaataaatatccaaggtaatgcatatgtgaattagcttgatttagccacttcacaatgtatacatactttaagaaatcatgttgtacaccataaatatatataatt

SEQ ID NO: 17294 - DNA, 537 bp, Homo sapiens
ggattaacattttcttttccagccagagcaaaatatgcatgacaaaacatagacattagccactccacttagcacccaatatcaaactggcaaggttaaaacttgccctggttgatgcctgtcatccttaatccattcaaagtgggatggaatgacctcagactagaagtttcaacatgtggtctctgtacaagatggaagagcagacagtgtccacatagtctcctttgagcaggcagtaagtacgtaggtccataaagagtaagaacctggtacctgagtccctgaagcagcctgaggcaaaaagcttgtctcctggaagtttccctgactagatgaagaaagactcagtttcctccctagctctcaggctgacttttccattgccagtgtccacctcatcctgcctgaagtatcaaagctaaaaccctttgctgttttctgaatctagagaggaaagagggtgaggagacccgaattcaaatgttttacttgtaccttgtgaatctgtttcctctataaagagccattcatttc

SEQ ID NO: 17295 - DNA, 230 bp, Homo sapiens
gaagtgtgtcaacattcaaacttcccccagtggttgacttgttggggagagaaatgaaactgaaagtgggctgtcactgacctcctgactcaggccagtgtggttctgtggagaggggctggaagaggctgttctggaaggaagggcaggtgagtgtggatggagcccaagcaggagaatggacatagggacaatgtggaggtgacagcttgaggaggtagaggagtaaa

SEQ ID NO: 17296 - DNA, 461 bp, Homo sapiens
ttttttttaaatcttaacttctttatacagtttctatctagcatataacaggaatttaaaaagttaatcaatagtgtacaaataatttcatagaaaacatttattgaatactcactatgctttagatgcattactacattgaattctcacaatatgtaagtgctattattgctgtcatttagagatgatatagctaaagtttaccggagttaagtataataacttgcttagttacctagatggtaactcgtggaggcaggatttgaacctaggcaatttgactgtggcttagactcttcatcatcatactgcacatataggtaataagtcctctaactttagaagaagaaatgattgctgaggactgggtagtggggacgtctttatgaagaaagcagaacttatggtaggtttttaaagaagaccagagatgagtaaggggcaagaagataagtgaacaa

SEQ ID NO: 17297 - DNA, 384 bp, Homo sapiens
tattataatttctcatcttgtctgcttcctccattagactctgcacttcttaggcatagggggcacttttgtcctttttttttttcctgagagggagtgacaaactctagtacctctggggccagacagggagcataaatgagtaaagcactgagtctgttattgggatgataggagggtatggtggggactgtgacaagctggctggagggcatgtcctttgctggagcggtcagtggcttctctgctccagcttagagttgccagtgagagaatgctgggcccatgttgctagatctttcatttttttcaagaagccagatatctggatgtttctgtgagatctcccaacttttaagcatatcttcaaattacaaaataaat

SEQ ID NO: 17298 - DNA, 472 bp, Homo sapiens
aggactcattattagagttttaaagtttctgatggaaggtataagtgtctatcttaaattatttatatattaatgaaatacaacagggaaaagatcaatttgtaaaaaatttcaccatctttagaattctcaggggacccaagggagaaggggaactttattttctttctttccatggtaccttcgtatttgaagactaattatcagaactcttggagtttttaatcctggggagatacagctcttagataattataggtaatttatgagttaaagggtattgatgggagtcttcccataattatgttaaaatttggaaccccatagagccagctgctggacatctgtcttgtgggaccagaactcaaaacccaatggacagaaccttgtgtagggttaaccttgtttttttaaatcaggatatttgtcttcatagcccagcttgcccatttcctgacagtattgccttggg

SEQ ID NO: 17299 - DNA, 511 bp, Homo sapiens
gactaaaataatgcatgtcagacatttgataagatgtcaacactcaatcgaggagtgtgacggtcatcatcattgctagattttattacttttatggatgggcatgctagctaaaattgcaaaacctctaatattttctaactgcctctgctgtttttctcctcggcccttagcactctctcctacaccatgtgataatttatattgattgctgtctatactgttccactcaatggaagcttcgtgaagtaggaacttttagtctattttatgcactgctgtatctctaagatggctggcacgtaaagagggtctcaataaatatgccttgaattaatgaaaacagtggtttctgaatcatggcctccaaagagcatttgccttttcccctctcacccttctgaaggtgcccaggctgccctggcaggatgcctctttctctgtggggtggcattctctgctctctctctaatactctttctttttcttccctcctctcccccaactgcag

SEQ ID NO: 17300 - DNA, 791 bp, Homo sapiens
  misc_feature (670)..(670): n is a, c, g, or t
  misc_feature (678)..(679): n is a, c, g, or t
  misc_feature (685)..(686): n is a, c, g, or t
  misc_feature (697)..(698): n is a, c, g, or t
  misc_feature (740)..(740): n is a, c, g, or t
gcggacggcgtgggtcgacccacgcgtccgcaacaacaaaaaagaggtaaagacgaatctataaagtaccgagacttcctgggcaaagaatggacaatcagtttccttcctgtgtcgatgtcgatgttgtctgtgcaggagatgcagtttttgtgtagagaatgtaaattttctgtaaccttttgaaatctagttactaataagcactactgtaatttagcacagtttaactccaccctcatttaaacttcctttgattctttccgaccatgaaatagtgcatagtttgcctggagaatccactcacgttcataaagagaatgttgatggcgccgtgtagaagccgctctgtatccatccacgcgtgcagagctgccagcagggagctcacagaaggggagggagcaccaggccagctgagctgcacccacagtcccgagactgggatcccccaccccaacagtgattttggaaaaaaaaatgaaagttctgttcgtttatccattgcgatctggggagccccatctcgatatttccaatcctggctacttttcttagagaaaataagtcctttttttctggccttgctaatggcaacagaagaaagggcttctttgcgtggtcccctgctggtgggggtgggtccccagggggccccctgcggctgggnccccctgnnccacgnncagcttcctgnngatgaacatgctgtggtatggttttaggaaaccaggctgttntgtgaataaaacgaatgctgtttgtgtcacgaaaaaaaaaaaaaacataaa

SEQ ID NO: 17301 - DNA, 2165 bp, Homo sapiens
  misc_feature (2044)..(2044): n is a, c, g, or t
  misc_feature (2052)..(2053): n is a, c, g, or t
  misc_feature (2059)..(2060): n is a, c, g, or t
  misc_feature (2071)..(2072): n is a, c, g, or t
  misc_feature (2114)..(2114): n is a, c, g, or t
caagtcggcggaaagtttggctgcgcgggttcccccgaagttcagagtgaagacatttccacctggacacctgaccatgtgcctgccctgagcagcgaggcccaccaggcatctctgttgtgggcagcagggccaggtcctggtctgtggaccctcggcagttggcaggctccctctgcagtggggtctgggcctcggccccaccatgtcgagcctcggcggtggctcccaggatgccggcggcagtagcagcagcagcaccaatggcagcggtggcagtggcagcagtggcccaaaggcaggagcagcagacaagagtgcagtggtggctgccgccgcaccagcctcagtggcagatgacacaccaccccccgagcgtcggaacaagagcggtatcatcagtgagcccctcaacaagagcctgcgccgctcccgcccgctctcccactactcttcttttggcagcagtggtggtagtggcggtggcagcatgatgggcggagagtctgctgacaaggccactgcggctgcagccgctgcctccctgttggccaatgggcatgacctggcggcggccatggcggtggacaaaagcaaccctacctcaaagcacaaaagtggtgctgtggccagcctgctgagcaaggcagagcgggccacggagctggcagccgagggacagctgacgctgcagcagtttgcgcagtccacagagatgctgaagcgcgtggtgcaggagcatctcccgctgatgagcgaggcgggtgctggcctgcctgacatggaggctgtggcaggtgccgaagccctcaatggccagtccgacttcccctacctgggcgctttccccatcaacccaggcctcttcattatgaccccggcaggtgtgttcctggccgagagcgcgctgcacatggcgggcctggctgagtaccccatgcagggagagctggcctctgccatcagctccggcaagaagaagcggaaacgctgcggcatgtgcgcgccctgccggcggcgcatcaactgcgagcagtgcagcagttgtaggaatcgaaagactggccatcagatttgcaaattcagaaaatgtgaggaactcaaaaagaagccttccgctgctctggagaaggtgatgcttccgacgggagccgccttccggtggtttcagtgacggcggcggaacccaaagctgccctctccgtgcaatgtcactgctcgtgtggtctccagcaagggattcgggcgaagacaaacggatgcacccgtctttagaaccaaaaatattctctcacagatttcattcctgtttttatatatatattttttgttgtcgttttaacatctccacgtccctagcataaaaagaaaaagaaaaaaatttaaactgctttttcggaagaacaacaacaaaaaagaggtaaagacgaatctataaagtaccgagacttcctgggcaaagaatggacaatcagtttccttcctgtgtcgatgtcgatgttgtctgtgcaggagatgcagtttttgtgtagagaatgtaaattttctgtaaccttttgaaatctagttactaataagcactactgtaatttagcacagtttaactccaccctcatttaaacttcctttgattctttccgaccatgaaatagtgcatagtttgcctggagaatccactcacgttcataaagagaatgttgatggcgccgtgtagaagccgctctgtatccatccacgcgtgcagagctgccagcagggagctcacagaaggggagggagcaccaggccagctgagctgcacccacagtcccgagactgggatcccccaccccaacagtgattttggaaaaaaaaatgaaagttctgttcgtttatccattgcgatctggggagccccatctcgatatttccaatcctggctacttttcttagagaaaataagtcctttttttctggccttgctaatggcaacagaagaaagggcttctttgcgtggtcccctgctggtgggggtgggtccccagggggccccctgcggctgggnccccctgnnccacgnncagcttcctgnngatgaacatgctgtggtatggttttaggaaaccaggctgttntgtgaataaaacgaatgctgtttgtgtcacgaaaaaaaaaaaaaacataaa

SEQ ID NO: 17302 - DNA, 2306 bp, Homo sapiens
  misc_feature (2185)..(2185): n is a, c, g, or t
  misc_feature (2193)..(2194): n is a, c, g, or t
  misc_feature (2200)..(2201): n is a, c, g, or t
  misc_feature (2212)..(2213): n is a, c, g, or t
  misc_feature (2255)..(2255): n is a, c, g, or t
cccgtcagtgtgcgactcgggctctcgtgaccctgggcacatgcctggctggctggacgctggagcagcacctgctggcgtgtgtgtgcccagagctggagcgcagctccctgccccgcccttccccctcggcctcgctggcgactggtgcgtgctggtggcggcttgtgacgactcggagagccgagtgaagacatttccacctggacacctgaccatgtgcctgccctgagcagcgaggcccaccaggcatctctgttgtgggcagcagggccaggtcctggtctgtggaccctcggcagttggcaggctccctctgcagtggggtctgggcctcggccccaccatgtcgagcctcggcggtggctcccaggatgccggcggcagtagcagcagcagcaccaatggcagcggtggcagtggcagcagtggcccaaaggcaggagcagcagacaagagtgcagtggtggctgccgccgcaccagcctcagtggcagatgacacaccaccccccgagcgtcggaacaagagcggtatcatcagtgagcccctcaacaagagcctgcgccgctcccgcccgctctcccactactcttcttttggcagcagtggtggtagtggcggtggcagcatgatgggcggagagtctgctgacaaggccactgcggctgcagccgctgcctccctgttggccaatgggcatgacctggcggcggccatggcggtggacaaaagcaaccctacctcaaagcacaaaagtggtgctgtggccagcctgctgagcaaggcagagcgggccacggagctggcagccgagggacagctgacgctgcagcagtttgcgcagtccacagagatgctgaagcgcgtggtgcaggagcatctcccgctgatgagcgaggcgggtgctggcctgcctgacatggaggctgtggcaggtgccgaagccctcaatggccagtccgacttcccctacctgggcgctttccccatcaacccaggcctcttcattatgaccccggcaggtgtgttcctggccgagagcgcgctgcacatggcgggcctggctgagtaccccatgcagggagagctggcctctgccatcagctccggcaagaagaagcggaaacgctgcggcatgtgcgcgccctgccggcggcgcatcaactgcgagcagtgcagcagttgtaggaatcgaaagactggccatcagatttgcaaattcagaaaatgtgaggaactcaaaaagaagccttccgctgctctggagaaggtgatgcttccgacgggagccgccttccggtggtttcagtgacggcggcggaacccaaagctgccctctccgtgcaatgtcactgctcgtgtggtctccagcaagggattcgggcgaagacaaacggatgcacccgtctttagaaccaaaaatattctctcacagatttcattcctgtttttatatatatattttttgttgtcgttttaacatctccacgtccctagcataaaaagaaaaagaaaaaaatttaaactgctttttcggaagaacaacaacaaaaaagaggtaaagacgaatctataaagtaccgagacttcctgggcaaagaatggacaatcagtttccttcctgtgtcgatgtcgatgttgtctgtgcaggagatgcagtttttgtgtagagaatgtaaattttctgtaaccttttgaaatctagttactaataagcactactgtaatttagcacagtttaactccaccctcatttaaacttcctttgattctttccgaccatgaaatagtgcatagtttgcctggagaatccactcacgttcataaagagaatgttgatggcgccgtgtagaagccgctctgtatccatccacgcgtgcagagctgccagcagggagctcacagaaggggagggagcaccaggccagctgagctgcacccacagtcccgagactgggatcccccaccccaacagtgattttggaaaaaaaaatgaaagttctgttcgtttatccattgcgatctggggagccccatctcgatatttccaatcctggctacttttcttagagaaaataagtcctttttttctggccttgctaatggcaacagaagaaagggcttctttgcgtggtcccctgctggtgggggtgggtccccagggggccccctgcggctgggnccccctgnnccacgnncagcttcctgnngatgaacatgctgtggtatggttttaggaaaccaggctgttntgtgaataaaacgaatgctgtttgtgtcacgaaaaaaaaaaaaaacataaa

SEQ ID NO: 17303 - DNA, 2159 bp, Homo sapiens
  misc_feature (2038)..(2038): n is a, c, g, or t
  misc_feature (2046)..(2047): n is a, c, g, or t
  misc_feature (2053)..(2054): n is a, c, g, or t
  misc_feature (2065)..(2066): n is a, c, g, or t
  misc_feature (2108)..(2108): n is a, c, g, or t
tgacagcttgcccccaaccacggagaggtgacaggcacgagtgaagacatttccacctggacacctgaccatgtgcctgccctgagcagcgaggcccaccaggcatctctgttgtgggcagcagggccaggtcctggtctgtggaccctcggcagttggcaggctccctctgcagtggggtctgggcctcggccccaccatgtcgagcctcggcggtggctcccaggatgccggcggcagtagcagcagcagcaccaatggcagcggtggcagtggcagcagtggcccaaaggcaggagcagcagacaagagtgcagtggtggctgccgccgcaccagcctcagtggcagatgacacaccaccccccgagcgtcggaacaagagcggtatcatcagtgagcccctcaacaagagcctgcgccgctcccgcccgctctcccactactcttcttttggcagcagtggtggtagtggcggtggcagcatgatgggcggagagtctgctgacaaggccactgcggctgcagccgctgcctccctgttggccaatgggcatgacctggcggcggccatggcggtggacaaaagcaaccctacctcaaagcacaaaagtggtgctgtggccagcctgctgagcaaggcagagcgggccacggagctggcagccgagggacagctgacgctgcagcagtttgcgcagtccacagagatgctgaagcgcgtggtgcaggagcatctcccgctgatgagcgaggcgggtgctggcctgcctgacatggaggctgtggcaggtgccgaagccctcaatggccagtccgacttcccctacctgggcgctttccccatcaacccaggcctcttcattatgaccccggcaggtgtgttcctggccgagagcgcgctgcacatggcgggcctggctgagtaccccatgcagggagagctggcctctgccatcagctccggcaagaagaagcggaaacgctgcggcatgtgcgcgccctgccggcggcgcatcaactgcgagcagtgcagcagttgtaggaatcgaaagactggccatcagatttgcaaattcagaaaatgtgaggaactcaaaaagaagccttccgctgctctggagaaggtgatgcttccgacgggagccgccttccggtggtttcagtgacggcggcggaacccaaagctgccctctccgtgcaatgtcactgctcgtgtggtctccagcaagggattcgggcgaagacaaacggatgcacccgtctttagaaccaaaaatattctctcacagatttcattcctgtttttatatatatattttttgttgtcgttttaacatctccacgtccctagcataaaaagaaaaagaaaaaaatttaaactgctttttcggaagaacaacaacaaaaaagaggtaaagacgaatctataaagtaccgagacttcctgggcaaagaatggacaatcagtttccttcctgtgtcgatgtcgatgttgtctgtgcaggagatgcagtttttgtgtagagaatgtaaattttctgtaaccttttgaaatctagttactaataagcactactgtaatttagcacagtttaactccaccctcatttaaacttcctttgattctttccgaccatgaaatagtgcatagtttgcctggagaatccactcacgttcataaagagaatgttgatggcgccgtgtagaagccgctctgtatccatccacgcgtgcagagctgccagcagggagctcacagaaggggagggagcaccaggccagctgagctgcacccacagtcccgagactgggatcccccaccccaacagtgattttggaaaaaaaaatgaaagttctgttcgtttatccattgcgatctggggagccccatctcgatatttccaatcctggctacttttcttagagaaaataagtcctttttttctggccttgctaatggcaacagaagaaagggcttctttgcgtggtcccctgctggtgggggtgggtccccagggggccccctgcggctgggnccccctgnnccacgnncagcttcctgnngatgaacatgctgtggtatggttttaggaaaccaggctgttntgtgaataaaacgaatgctgtttgtgtcacgaaaaaaaaaaaaaacataaa

SEQ ID NO: 17304 - DNA, 1921 bp, Homo sapiens
  misc_feature (1800)..(1800): n is a, c, g, or t
  misc_feature (1808)..(1809): n is a, c, g, or t
  misc_feature (1815)..(1816): n is a, c, g, or t
  misc_feature (1827)..(1828): n is a, c, g, or t
  misc_feature (1870)..(1870): n is a, c, g, or t
tctcgtgctgttcttgaggatcccctgtagtcggctacggggagtggcccaaaggcaggagcagcagacaagagtgcagtggtggctgccgccgcaccagcctcagtggcagatgacacaccaccccccgagcgtcggaacaagagcggtatcatcagtgagcccctcaacaagagcctgcgccgctcccgcccgctctcccactactcttcttttggcagcagtggtggtagtggcggtggcagcatgatgggcggagagtctgctgacaaggccactgcggctgcagccgctgcctccctgttggccaatgggcatgacctggcggcggccatggcggtggacaaaagcaaccctacctcaaagcacaaaagtggtgctgtggccagcctgctgagcaaggcagagcgggccacggagctggcagccgagggacagctgacgctgcagcagtttgcgcagtccacagagatgctgaagcgcgtggtgcaggagcatctcccgctgatgagcgaggcgggtgctggcctgcctgacatggaggctgtggcaggtgccgaagccctcaatggccagtccgacttcccctacctgggcgctttccccatcaacccaggcctcttcattatgaccccggcaggtgtgttcctggccgagagcgcgctgcacatggcgggcctggctgagtaccccatgcagggagagctggcctctgccatcagctccggcaagaagaagcggaaacgctgcggcatgtgcgcgccctgccggcggcgcatcaactgcgagcagtgcagcagttgtaggaatcgaaagactggccatcagatttgcaaattcagaaaatgtgaggaactcaaaaagaagccttccgctgctctggagaaggtgatgcttccgacgggagccgccttccggtggtttcagtgacggcggcggaacccaaagctgccctctccgtgcaatgtcactgctcgtgtggtctccagcaagggattcgggcgaagacaaacggatgcacccgtctttagaaccaaaaatattctctcacagatttcattcctgtttttatatatatattttttgttgtcgttttaacatctccacgtccctagcataaaaagaaaaagaaaaaaatttaaactgctttttcggaagaacaacaacaaaaaagaggtaaagacgaatctataaagtaccgagacttcctgggcaaagaatggacaatcagtttccttcctgtgtcgatgtcgatgttgtctgtgcaggagatgcagtttttgtgtagagaatgtaaattttctgtaaccttttgaaatctagttactaataagcactactgtaatttagcacagtttaactccaccctcatttaaacttcctttgattctttccgaccatgaaatagtgcatagtttgcctggagaatccactcacgttcataaagagaatgttgatggcgccgtgtagaagccgctctgtatccatccacgcgtgcagagctgccagcagggagctcacagaaggggagggagcaccaggccagctgagctgcacccacagtcccgagactgggatcccccaccccaacagtgattttggaaaaaaaaatgaaagttctgttcgtttatccattgcgatctggggagccccatctcgatatttccaatcctggctacttttcttagagaaaataagtcctttttttctggccttgctaatggcaacagaagaaagggcttctttgcgtggtcccctgctggtgggggtgggtccccagggggccccctgcggctgggnccccctgnnccacgnncagcttcctgnngatgaacatgctgtggtatggttttaggaaaccaggctgttntgtgaataaaacgaatgctgtttgtgtcacgaaaaaaaaaaaaaacataaa

SEQ ID NO: 17305 - DNA, 1150 bp, Homo sapiens
cccgtcagtgtgcgactcgggctctcgtgaccctgggcacatgcctggctggctggacgctggagcagcacctgctggcgtgtgtgtgcccagagctggagcgcagctccctgccccgcccttccccctcggcctcgctggcgactggtgcgtgctggtggcggcttgtgacgactcggagagccgagtgaagacatttccacctggacacctgaccatgtgcctgccctgagcagcgaggcccaccaggcatctctgttgtgggcagcagggccaggtcctggtctgtggaccctcggcagttggcaggctccctctgcagtggggtctgggcctcggccccaccatgtcgagcctcggcggtggctcccaggatgccggcggcagtagcagcagcagcaccaatggcagcggtggcagtggcagcagtggcccaaaggcaggagcagcagacaagagtgcagtggtggctgccgccgcaccagcctcagtggcagatgacacaccaccccccgagcgtcggaacaagagcggtatcatcagtgagcccctcaacaagagcctgcgccgctcccgcccgctctcccactactcttcttttggcagcagtggtggtagtggcggtggcagcatgatgggcggagagtctgctgacaaggccactgcggctgcagccgctgcctccctgttggccaatgggcatgacctggcggcggccatggcggtggacaaaagcaaccctacctcaaagcacaaaagtggtgctgtggccagcctgctgagcaaggcagagcgggccacggagctggcagccgagggacagctgacgctgcagcagtttgcgcagtccacagagatgctgaagcgggagatgctcctgtcgatgactgctacacctcagcccggggctgcactgccaccctgggcaacttcgccaaggccacctttgatgccatttctaagacctacagctacctgacccccgacctctggaaggagactgtattcaccaagtctccctatcaggagttcactgaccacctcgtcaagacccacaccagagtctccgtgcagcggactcaggctccagctgtggctacaacatagggtttttatacaagaaaaataaagtgaattaagcgtgaaaaaa

SEQ ID NO: 17306 - DNA, 370 bp, Homo sapiens
tgaacatagctagaaagagtaaataaaaagaatactgaccatttaaagtaacaataataaaaatgtctcttaggttttataacatgtagaagtaaaacatatgacaacagtagcataaagggcaggaggaaggaaaggagttaaactattctaagattgatgcaatagggaaataggaaaagtatacatttaaaattattagaaataattcaagaatgcatattgcaatctctaggacaaccaccaaaaaatacataaagctagtagaggagctaaaaatggaataataaaaaatactcagttaatccaaaggaagatagaaaagacaggatcaaaggacaaaaagcagatgagataaatagaaaaaaaa

SEQ ID NO: 17307 - DNA, 966 bp, Homo sapiens
ggaggttcagggaccagcaagaaaaccagggagacgaagagcctggggcgaagggaaggtgagaagacaaaaggttatagcggtaagtgttgtctaaggactccagcttttcctccaagtgagatgggggtcattggaaaggtcacagcagaggagtgatccagcgggaggcatgggtctgtggccgtcatggcccaagagaagccttccaaccataagcagggtcccccagtggagtgggctctgctgggagctaaagtctccccacccctggaagtggtcagcagtgactgggtggccggtcagggcacgaggataaaagaaagatgttcctgctttataactttttaataaactttcactcctgctctaaaaaaaaagaaaagaaaagagaaaagagaaaagaaaagatgttccaactgcacaacgtgccgctcccattattctaaacctctggtttctaagcttttaaaacttcagtatttcaagattctgtctttaagacttttaggttccaggattccgaggcagggtttctaagattccttgcagtggagatgtagcataggttcatttgatttacataaatgcaaatgtaagcatttggccaacaaaggacaccaaatagtatttgatattcaacgtggctgcaaatactagctgacttctttacctgttggccaaccaaagaatcaaaaacctgtggggatgaatgaagggaggccctgctgatctccccgagagaggtttgctatgtgtgcaaccctcagtaacatacatgtgagtcattataggtattttcacaagagattttagtacacccatgtttggccacatgtgctgattttaaaaccttaacccctgagtgagatgaattgccaatacattctcagcttccaaaatgctttgattttaagatttgatgatggaaaccagtgattgtcaaccatgcactgggagaggtga

SEQ ID NO: 17308 - DNA, 424 bp, Homo sapiens
cacctccagttccaactcctccacttccttccattttcttactccaagaactcaacccctcaaccctttgatgtcaagaaatgggtgagtagggactgtggccatggggaaaggtctgcagggcaaaatagtaaacaggatcatcctcaatgagtgtggggtgagctgggaactgcagtgtacacagagccacttgtgcacacacactcacggttttcagagccagcatggctaccccttggaggctcatgttatctctcctccttgcattttcctgcttgtgccctctgcctgtcccccttggccatttacaaacctattgctcttgctcgttctcccttgcccagactagagtgcagtgagccgagagcacgccattgcactccagcctgggcaacaagagcgaaaatccatctcaaaaaaa

SEQ ID NO: 17309 - DNA, 390 bp, Homo sapiens
  misc_feature (372)..(373): n is a, c, g, or t
  misc_feature (375)..(375): n is a, c, g, or t
agctgcacttcagagagtcccactgtaatctgttaatagaatctgctttaaatgagtcactccttagactggcaatgacacccagcttagtctgtaaaatcaggaatctttgtgttggctgaaggaacttagtaatcttagttgaattcctcttccccatgtctttcaaaaccagagcactgggtcgaacctaacccacaaaataattcgtccaaattaaattgacttttttacataacatcagcaccaccccttacacttttaaagttaaagaccctgttgatcaggttacctgggaaattttcaagtgcatctgaccggggattatcaagctccttgtggacatctgtttctggatgctgtggaatgtgnngntcacccaaatagggg

SEQ ID NO: 17310 - DNA, 382 bp, Homo sapiens
aaaaggagaaggtcataagacagtttgaggaaggcattggaagaggaagaggggcaatgtctcctttgtgttattgttggtatataaacttaaaatctcagttctttttatggcacttgtggagccacttcctctcctcaccaaaaaatgcccagtaccctgaatccgatcaaattactctcctaaagtataaggcttagtttctgtgtgctgcttcgcgagacagttcccacaaatcgagagtgttaatcagacttttgtgttttcttttttggattgctgttgtttgttttcatttatcatttgtctttgcctaagccaggctcatcaagaattaacagccatcaggctgccgatgtgctgacagcagacccacttagag

SEQ ID NO: 17311 - DNA, 434 bp, Homo sapiens
ctttcaggagaaaaccacatttaatttatctagagtaccttataaaagataggaatactgctaacatctactatagagcctgcaacttcaaccacttgagcggaactcaaaactctttacatagatgtctggccattaatgggaaaagggcatagaagcctattagctgttgcagtgtgatcaggggaaaattattattattttttcctgaattaaaaaaaaaatcactctacattgcatgatcccaaataactgtgagagagaaaaaaaaagtagcaatattaataagacaattcccaagcgttccctttcagtttcaattattttacctcctttttttcttaaataagatacaagtatttttatgtataaaaaaatgataatgtcatcttagtgagtcactaaatgtatctgacaccaaactactgtttttg

SEQ ID NO: 17312 - DNA, 437 bp, Homo sapiens
actacaccccactaattttttgtatttttagtagagggttttgctgtgttgaccaggctggtctcgaactcctgacctcaagtgatctaccctccttggcctcccaaagtgctgggattacaggtgtgagccaccgcacccagcctgaaatttaaattcttgaaagctttaggtgatgcaaccattgaagaactttaaatagggtcatggtatgatcgaggtgttgtgttgttttgtttggggaagaggggctggagatcccagctagtactgttgaggttgatttgaagttagagcagtgcagggggcatgcagctatgatgggctaagagtcacttaggcagctgttgcacaatgatgaattccctgttcgtggggcacctcgccagatttctgtttctgtctaatctgtagagatcctgttgaaaagtactctg

SEQ ID NO: 17313 - DNA, 381 bp, Homo sapiens
tgctcatggacataaagatgggaacagtagacactggggatgactagagggggaagggagggagagggacaagagttgaaaaattaaatgttggttactatgctcggtacctcggtgggcgggtgggggtcattcataccccaaacctcagcatcatgcaatatatccaggtagcaaacctgcccatgtaccctgggtctaaaataaaagctgaaaaggaaaaaaagagtgttttctcaagctctaaaaaaaaaaaaatagtaatacactttatgacaaaaaactaatttttctttctccaaaaaaaatatagtaaatgatattcatgtatttgccgtggtcattaatatcataaattaaattcatatgttggcttgaggg

SEQ ID NO: 17314 - DNA, 583 bp, Homo sapiens
tcatgccacacatgaaaagaaaggcaactggagtatgaattatgtccttgtttcacttggcattaacaatagagacagggtgaggagactgtgagaactactggtctgagggaggtggttctccattcgtaattgacaaatgctgtgtgtgtccacaacggtttcctcagagccaacctcaaactgtatatattacattgaacagtcaacatgggtaactacaatcctgggtatgatactgcagtaagtgcagcctgaactgtctctactgtgcatgtgggaacagttcattgtttgtcaccaaataattcagacatttgactccattcatactttgactgaaacaatgcaggagtcttctcactggttttatactaaagagattgagcacttaatctgtagtgtacctaaaatggctttcagaattatcagtttacaaacagagtttttggatatgttgaggaggtagatcgcatgccatctcctctctgacgccctccttgacaccccaggcagaagcaatcactgtgcttgatgatgccttgtgcttccatagcattttgtatgtagttcaaccatgtcc

SEQ ID NO: 17315 - DNA, 751 bp, Homo sapiens
gagtcatattgcctcccccttaccaaccaagtgatggcaatactaggaagaggggcaaaagaaaagtcagaaatataagtgataaaataaatggaaatgtttgaaatggatcatcgacctccttttacctattttagcacctcacaaatatcccactctgacagtgctttgttagttatttataaaatattccttaggagattggtcttgcataagacatgcttttaccgtggtccttttcccggtaatagtcactgtcagggacaaaaagtgcctgattgtgttctgtttgtcatgtaggtgggagggaaagagggagagaaagctgagttgaactgaagcagagctttttacagctctattgttctactgtcagagagcaattatactccaacttccatccacctcagacatcccaacctcctcctcctgccaatgcttccccacacacttaacatacagccacacaaccgagttctctggggagaatagggtgctctttaatacctccctctgcccttcagtgagttcagggctctgctttttaactgctaatgtattttagtaaagtttggcaattcaagcttttctagatgtttccttttcggctctggaaaattggaaaaaataatttttaactatatatatttaaaatattcagtggcattatgatattgtctgaaaggcattctgtgacttgatgcaagatcagaagttttttttctttcttggagaagtaataaaaagaaaa

SEQ ID NO: 17316 - DNA, 474 bp, Homo sapiens
cccagccagtcacaggaggcagcactggccctgcgggaagtggccactccgagcttaggggccttcttagatggctgagtgccggcaatgcaggaccctggaggtgtttcagtttcctggagctatctcaacaaagtacccggaactggggggcttaaaataacggcaatttattctctcccagttctggaggccagaagtctcagatcagtattgctgggctgaagtggagacagaagctccttccagggccctcggggaggatcctagcctcctccagcctccggtggaggccgcagcccttcctggtctttcctcctcgcctccgtcacctcatggccttttcctctgtgcctgtgtctcttcttataaggacactcatctggatttagagcccaccctaatccaggataacctcatcgtcttgtgattatatctgcaaagaacctatttctaaataaagtcacgcaggta

SEQ ID NO: 17317 - DNA, 408 bp, Homo sapiens
atatacataacataacttcagcaggagttcatatattattaaatggtcttgtgaataaaggaaactcacatctaaacactgactagacctggcaaacattcaggttaagagtacaacacatatagtattactttaattggtaggtttctattaccaataatttgctctctacatatgaaaaggaatattacactgtataattatagccagtttcgtgagcatctacatacagaactggagaaatcacatggtcatgtataactttgaagctggtggaatcgttttgtaattacttaaaagattaaagaatattcaagattatatctttaaaccattttgattgtaatttgcctcgtagtatctattttcattgggtagtccaaagtatttatatttgacagcatggga

SEQ ID NO: 17318 - DNA, 446 bp, Homo sapiens
ggcggcgggcagctacagcacatcggtgggagggcctaatcggattgtaagctcgtcgaggccgctggtctcttgctctcgaggactccatcccagcattggcagcctccgcctccccatgtcccaaaagaggaaactgggctggagaaagtttcgcagcccaaggacgcgtggctggaagtggcagaacccgggcttccgaggttgggcgagtggggtcctccaaggccctcagcacgggtcggagggattgggactgaacccgccatccccctggaccttggtgccctccaagccccgcgctcgcgccctgtccgtcgcctcccccagagatgctctgcagggacgatgagaccttggtgttccccggttctctgtcccctggcaccacctgaacgattgacatcgcatttgtacttttgtttacttaaattttttcctgtaaa

SEQ ID NO: 17319 - DNA, 427 bp, Homo sapiens
ctaactggatgattattttctgagatcctatcatgtccttcaataccaatgtcacctcacttataatacctgtttactacttgtctcatgctccaccttcccatgcccagactctgagcatcctgagtatgggaatcaggtgacttcattttgtagccctcttacctggcacagtacatgacacatggcaggtgctcaataaaagaattgctgaaccagctcataaggatatcagtttgcccatgtagagtgctttacaatctgcaaacctccttcatgtgcattttgtcagattatctaaatcaaataagatttgttgggattaacattttgggggaaataggcaaaggagtatagctgaattagcaactgcatgatgtgatatgtaaaaatatgtaaaaataaatcagcgtaagttaaacccttg

SEQ ID NO: 17320 - DNA, 320 bp, Homo sapiens
ttgtcaattaaagtgaaccttccttactaaaaagaaactagattttaatgggtgtagactttcagttttgcaaaagagaaacaattctgaagatggatggtggtgatggttttacaacagtgtgaatgtgattaatgccactgactgtatacttgaaaatggtgaagatgggggtgcagggggagggagggcatcaggaaaaccagctaatatatgtcaggcttaatacctaggtgatgatgggttgacaggtgcagcaaaccaccgtggcacacgtttacctatgtaataaacctgcacatcctgcacatataccccgg

SEQ ID NO: 17321 - DNA, 612 bp, Homo sapiens
aataagatactttagcacctagtgaggtatgtcaggttttatgaagctactgtttcctcccagtttctataacctatttctttctgctaatctgtttagactgtaggcattgttcaggtactaatagaaagttgtcatctatgtgtttggtttccttatatgaacagttaaaaggatggagaggtggatagagaacaagattccccattgacacccataacaagaaacatctaaattctacatataaccacaaaaagactatttgaaattagttcagataatgtattttctcatgatttgaattgaatgttatagagaagagaaaggccaggtgcagtggttcacacctgtaatcccagcactttgggaagccgaggtgggtggatcacctgaggtcaggagttccagaccagcctggtcaacatggtgaaacctcgtttctactgtgaaacctctgcctcctgtagccaggcatggtggtgggcgcctataatcccagctccttgggaggctgaggcaggagagtcgtttgaactcaggaggcagaggttgcagtgtgccgagattgcaccactgcactccagcctgggcgacaaagcaagaccttgtctc

SEQ ID NO: 17322 - DNA, 566 bp, Homo sapiens
  misc_feature (387)..(387): n is a, c, g, or t
  misc_feature (391)..(391): n is a, c, g, or t
  misc_feature (395)..(395): n is a, c, g, or t
  misc_feature (398)..(398): n is a, c, g, or t
  misc_feature (404)..(404): n is a, c, g, or t
  misc_feature (415)..(415): n is a, c, g, or t
  misc_feature (430)..(430): n is a, c, g, or t
  misc_feature (440)..(440): n is a, c, g, or t
  misc_feature (464)..(464): n is a, c, g, or t
  misc_feature (476)..(476): n is a, c, g, or t
  misc_feature (480)..(480): n is a, c, g, or t
  misc_feature (482)..(482): n is a, c, g, or t
  misc_feature (484)..(484): n is a, c, g, or t
  misc_feature (493)..(494): n is a, c, g, or t
  misc_feature (502)..(502): n is a, c, g, or t
gggaaacaaagctcatacagctttatgcagcttcaggtaggataatcaatggataattacttatgtcaatttctgatggagtaagttgcatagctcttgttttctttatgttcaagctatttggatctgtgttaacactgatattttgttaacagctgttttctagagcgagacgtgttaatgcacttatgtctgatatatgttcttctgaggtagccttttcaactttttcttagtgtaataatattcattattctactaggacagtaaaattaccaaatatagagtatatgaggggttttgttgttatgcttgctgtttaataattgaatagtcagaaatcagccaggcatggtggtgtgcatgcctttagtcccagctacttcnggangctnagncatganaatcacttgancccaggaggtgaagnttgcagtganagccgagatcatgcaccactgcantccagcctgggngacngngngacagagtnngactcttnaaaaaaaaaaaggaatagtcaaatcatagcaattaaatgatattacctcagtgatctatgtctt

SEQ ID NO: 17323 - DNA, 380 bp, Homo sapiens
accattatgtatggttatttacattatacattatatgccatttaataacatttaaagtgttataaagatgcaattttaaattacaagtggatttgtgacaagataattgaatccacaatttatgtcaacagagttggaaattgttgaggcatgtttctaaacttttaaaataggtcttcatttgagtagattttctttttttttctttctttctttttttttttttttccttgagacagggtttcactcccgtcatccagactggagtgcagtggtgtgatctcagctcgctacaacttctgcctcctgggctcaagtgattctcatgcctcagcctcctgagtagctgggattacaggcatgcaccacagtgcccagct

SEQ ID NO: 17324 - DNA, 298 bp, Homo sapiens
gagtatctttgccgctggtacaggcaagaattgtaaaaacaccctcccctgataggttcgaattcaacatctctttcttagtgcttgcaagagtttatgttatggatcataaagtcctctatttttctgaaaaggtctttgcccaaaggccccttcagttgtgcaaggagacattttttgatttgcaacctgtctcttttcccctcccaattccttagaggaaatcaccagtacattatcacttgaatgggccattaaggttagacataccctacccgtcttttcctgcttttccctt

SEQ ID NO: 17325 - DNA, 2016 bp, Homo sapiens
agctgagagtgacgcctctgagccgcggaggattgtgggaggaggttgtctccaatttctcctccccctcccggccaagatgtctgacatggaggatgatttcatgtgcgatgatgaggaggactacgacctggaatactctgaagatagtaactccgagccaaatgtggatttggaaaatcagtactataattccaaagcattaaaagaagatgacccaaaagcggcattaagcagtttccaaaaggttttggaacttgaaggtgaaaaaggagaatggggatttaaagcactgaaacaaatgattaagattaacttcaagttgacaaactttccagaaatgatgaatagatataagcagctattgacctatattcggagtgcagtcacaagaaattattctgaaaaatccattaattctattcttgattatatctctacttctaaacagatggatttactgcaggaattctatgaaacaacactggaagctttgaaagatgctaagaatgatagactgtggtttaagacaaacacaaagcttggaaaattatatttagaacgagaggaatatggaaagcttcaaaaaattttacgccagttacatcagtcgtgccagactgatgatggagaagatgatctgaaaaaaggtacacagttattagaaatatatgctttggaaattcaaatgtacacagcacagaaaaataacaaaaaacttaaagcactctatgaacagtcacttcacatcaagtctgccatccctcatccactgattatgggagttatcagagaatgtggtggtaaaatgcacttgagggaaggtgaatttgaaaaggcacacactgatttttttgaagccttcaagaattatgatgaatctggaagtccaagacgaaccacttgcttaaaatatttggtcttagcaaatatgcttatgaaatcgggaataaatccatttgactcacaggaggccaagccgtacaaaaatgatccagaaattttagcaatgacgaatttagtaagtgcctatcagaataatgacatcactgaatttgaaaagattctaaaaacaaatcacagcaacatcatggatgatcctttcataagagaacacattgaagagcttttgcgaaacatcagaacacaagtgcttataaaattaattaagccttacacaagaatacatattccttttatttctaaggagttaaacatagatgtagctgatgtggagagcttgctggtgcagtgcatattggataacactattcatggccgaattgatcaagtcaaccaactccttgaactggatcatcagaagaggggtggtgcacgatatactgcactagataaatggaccaaccaactaaattctctcaaccaggctgtagtcagtaaactggcttaacagagaacaagcttttacagacgtccttaaggcaacagtgcagagatgtaatccttaaaagaactgggaatggcaaaactactgtcggttgatgtgtcctgaaaattattggagttatggcagaagtgcttttttgatcaactggtttgtgttttgctgctgcatttatcccaagaaaaacagctttaatctccagaagaaaaccaaaataccatgggatttatgctgtattgacatcttgccctaaacgtacaacatcatagtaatttgtcatgggcaacatgaccagagagaagatttttgtcatgattttaaatacactgacacgctactgttggttaaatttaaacatgttttacctgcagaaattctctcacaaataacctgcaataacttgaaatgcatacccttttgaacacttccttttctcatgtataaattaaaatgtttgctgcattttgcaaaatgtcaattctctaaaaatgtgtccgtatatttctgtacctgcagtgtagtaaaggtttagacgaaaccccataattatagtggcatactgtcacttaggtttcaagcagcaaaataaacagtgcagctcagaaattgta

SEQ ID NO: 17326 - DNA, 2040 bp, Homo sapiens
agctgagagtgacgcctctgagccgcggaggattgtgggaggaggttgtctccaatttctcctccccctcccggccaagatgtctgacatggaggatgatttcatgtgcgatgatgaggaggactacgacctggaatactctgaagatagtaactccgagccaaatgtggatttggaaaatcagtactataattccaaagcattaaaagaagatgacccaaaagcggcattaagcagtttccaaaaggttttggaacttgaaggtgaaaaaggagaatggggatttaaagcactgaaacaaatgattaagattaacttcaagttgacaaactttccagaaatgatgaatagatataagcagctattgacctatattcggagtgcagtcacaagaaattattctgaaaaatccattaattctattcttgattatatctctacttctaaacagaattctgattttttatgtcagatgatggatttactgcaggaattctatgaaacaacactggaagctttgaaagatgctaagaatgatagactgtggtttaagacaaacacaaagcttggaaaattatatttagaacgagaggaatatggaaagcttcaaaaaattttacgccagttacatcagtcgtgccagactgatgatggagaagatgatctgaaaaaaggtacacagttattagaaatatatgctttggaaattcaaatgtacacagcacagaaaaataacaaaaaacttaaagcactctatgaacagtcacttcacatcaagtctgccatccctcatccactgattatgggagttatcagagaatgtggtggtaaaatgcacttgagggaaggtgaatttgaaaaggcacacactgatttttttgaagccttcaagaattatgatgaatctggaagtccaagacgaaccacttgcttaaaatatttggtcttagcaaatatgcttatgaaatcgggaataaatccatttgactcacaggaggccaagccgtacaaaaatgatccagaaattttagcaatgacgaatttagtaagtgcctatcagaataatgacatcactgaatttgaaaagattctaaaaacaaatcacagcaacatcatggatgatcctttcataagagaacacattgaagagcttttgcgaaacatcagaacacaagtgcttataaaattaattaagccttacacaagaatacatattccttttatttctaaggagttaaacatagatgtagctgatgtggagagcttgctggtgcagtgcatattggataacactattcatggccgaattgatcaagtcaaccaactccttgaactggatcatcagaagaggggtggtgcacgatatactgcactagataaatggaccaaccaactaaattctctcaaccaggctgtagtcagtaaactggcttaacagagaacaagcttttacagacgtccttaaggcaacagtgcagagatgtaatccttaaaagaactgggaatggcaaaactactgtcggttgatgtgtcctgaaaattattggagttatggcagaagtgcttttttgatcaactggtttgtgttttgctgctgcatttatcccaagaaaaacagctttaatctccagaagaaaaccaaaataccatgggatttatgctgtattgacatcttgccctaaacgtacaacatcatagtaatttgtcatgggcaacatgaccagagagaagatttttgtcatgattttaaatacactgacacgctactgttggttaaatttaaacatgttttacctgcagaaattctctcacaaataacctgcaataacttgaaatgcatacccttttgaacacttccttttctcatgtataaattaaaatgtttgctgcattttgcaaaatgtcaattctctaaaaatgtgtccgtatatttctgtacctgcagtgtagtaaaggtttagacgaaaccccataattatagtggcatactgtcacttaggtttcaagcagcaaaataaacagtgcagctcagaaattgta

SEQ ID NO: 17327 - DNA, 1890 bp, Homo sapiens
agctgagagtgacgcctctgagccgcggaggattgtgggaggaggttgtctccaatttctcctccccctcccggccaagatgtctgacatggaggatgatttcatgtgcgatgatgaggaggactacgacctggaatactctgaagatagtaactccgagccaaatgtggatttggaaaatcagtactataattccaaagcattaaaagaagatgacccaaaagcggcattaagcagtttccaaaaggttttggaacttgaaggtgaaaaaggagaatggggatttaaagcactgaaacaaatgattaagattaacttcaagttgacaaactttccagaaatgatgaatagatataagcagctattgacctatattcggagtgcagtcacaagaaattattctgaaaaatccattaattctattcttgattatatctctacttctaaacagatggatttactgcaggaattctatgaaacaacactggaagctttgaaagatgctaagaatgatagactgtggtttaagacaaacacaaagcttggaaaattatatttagaacgagaggaatatggaaagcttcaaaaaattttacgccagttacatcagtcgtgccagactgatgatggagaagatgatctgaaaaaaggtacacagttattagaaatatatgctttggaaattcaaatgtacacagcacagaaaaataacaaaaaacttaaagcactctatgaacagtcacttcacatcaagtctgccatccctcatccactgattatgggagttatcagagaatgtggtggtaaaatgcacttgagggaaggtgaatttgaaaaggcacacactgatttttttgaagccttcaagaattatgatgaatctggaagtccaagacgaaccacttgcttaaaatatttggtcttagcaaatatgcttatgaaatcgggaataaatccatttgactcacaggaggccaagccgtacaaaaatgatccagaaattttagcaatgacgaatttagtaagtgcctatcagaataatgacatcactgaatttgaaaagattctaaaaacaaatcacagcaacatcatggatgatcctttcataagagaacacattgaagagcttttgcgaaacatcagaacacaagtgcttataaaattaattaagccttacacaagaatacatattccttttatttctaaggagttaaacatagatgtagctgatgtggagagcttgctggtgcagtgcatattggataacactattcatggccgaattgatcaagtcaaccaactccttgaactggatcatcagaagaggggtggtgcacgatatactgcactagataaatggaccaaccaactaaattctctcaaccaggctgtagtcagtaaactggcttaacagagaacaagcttttacagacgtccttaaggcaacagtgcagagatgtaatccttaaaagaactgggaatggcaaaactactgtcggttgatgtgtcctgaaaattattggagttatggcagaagtgcttttttgatcaactggtttgtgttttgctgctgcatttatcccaagaaaaacagctttaatctccagaagaaaaccaaaataccatgggatttatgctgtattgacatcttgccctaaacgtacaacatcatagtaatttgtcatgggcaacatgaccagagagaagatttttgtcatgattttaaatacactgacacgctactgttggttaaatttaaacatgttttacctgcagaaattctctcacaaataacctgcaataacttgaaatgcatacccttttgaacacttccttttctcatgtataaattaaaatgtttgctgcattttgcaaaatgtcaattctcta

SEQ ID NO: 17328 - DNA, 4084 bp, Homo sapiens
agctgagagtgacgcctctgagccgcggaggattgtgggaggaggttgtctccaatttctcctccccctcccggccaagatgtctgacatggaggatgatttcatgtgcgatgatgaggaggactacgacctggaatactctgaagatagtaactccgagccaaatgtggatttggaaaatcagtactataattccaaagcattaaaagaagatgacccaaaagcggcattaagcagtttccaaaaggttttggaacttgaaggtgaaaaaggagaatggggatttaaagcactgaaacaaatgattaagattaacttcaagttgacaaactttccagaaatgatgaatagatataagcagctattgacctatattcggagtgcagtcacaagaaattattctgaaaaatccattaattctattcttgattatatctctacttctaaacagatggatttactgcaggaattctatgaaacaacactggaagctttgaaagatgctaagaatgatagactgtggtttaagacaaacacaaagcttggaaaattatatttagaacgagaggaatatggaaagcttcaaaaaattttacgccagttacatcagtcgtgccagactgatgatggagaagatgatctgaaaaaaggtacacagttattagaaatatatgctttggaaattcaaatgtacacagcacagaaaaataacaaaaaacttaaagcactctatgaacagtcacttcacatcaagtctgccatccctcatccactgattatgggagttatcagagaatgtggtggtaaaatgcacttgagggaaggtgaatttgaaaaggcacacactgatttttttgaagccttcaagaattatgatgaatctggaagtccaagacgaaccacttgcttaaaatatttggtcttagcaaatatgcttatgaaatcgggaataaatccatttgactcacaggaggccaagccgtacaaaaatgatccagaaattttagcaatgacgaatttagtaagtgcctatcagaataatgacatcactgaatttgaaaagattctaaaaacaaatcacagcaacatcatggatgatcctttcataagagaacacattgaagagcttttgcgaaacatcagaacacaagtgcttataaaattaattaagccttacacaagaatacatattccttttatttctaaggagttaaacatagatgtagctgatgtggagagcttgctggtgcagtgcatattggataacactattcatggccgaattgatcaagtcaaccaactccttgaactggatcatcagaagaggggtggtgcacgatatactgcactagataaatggaccaaccaactaaattctctcaaccaggctgtagtcagtaaactggcttaacagagaacaagcttttacagacgtccttaaggcaacagtgcagagatgtaatccttaaaagaactgggaatggcaaaactactgtcggttgatgtgtcctgaaaattattggagttatggcagaagtgcttttttgatcaactggtttgtgttttgctgctgcatttatcccaagaaaaacagctttaatctccagaagaaaaccaaaataccatgggatttatgctgtattgacatcttgccctaaacgtacaacatcatagtaatttgtcatgggcaacatgaccagagagaagatttttgtcatgattttaaatacactgacacgctactgttggttaaatttaaacatgttttacctgcagaaattctctcacaaataacctgcaataacttgaaatgcatacccttttgaacacttccttttctcatgtataaattaaaatgtttgctgcattttgcaaaatgtcaattctctaaaaatgtgtccgtatatttctgtacctgcagtgtagtaaaggtttagacgaaaccccataattatagtggcatactgtcacttaggtttcaagcagcaaaataaacagtgcagctcagaaattgtagtttggttcttgatgtgtttttattacatttggagttgttttgttttttagtaccttcgaaatttcaaattattttatcttcagttaatgattttaaaaagcctgggggcaaataagttggttatttgctttcaagtttttaaaagtagtctttattgatagagtaaggagaactactttctaacaaaacacgtgcatagttatgacagtgatgctttaaaggaataaaattctttttttttaaagagtgatattccttttcaaaagaatactaactctcagaatgttcactttaaacgaatatgccagaacatagacagctaaatgaatgttactctgcatagtgatcatgctggaaggttatttcctaatgccagcaatctaccattgcccaaaacctgctgagtttactcttttagaattgcattcaaagttaatttgtcacacacactaaactttatgattatacatgttttaaaaaatatagtattaggaagcttgattatttttagttaccattacttggcaccaaatgaaagtttccaaaacttccacctaactttgaggtaatgcagaaagtatataactggctttgaaggcaatcccaaaagagttttaaaggttttttgagcagtggcagtatacttaggagaatgaactgtggccttccaaggtaactaccttaaaggaactcagctcatttgaatgtattgagttttggatgtatttgtttcattttttaaaaagttcacattattttatagtgtcgaaaggaagaactaggattaacataatttctttggtttttctattgcttgttattattatgtaaaaactgggtggcagttcagaaggaagattgtggttacagaagagtgacaaccaagaattttttgatcattaaatcagattttataaacagtggaaggagcatggacttaaaacaaggcatgcttattcggttttgtcaaaattttacgaaaatatgtgatatatatttatactaaaaatatataatccttagatttagaaaagcaatcagttaatgtctttagcagactaaagcagtattaaacacaggtacaagttggaaattgtagaaaacggaaagaaaacaaaagacaaaatgtctatggtagggaataaaagtttaagatattataaaattatgtgtattttctcttttacataaatcatttgtgaaaagtgtgctaaactttttttacaagagtgatattaattaggatttatttttcaatataatttggagaccctttgttatccaaataaaaatgatgagtttttgtgcctgtattcaaatatgtatgcatgtgataacccttgaaagctaaagcccttcttaacttttgagttgatggaattagaattcaaagatttgaatgaaatgatttaacctttatcctccaattcttacagtgcccagttctcctgtgctatctttgctttgtacaatagtgcatcttccactttctagagagaaagcatgcacttgttatttggaaaactgggctaaatatataacagtatccaaagttataccataataatttattgtaattgtgtattacatagctttgtttacccagatataggtgcgttcttttttttctgttagtcatctgtgacttttgttctggaatacaggtttttaaatatatcttaacagtctgactaacttaaaataatttattcttcccttaaaacatttttctgtgtttttgtgcatcaaatattgtagagttgaaatcttagagattgcttatcgaaatataaatttaggggaagttaaaaatcgattggcaaatttgtagcatttattcactgattaaatcttttccacttttgtgaaaaccataccagtggtttacatcatattgtaatgtgttcatctcattcttctttttatccctaaacctagctaaaagttactgcaaagaaatctttggctgccacaagtagatgctctctactaccagagctggatttccattactcactcttgctcttacattaaagttgttgattaaatactttttctctaaattaa

SEQ ID NO: 17329 - DNA, 3891 bp, Homo sapiens
agctgagagtgacgcctctgagccgcggaggattgtgggaggaggttgtctccaatttctcctccccctcccggccaagatgtctgacatggaggatgatttcatgtgcgatgatgaggaggactacgacctggaatactctgaagatagtaactccgagccaaatgtggatttggaaaatcagtactataattccaaagcattaaaagaagatgacccaaaagcggcattaagcagtttccaaaaggttttggaacttgaaggtgaaaaaggagaatggggatttaaagcactgaaacaaatgattaagattaacttcaagttgacaaactttccagaaatgatgaatagatataagcagctattgacctatattcggagtgcagtcacaagaaattattctgaaaaatccattaattctattcttgattatatctctacttctaaacagatggatttactgcaggaattctatgaaacaacactggaagctttgaaagatgctaagaatgatagactgtggtttaagacaaacacaaagcttggaaaattatatttagaacgagaggaatatggaaagcttcaaaaaattttacgccagttacatcagtcgtgccagactgatgatggagaagatgatctgaaaaaaggtacacagttattagaaatatatgctttggaaattcaaatgtacacagcacagaaaaataacaaaaaacttaaagcactctatgaacagtcacttcacatcaagtctgccatccctcatccactgattatgggagttatcagagaatgtggtggtaaaatgcacttgagggaaggtgaatttgaaaaggcacacactgatttttttgaagccttcaagaattatgatgaatctggaagtccaagacgaaccacttgcttaaaatatttggtcttagcaaatatgcttatgaaatcgggaataaatccatttgactcacaggaggccaagccgtacaaaaatgatccagaaattttagcaatgacgaatttagtaagtgcctatcagaataatgacatcactgaatttgaaaagattctaaaaacaaatcacagcaacatcatggatgatcctttcataagagaacacattgaagagcttttgcgaaacatcagaacacaagtgcttataaaattaattaagccttacacaagaatacatattccttttatttctaaggagttaaacatagatgtagctgatgtggagagcttgctggtgcagtgcatattggataacactattcatggccgaattgatcaagtcaaccaactccttgaactggatcatcagaagaggggtggtgcacgatatactgcactagataaatggaccaaccaactaaattctctcaaccaggctgtagtcagtaaactggcttaacagagaacaagcttttacagacgtccttaaggcaacagtgcagagatgtaatccttaaaagaactgggaatggcaaaactactgtcggttgatgtgtcctgaaaattattggagttatggcagaagtgcttttttgatcaactggtttgtgttttgctgctgcatttatcccaagaaaaacagctttaatctccagaagaaaaccaaaataccatgggatttatgctgtattgacatcttgccctaaacgtacaacatcatagtaatttgtcatgggcaacatgaccagagagaagatttttgtcatgattttaaatacactgacacgctactgttggttaaatttaaacatgttttacctgcagaaattctctcacaaataacctgcaataacttgaaatgcatacccttttgaacacttccttttctcatgtataaattaaaatgtttgctgcattttgcaaaatgtcaattctctaaaaatgtgtccgtatatttctgtacctgcagtgtagtaaaggtttagacgaaaccccataattatagtggcatactgtcacttaggtttcaagcagcaaaataaacagtgcagctcagaaattgtagtttggttcttgatgtgtttttattacatttggagttgttttgttttttagtaccttcgaaatttcaaattattttatcttcagttaatgattttaaaaagcctgggggcaaataagttggttatttgctttcaagtttttaaaagtagtctttattgatagagtaaggagaactactttctaacaaaacacgtgcatagttatgacagtgatgctttaaaggaataaaattctttttttttaaagagtgatattccttttcaaaagaatactaactctcagaatgttcactttaaacgaatatgccagaacatagacagctaaatgaatgttactctgcatagtgatcatgctggaaggttatttcctaatgccagcaatctaccattgcccaaaacctgctgagtttactcttttagaattgcattcaaagttaatttgtcacacacactaaactttatgattatacatgttttaaaaaatatagtattaggaagcttgattatttttagttaccattacttggcaccaaatgaaagtttccaaaacttccacctaactttgaggtaatgcagaaagtatataactggctttgaaggcaatcccaaaagagttttaaaggttttttgagcagtggcagtatacttaggagaatgaactgtggccttccaaggtaactaccttaaaggaactcagctcatttgaatgtattgagttttggatgtatttgtttcattttttaaaaagttcacattattttatagtgtcgaaaggaagaactaggattaacataatttctttggtttttctattgcttgttattattatgtaaaaactgggtggcagttcagaaggaagattgtggttacagaagagtgacaaccaagaattttttgatcattaaatcagattttataaacagtggaaggagcatggacttaaaacaaggcatgcttattcggttttgtcaaaattttacgaaaatatgtgatatatatttatactaaaaatatataatccttagatttagaaaagcaatcagttaatgtctttagcagactaaagcagtattaaacacaggtacaagttggaaattgtagaaaacggaaagaaaacaaaagacaaaatgtctatggtagggaataaaagtttaagatattataaaattatgtgtattttctcttttacataaatcatttgtgaaaagtgtgctaaactttttttacaagagtgatattaattaggatttatttttcaatataatttggagaccctttgttatccaaataaaaatgatgagtttttgtgcctgtattcaaatatgtatgcatgtgataacccttgaaagctaaagcccttcttaacttttgagttgatggaattagaattcaaagatttgaatgaaatgatttaacctttatcctccaattcttacagtgcccagttctcctgtgctatctttgctttgtacaatagtgcatcttccactttctagagagaaagcatgcacttgttatttggaaaactgggctaaatatataacagtatccaaagttataccataataatttattgtaattgtgtattacatagctttgtttacccagatataggtgcgttcttttttttctgttagtcatctgtgacttttgttctggaatacaggtttttaaatatatcttaacagtctgactaacttaaaataatttattcttcccttaaaacatttttctgtgtttttgtgcatcaaatattgtagagttgaaatcttagagattgcttatcgaaatataaatttaggggaagttaaaaatcgattggcaaatttgtagcatttattcactgattaaatcttttccacttttgtgaaaacca

SEQ ID NO: 17330 - DNA, 4040 bp, Homo sapiens
agctgagagtgacgcctctgagccgcggaggattgtgggaggaggttgtctccaatttctcctccccctcccggccaagatgtctgacatggaggatgatttcatgtgcgatgatgaggaggactacgacctggaatactctgaagatagtaactccgagccaaatgtggatttggaaaatcagtactataattccaaagcattaaaagaagatgacccaaaagcggcattaagcagtttccaaaaggttttggaacttgaaggtgaaaaaggagaatggggatttaaagcactgaaacaaatgattaagattaacttcaagttgacaaactttccagaaatgatgaatagatataagcagctattgacctatattcggagtgcagtcacaagaaattattctgaaaatggatttactgcaggaattctatgaaacaacactggaagctttgaaagatgctaagaatgatagactgtggtttaagacaaacacaaagcttggaaaattatatttagaacgagaggaatatggaaagcttcaaaaaattttacgccagttacatcagtcgtgccagactgatgatggagaagatgatctgaaaaaaggtacacagttattagaaatatatgctttggaaattcaaatgtacacagcacagaaaaataacaaaaaacttaaagcactctatgaacagtcacttcacatcaagtctgccatccctcatccactgattatgggagttatcagagaatgtggtggtaaaatgcacttgagggaaggtgaatttgaaaaggcacacactgatttttttgaagccttcaagaattatgatgaatctggaagtccaagacgaaccacttgcttaaaatatttggtcttagcaaatatgcttatgaaatcgggaataaatccatttgactcacaggaggccaagccgtacaaaaatgatccagaaattttagcaatgacgaatttagtaagtgcctatcagaataatgacatcactgaatttgaaaagattctaaaaacaaatcacagcaacatcatggatgatcctttcataagagaacacattgaagagcttttgcgaaacatcagaacacaagtgcttataaaattaattaagccttacacaagaatacatattccttttatttctaaggagttaaacatagatgtagctgatgtggagagcttgctggtgcagtgcatattggataacactattcatggccgaattgatcaagtcaaccaactccttgaactggatcatcagaagaggggtggtgcacgatatactgcactagataaatggaccaaccaactaaattctctcaaccaggctgtagtcagtaaactggcttaacagagaacaagcttttacagacgtccttaaggcaacagtgcagagatgtaatccttaaaagaactgggaatggcaaaactactgtcggttgatgtgtcctgaaaattattggagttatggcagaagtgcttttttgatcaactggtttgtgttttgctgctgcatttatcccaagaaaaacagctttaatctccagaagaaaaccaaaataccatgggatttatgctgtattgacatcttgccctaaacgtacaacatcatagtaatttgtcatgggcaacatgaccagagagaagatttttgtcatgattttaaatacactgacacgctactgttggttaaatttaaacatgttttacctgcagaaattctctcacaaataacctgcaataacttgaaatgcatacccttttgaacacttccttttctcatgtataaattaaaatgtttgctgcattttgcaaaatgtcaattctctaaaaatgtgtccgtatatttctgtacctgcagtgtagtaaaggtttagacgaaaccccataattatagtggcatactgtcacttaggtttcaagcagcaaaataaacagtgcagctcagaaattgtagtttggttcttgatgtgtttttattacatttggagttgttttgttttttagtaccttcgaaatttcaaattattttatcttcagttaatgattttaaaaagcctgggggcaaataagttggttatttgctttcaagtttttaaaagtagtctttattgatagagtaaggagaactactttctaacaaaacacgtgcatagttatgacagtgatgctttaaaggaataaaattctttttttttaaagagtgatattccttttcaaaagaatactaactctcagaatgttcactttaaacgaatatgccagaacatagacagctaaatgaatgttactctgcatagtgatcatgctggaaggttatttcctaatgccagcaatctaccattgcccaaaacctgctgagtttactcttttagaattgcattcaaagttaatttgtcacacacactaaactttatgattatacatgttttaaaaaatatagtattaggaagcttgattatttttagttaccattacttggcaccaaatgaaagtttccaaaacttccacctaactttgaggtaatgcagaaagtatataactggctttgaaggcaatcccaaaagagttttaaaggttttttgagcagtggcagtatacttaggagaatgaactgtggccttccaaggtaactaccttaaaggaactcagctcatttgaatgtattgagttttggatgtatttgtttcattttttaaaaagttcacattattttatagtgtcgaaaggaagaactaggattaacataatttctttggtttttctattgcttgttattattatgtaaaaactgggtggcagttcagaaggaagattgtggttacagaagagtgacaaccaagaattttttgatcattaaatcagattttataaacagtggaaggagcatggacttaaaacaaggcatgcttattcggttttgtcaaaattttacgaaaatatgtgatatatatttatactaaaaatatataatccttagatttagaaaagcaatcagttaatgtctttagcagactaaagcagtattaaacacaggtacaagttggaaattgtagaaaacggaaagaaaacaaaagacaaaatgtctatggtagggaataaaagtttaagatattataaaattatgtgtattttctcttttacataaatcatttgtgaaaagtgtgctaaactttttttacaagagtgatattaattaggatttatttttcaatataatttggagaccctttgttatccaaataaaaatgatgagtttttgtgcctgtattcaaatatgtatgcatgtgataacccttgaaagctaaagcccttcttaacttttgagttgatggaattagaattcaaagatttgaatgaaatgatttaacctttatcctccaattcttacagtgcccagttctcctgtgctatctttgctttgtacaatagtgcatcttccactttctagagagaaagcatgcacttgttatttggaaaactgggctaaatatataacagtatccaaagttataccataataatttattgtaattgtgtattacatagctttgtttacccagatataggtgcgttcttttttttctgttagtcatctgtgacttttgttctggaatacaggtttttaaatatatcttaacagtctgactaacttaaaataatttattcttcccttaaaacatttttctgtgtttttgtgcatcaaatattgtagagttgaaatcttagagattgcttatcgaaatataaatttaggggaagttaaaaatcgattggcaaatttgtagcatttattcactgattaaatcttttccacttttgtgaaaaccataccagtggtttacatcatattgtaatgtgttcatctcattcttctttttatccctaaacctagctaaaagttactgcaaagaaatctttggctgccacaagtagatgctctctactaccagagctggatttccattactcactcttgctcttacattaaagttgttgattaaatactttttctctaaattaa

SEQ ID NO: 17331 - DNA, 4025 bp, Homo sapiens
cagctcggacccacaccacctgagtcgatgatgaggaggactacgacctggaatactctgaagatagtaactccgagccaaatgtggatttggaaaatcagtactataattccaaagcattaaaagaagatgacccaaaagcggcattaagcagtttccaaaaggttttggaacttgaaggtgaaaaaggagaatggggatttaaagcactgaaacaaatgattaagattaacttcaagttgacaaactttccagaaatgatgaatagatataagcagctattgacctatattcggagtgcagtcacaagaaattattctgaaaaatccattaattctattcttgattatatctctacttctaaacagaattctgattttttatgtcagatgatggatttactgcaggaattctatgaaacaacactggaagctttgaaagatgctaagaatgatagactgtggtttaagacaaacacaaagcttggaaaattatatttagaacgagaggaatatggaaagcttcaaaaaattttacgccagttacatcagtcgtgccagactgatgatggagaagatgatctgaaaaaaggtacacagttattagaaatatatgctttggaaattcaaatgtacacagcacagaaaaataacaaaaaacttaaagcactctatgaacagtcacttcacatcaagtctgccatccctcatccactgattatgggagttatcagagaatgtggtggtaaaatgcacttgagggaaggtgaatttgaaaaggcacacactgatttttttgaagccttcaagaattatgatgaatctggaagtccaagacgaaccacttgcttaaaatatttggtcttagcaaatatgcttatgaaatcgggaataaatccatttgactcacaggaggccaagccgtacaaaaatgatccagaaattttagcaatgacgaatttagtaagtgcctatcagaataatgacatcactgaatttgaaaagattctaaaaacaaatcacagcaacatcatggatgatcctttcataagagaacacattgaagagcttttgcgaaacatcagaacacaagtgcttataaaattaattaagccttacacaagaatacatattccttttatttctaaggagttaaacatagatgtagctgatgtggagagcttgctggtgcagtgcatattggataacactattcatggccgaattgatcaagtcaaccaactccttgaactggatcatcagaagaggggtggtgcacgatatactgcactagataaatggaccaaccaactaaattctctcaaccaggctgtagtcagtaaactggcttaacagagaacaagcttttacagacgtccttaaggcaacagtgcagagatgtaatccttaaaagaactgggaatggcaaaactactgtcggttgatgtgtcctgaaaattattggagttatggcagaagtgcttttttgatcaactggtttgtgttttgctgctgcatttatcccaagaaaaacagctttaatctccagaagaaaaccaaaataccatgggatttatgctgtattgacatcttgccctaaacgtacaacatcatagtaatttgtcatgggcaacatgaccagagagaagatttttgtcatgattttaaatacactgacacgctactgttggttaaatttaaacatgttttacctgcagaaattctctcacaaataacctgcaataacttgaaatgcatacccttttgaacacttccttttctcatgtataaattaaaatgtttgctgcattttgcaaaatgtcaattctctaaaaatgtgtccgtatatttctgtacctgcagtgtagtaaaggtttagacgaaaccccataattatagtggcatactgtcacttaggtttcaagcagcaaaataaacagtgcagctcagaaattgtagtttggttcttgatgtgtttttattacatttggagttgttttgttttttagtaccttcgaaatttcaaattattttatcttcagttaatgattttaaaaagcctgggggcaaataagttggttatttgctttcaagtttttaaaagtagtctttattgatagagtaaggagaactactttctaacaaaacacgtgcatagttatgacagtgatgctttaaaggaataaaattctttttttttaaagagtgatattccttttcaaaagaatactaactctcagaatgttcactttaaacgaatatgccagaacatagacagctaaatgaatgttactctgcatagtgatcatgctggaaggttatttcctaatgccagcaatctaccattgcccaaaacctgctgagtttactcttttagaattgcattcaaagttaatttgtcacacacactaaactttatgattatacatgttttaaaaaatatagtattaggaagcttgattatttttagttaccattacttggcaccaaatgaaagtttccaaaacttccacctaactttgaggtaatgcagaaagtatataactggctttgaaggcaatcccaaaagagttttaaaggttttttgagcagtggcagtatacttaggagaatgaactgtggccttccaaggtaactaccttaaaggaactcagctcatttgaatgtattgagttttggatgtatttgtttcattttttaaaaagttcacattattttatagtgtcgaaaggaagaactaggattaacataatttctttggtttttctattgcttgttattattatgtaaaaactgggtggcagttcagaaggaagattgtggttacagaagagtgacaaccaagaattttttgatcattaaatcagattttataaacagtggaaggagcatggacttaaaacaaggcatgcttattcggttttgtcaaaattttacgaaaatatgtgatatatatttatactaaaaatatataatccttagatttagaaaagcaatcagttaatgtctttagcagactaaagcagtattaaacacaggtacaagttggaaattgtagaaaacggaaagaaaacaaaagacaaaatgtctatggtagggaataaaagtttaagatattataaaattatgtgtattttctcttttacataaatcatttgtgaaaagtgtgctaaactttttttacaagagtgatattaattaggatttatttttcaatataatttggagaccctttgttatccaaataaaaatgatgagtttttgtgcctgtattcaaatatgtatgcatgtgataacccttgaaagctaaagcccttcttaacttttgagttgatggaattagaattcaaagatttgaatgaaatgatttaacctttatcctccaattcttacagtgcccagttctcctgtgctatctttgctttgtacaatagtgcatcttccactttctagagagaaagcatgcacttgttatttggaaaactgggctaaatatataacagtatccaaagttataccataataatttattgtaattgtgtattacatagctttgtttacccagatataggtgcgttcttttttttctgttagtcatctgtgacttttgttctggaatacaggtttttaaatatatcttaacagtctgactaacttaaaataatttattcttcccttaaaacatttttctgtgtttttgtgcatcaaatattgtagagttgaaatcttagagattgcttatcgaaatataaatttaggggaagttaaaaatcgattggcaaatttgtagcatttattcactgattaaatcttttccacttttgtgaaaaccataccagtggtttacatcatattgtaatgtgttcatctcattcttctttttatccctaaacctagctaaaagttactgcaaagaaatctttggctgccacaagtagatgctctctactaccagagctggatttccattactcactcttgctcttacattaaagttgttgattaaatactttttctctaaattaa

SEQ ID NO: 17332 - DNA, 3138 bp, Homo sapiens
atcctctataagcggcgtgaaacctgacccgtgacaaaaatgatccagaaatattgagcaatgacgaactttagataatgtgcctatcagaataatgacatcactgaatttgaaaagattctaaaaacaaatcacagcaacatcatggatgatcctttcataagagaacacattgaagagcttttgcgaaacatcagaacacaagtgcttataaaattaattaagccttacacaagaatacatattccttttatttctaaggagttaaacatagatgtagctgatgtggagagcttgctggtgcagtgcatattggataacactattcatggccgaattgatcaagtcaaccaactccttgaactggatcatcagaagaggggtggtgcacgatatactgcactagataaatggaccaaccaactaaattctctcaaccaggctgtagtcagtaaactggcttaacagagaacaagcttttacagacgtccttaaggcaacagtgcagagatgtaatccttaaaagaactgggaatggcaaaactactgtcggttgatgtgtcctgaaaattattggagttatggcagaagtgcttttttgatcaactggtttgtgttttgctgctgcatttatcccaagaaaaacagctttaatctccagaagaaaaccaaaataccatgggatttatgctgtattgacatcttgccctaaacgtacaacatcatagtaatttgtcatgggcaacatgaccagagagaagatttttgtcatgattttaaatacactgacacgctactgttggttaaatttaaacatgttttacctgcagaaattctctcacaaataacctgcaataacttgaaatgcatacccttttgaacacttccttttctcatgtataaattaaaatgtttgctgcattttgcaaaatgtcaattctctaaaaatgtgtccgtatatttctgtacctgcagtgtagtaaaggtttagacgaaaccccataattatagtggcatactgtcacttaggtttcaagcagcaaaataaacagtgcagctcagaaattgtagtttggttcttgatgtgtttttattacatttggagttgttttgttttttagtaccttcgaaatttcaaattattttatcttcagttaatgattttaaaaagcctgggggcaaataagttggttatttgctttcaagtttttaaaagtagtctttattgatagagtaaggagaactactttctaacaaaacacgtgcatagttatgacagtgatgctttaaaggaataaaattctttttttttaaagagtgatattccttttcaaaagaatactaactctcagaatgttcactttaaacgaatatgccagaacatagacagctaaatgaatgttactctgcatagtgatcatgctggaaggttatttcctaatgccagcaatctaccattgcccaaaacctgctgagtttactcttttagaattgcattcaaagttaatttgtcacacacactaaactttatgattatacatgttttaaaaaatatagtattaggaagcttgattatttttagttaccattacttggcaccaaatgaaagtttccaaaacttccacctaactttgaggtaatgcagaaagtatataactggctttgaaggcaatcccaaaagagttttaaaggttttttgagcagtggcagtatacttaggagaatgaactgtggccttccaaggtaactaccttaaaggaactcagctcatttgaatgtattgagttttggatgtatttgtttcattttttaaaaagttcacattattttatagtgtcgaaaggaagaactaggattaacataatttctttggtttttctattgcttgttattattatgtaaaaactgggtggcagttcagaaggaagattgtggttacagaagagtgacaaccaagaattttttgatcattaaatcagattttataaacagtggaaggagcatggacttaaaacaaggcatgcttattcggttttgtcaaaattttacgaaaatatgtgatatatatttatactaaaaatatataatccttagatttagaaaagcaatcagttaatgtctttagcagactaaagcagtattaaacacaggtacaagttggaaattgtagaaaacggaaagaaaacaaaagacaaaatgtctatggtagggaataaaagtttaagatattataaaattatgtgtattttctcttttacataaatcatttgtgaaaagtgtgctaaactttttttacaagagtgatattaattaggatttatttttcaatataatttggagaccctttgttatccaaataaaaatgatgagtttttgtgcctgtattcaaatatgtatgcatgtgataacccttgaaagctaaagcccttcttaacttttgagttgatggaattagaattcaaagatttgaatgaaatgatttaacctttatcctccaattcttacagtgcccagttctcctgtgctatctttgctttgtacaatagtgcatcttccactttctagagagaaagcatgcacttgttatttggaaaactgggctaaatatataacagtatccaaagttataccataataatttattgtaattgtgtattacatagctttgtttacccagatataggtgcgttcttttttttctgttagtcatctgtgacttttgttctggaatacaggtttttaaatatatcttaacagtctgactaacttaaaataatttattcttcccttaaaacatttttctgtgtttttgtgcatcaaatattgtagagttgaaatcttagagattgcttatcgaaatataaatttaggggaagttaaaaatcgattggcaaatttgtagcatttattcactgattaaatcttttccacttttgtgaaaaccataccagtggtttacatcatattgtaatgtgttcatctcattcttctttttatccctaaacctagctaaaagttactgcaaagaaatctttggctgccacaagtagatgctctctactaccagagctggatttccattactcactcttgctcttacattaaagttgttgattaaatactttttctctaaattaa

SEQ ID NO: 17333 - DNA, 2395 bp, Homo sapiens
gtgactctagacggatccccttcaatttctacactaaatacactgacacgctactgttggttaaatttaaacatgttttacctgcagaaattctctcacaaataacctgcaataacttgaaatgcatacccttttgaacacttccttttctcatgtataaattaaaatgtttgctgcattttgcaaaatgtcaattctctaaaaatgtgtccgtatatttctgtacctgcagtgtagtaaaggtttagacgaaaccccataattatagtggcatactgtcacttaggtttcaagcagcaaaataaacagtgcagctcagaaattgtagtttggttcttgatgtgtttttattacatttggagttgttttgttttttagtaccttcgaaatttcaaattattttatcttcagttaatgattttaaaaagcctgggggcaaataagttggttatttgctttcaagtttttaaaagtagtctttattgatagagtaaggagaactactttctaacaaaacacgtgcatagttatgacagtgatgctttaaaggaataaaattctttttttttaaagagtgatattccttttcaaaagaatactaactctcagaatgttcactttaaacgaatatgccagaacatagacagctaaatgaatgttactctgcatagtgatcatgctggaaggttatttcctaatgccagcaatctaccattgcccaaaacctgctgagtttactcttttagaattgcattcaaagttaatttgtcacacacactaaactttatgattatacatgttttaaaaaatatagtattaggaagcttgattatttttagttaccattacttggcaccaaatgaaagtttccaaaacttccacctaactttgaggtaatgcagaaagtatataactggctttgaaggcaatcccaaaagagttttaaaggttttttgagcagtggcagtatacttaggagaatgaactgtggccttccaaggtaactaccttaaaggaactcagctcatttgaatgtattgagttttggatgtatttgtttcattttttaaaaagttcacattattttatagtgtcgaaaggaagaactaggattaacataatttctttggtttttctattgcttgttattattatgtaaaaactgggtggcagttcagaaggaagattgtggttacagaagagtgacaaccaagaattttttgatcattaaatcagattttataaacagtggaaggagcatggacttaaaacaaggcatgcttattcggttttgtcaaaattttacgaaaatatgtgatatatatttatactaaaaatatataatccttagatttagaaaagcaatcagttaatgtctttagcagactaaagcagtattaaacacaggtacaagttggaaattgtagaaaacggaaagaaaacaaaagacaaaatgtctatggtagggaataaaagtttaagatattataaaattatgtgtattttctcttttacataaatcatttgtgaaaagtgtgctaaactttttttacaagagtgatattaattaggatttatttttcaatataatttggagaccctttgttatccaaataaaaatgatgagtttttgtgcctgtattcaaatatgtatgcatgtgataacccttgaaagctaaagcccttcttaacttttgagttgatggaattagaattcaaagatttgaatgaaatgatttaacctttatcctccaattcttacagtgcccagttctcctgtgctatctttgctttgtacaatagtgcatcttccactttctagagagaaagcatgcacttgttatttggaaaactgggctaaatatataacagtatccaaagttataccataataatttattgtaattgtgtattacatagctttgtttacccagatataggtgcgttcttttttttctgttagtcatctgtgacttttgttctggaatacaggtttttaaatatatcttaacagtctgactaacttaaaataatttattcttcccttaaaacatttttctgtgtttttgtgcatcaaatattgtagagttgaaatcttagagattgcttatcgaaatataaatttaggggaagttaaaaatcgattggcaaatttgtagcatttattcactgattaaatcttttccacttttgtgaaaaccataccagtggtttacatcatattgtaatgtgttcatctcattcttctttttatccctaaacctagctaaaagttactgcaaagaaatctttggctgccacaagtagatgctctctactaccagagctggatttccattactcactcttgctcttacattaaagttgttgattaaatactttttctctaaattaa

SEQ ID NO: 17334 - DNA, 2655 bp, Homo sapiens
agctgagagtgacgcctctgagccgcggaggattgtgggaggaggttgtctccaatttctcctccccctcccggccaagatgtctgacatggaggatgatttcatgtgcgatgatgaggaggactacgacctggaatactctgaagatagtaactccgagccaaatgtggatttggaaaatcagtactataattccaaagcattaaaagaagatgacccaaaagcggcattaagcagtttccaaaaggttttggaacttgaaggtgaaaaaggagaatggggatttaaagcactgaaacaaatgattaagattaacttcaagttgacaaactttccagaaatgatgaatagatataagcagctattgacctatattcggagtgcagtcacaagaaattattctgaaaaatccattaattctattcttgattatatctctacttctaaacagatggatttactgcaggaattctatgaaacaacactggaagctttgaaagatgctaagaatgatagactgtggtttaagacaaacacaaagcttggaaaattatatttagaacgagaggaatatggaaagcttcaaaaaattttacgccagttacatcagtcgtgccagactgatgatggagaagatgatctgaaaaaaggtacacagttattagaaatatatgctttggaaattcaaatgtacacagcacagaaaaataacaaaaaacttaaagcactctatgaacagtcacttcacatcaagtctgccatccctcatccactgattatgggagttatcagagaatgtggtggtaaaatgcacttgagggaaggtgaatttgaaaaggcacacactgatttttttgaagccttcaagaattatgatgaatctggaagtccaagacgaaccacttgcttaaaatatttggtcttagcaaatatgcttatgaaatcgggaataaatccatttgactcacaggaggccaagccgtacaaaaatgatccagaaattttagcaatgacgaatttagtaagtgcctatcagaataatgacatcactgaatttgaaaagattctaaaaacaaatcacagcaacatcatggatgatcctttcataagagaacacattgaagagcttttgcgaaacatcagaacacaagtgcttataaaattaattaagccttacacaagaatacatattccttttatttctaaggagttaaacatagatgtagctgatgtggagagcttgctggtgcagtgcatattggataacactattcatggccgaattgatcaagtcaaccaactccttgaactggatcatcagaagaggggtggtgcacgatatactgcactagataaatggaccaaccaactaaattctctcaaccaggctgtagtcagtaaactggcttaacagagaacaagcttttacagacgtccttaaggcaacagtgcagagatgtaatccttaaaagaactgggaatggcaaaactactgtcggttgatgtgtcctgaaaattattggagttatggcagaagtgcttttttgatcaactggtttgtgttttgctgctgcatttatcccaagaaaaacagctttaatctccagaagaaaaccaaaataccatgggatttatgctgtattgacatcttgccctaaacgtacaacatcatagtaatttgtcatgggcaacatgaccagagagaagatttttgtcatgattttaaatacactgacacgctactgttggttaaatttaaacatgttttacctgcagaaattctctcacaaataacctgcaataacttgaaatgcatacccttttgaacacttccttttctcatgtataaattaaaatgtttgctgcattttgcaaaatgtcaattctctaaaaatgtgtccgtatatttctgtacctgcagtgtagtaaaggtttagacgaaaccccataattatagtggcatactgtcacttaggtttcaagcagcaaaataaacagtgcagctcagaaattgtaaaaaaaaaaaaaaaaaaaaaaaaaaaaaaaaaaaaaaaaaaaaaaaaaaaaaaaaaaaaaaaaaaaaaaaaaaaaaaaaaaaaaaaaaaaaaaaaaaaaaaaaaaaaaaaaaaaaaaaaaaagaaggggaggcggagccctcaaaaaatgccagccatcgaggcacgaccacagacaccgcccccagtcatgtaatgaagcagacggcgccccacacaggggaggagagactaatattaatagcaggagaaggacgggcgaacgacaccaacacaaacaaaagacgagagagaagaaaaaaaaataccagacacacggcaacaaaaccatagaaaaagaaaaaacaaaacacaatgcagagaagaagaagaacagagagagaggcaaaaaaaacagcacagacaataccagaacgacacccgacaccgaaacaaaacaaaacaacaacacacgagaaaagagacaatatcaatcaagagacgaggcaagaaaacacacggcgagaagaaaagacgacacaggagcacacggaaagagaaccaaccacgacacaaacaggaaacaggaggacatcacgaaaaaaaagataacaaaccacagggggcgccggaaacaacaacaaagaaaaaacaggcgaga

SEQ ID NO: 17335 - DNA, 1962 bp, Homo sapiens
agctgagagtgacgcctctgagccgcggaggattgtgggaggaggttgtctccaatttctcctccccctcccggccaagatgtctgacatggaggatgatttcatgtgcgatgatgaggaggactacgacctggaatactctgaagatagtaactccgagccaaatgtggatttggaaaatcagtactataattccaaagcattaaaagaagatgacccaaaagcggcattaagcagtttccaaaaggttttggaacttgaaggtgaaaaaggagaatggggatttaaagcactgaaacaaatgattaagattaacttcaagttgacaaactttccagaaatgatgaatagatataagcagctattgacctatattcggagtgcagtcacaagaaattattctgaaaaatccattaattctattcttgattatatctctacttctaaacagatggatttactgcaggaattctatgaaacaacactggaagctttgaaagatgctaagaatgatagactgtggtttaagacaaacacaaagcttggaaaattatatttagaacgagaggaatatggaaagcttcaaaaaattttacgccagttacatcagtcgtgccagactgatgatggagaagatgatctgaaaaaaggtacacagttattagaaatatatgctttggaaattcaaatgtacacagcacagaaaaataacaaaaaacttaaagcactctatgaacagtcacttcacatcaagtctgccatccctcatccactgattatgggagttatcagagaatgtggtggtaaaatgcacttgagggaaggtgaatttgaaaaggcacacactgatttttttgaagccttcaagaattatgatgaatctggaagtccaagacgaaccacttgcttaaaatatttggtcttagcaaatatgcttatgaaatcgggaataaatccatttgactcacaggaggccaagccgtacaaaaatgatccagaaattttagcaatgacgaatttagtaagtgcctatcagaataatgacatcactgaatttgaaaagattctaaaaacaaatcacagcaacatcatggatgatcctttcataagagaacacattgaagagcttttgcgaaacatcagaacacaagtgcttataaaattaattaagccttacacaagaatacatattccttttatttctaaggagttaaacatagatgtagctgatgtggagagcttgctggtgcagtgcatattggataacactattcatggccgaattgatcaagtcaaccaactccttgaactggatcatcagaagaggggtggtgcacgatatactgcactagataaatggaccaaccaactaaattctctcaaccaggctgtagtcagtaaactggcttaacagagaacaagcttttacagacgtccttaaggcaacagtgcagagatgtaatccttaaaagaactgggaatggcaaaactactgtcggttgatgtgtcctgaaaattattggagttatggcagaagtgcttttttgatcaactggtttgtgttttgctgctgcatttatcccaagaaaaacagctttaatctccagaagaaaaccaaaataccatgggatttatgctgtattgacatcttgccctaaacgtacaacatcatagtaatttgtcatgggcaacatgaccagagagaagatttttgtcatgattttaaatacactgacacgctactgttggttaaatttaaacatgttttacctgcagaaattctctcacaaataacctgcaataacttgaaatgcatacccttttgaacacttccttttctcatgtataaattaaaatgtttgctgcattttgcaaaatgtcaattctctacccataattatagtggcatactgtcacttaggtttcaagcagcaaaataaacagtgcagctcagaaattgta

SEQ ID NO: 17336 - DNA, 760 bp, Homo sapiens
gatggggaaggcggcggcggcggtggcctttggggccgaagtgggcgtgcggctcgcgctgttcgcggccttcctggtgacggagctgctccccccgttccagagactcatccagccggaggagatgtggctctaccggaacccctacgtggaggcggagtatttccccaccaagccgatgtttgttattgcatttctctctccactgtctctgatcttcctggccaaatttctcaagaaggcagacacaagagacagcagacaagcctgcctggctgccagccttgccctggctctgaatggcgtctttaccaacacaataaaactgatcgtagggaggccacgcccagatttcttctaccgctgcttccctgatgggctagcccattctgacttgatgtgtacaggggataaggacgtggtgaatgagggccgaaagagcttccccagtggacattcttcctgtatgaatatcatatggactctaccctatgcttgttttcacatcattgaatttaacctagaaagctagtagggatgggaaaatctgactactcttgtttctacaatttggaaaatccccccttctttagtaactccacagtttaacaagtctgagccttgactatttgggtaaatattacagaacagaaaggtagtttaccttcatgagatttgcacatttaattgttatattatttgcctagatcctgcaatcttgtactagcaataaaaatacctttaacgaagaaaaaaaaag

SEQ ID NO: 17337 - DNA, 2345 bp, Homo sapiens
atgttccttctcctcgccctcctcactgagcttggaagactgcaagcccacgaaggttctgaaggaatatttctgcatgtcacagttccacggaagattaagtcaaatgacagtgaagtttcagagaggaagatgatttacatcattacaattgatggacaaccttacactctacatctcggaaaacaatcattcttaccccagaactttttggtttatacatataatgaaactggatctttgcattctgtgtctccatattttatgatgcattgccattaccaaggatatgctgccgaatttccaaattcatttgtgacactcagtatatgttctggtctcaggggatttctccagtttgaaaatatcagttatggaattgaaccagtagaatcttcagcaagatttgagcatataatttatcaaatgaaaaataatgatccaaatgtatccattttagcagtaaattacagtcatatttggcagaaagaccagccctacaaagttcctttaaactcacagataaaaaatctttcaaaactattaccccaatatctggaaatatacattatagtggaaaaagctttgtatgattatatgggatctgaaatgatggctgtaacacaaaaaattgtccaggttattgggcttgtcaacactatgtttacccagttcaaattgactgttatactgtcttccttggaattgtggtcaaatgaaaaccagatttccaccagtggggatgctgatgatatattacaaagatttttggcatggaaacgggactatctcatcctacggccccatgacatagcatacttacttgtttacaggaaacatcctaaatatgtgggagcaacatttcctggcaccgtatgcaataaaagctatgatgcaggtattgctatgtatccagatgcaataggtttggagggattttcggttattatagctcaactgcttggccttaatgtaggattaacatatgatgacatcactcagtgtttctgtctgagagctacatgcatcatgaatcatgaagcagtgagtgccagtggtagaaagatttttagcaactgcagcatgcacgactatagatattttgtttcaaaatttgagactaaatgccttcagaagctttcaaatttgcaaccattacatcaaaatcaaccagtgtgtggtaatgggattttggaatccaatgaagaatgtgactgtggtaataaaaatgaatgtcaatttaagaagtgctgtgattataacacatgtaaactgaagggctcagtaaaatgtggttctggaccatgttgtacatcaaagtgtgagttgtcaatagcaggcactccatgtagaaagagtattgatccagagtgtgattttacagagtactgcaatggaacctctagtaattgtgttcctgacacttatgcattgaatggccgtttgtgcaagttgggaactgcctattgctataacggacaatgtcaaactactgataaccagtgtgccaagatatttggaaaaggtgctcaaggtgctccatttgcctgttttaaagaagttaattctctgcatgaaagatctgaaaactgtggttttaaaaattcacaaccattaccttgtgaacggaaggatgttctctgtggaaaattagcttgtgttcagccacataaaaatgctaataaaagtgacgctcaatctacagtttattcatatattcaagaccatgtatgtgtatctatagccactggttcctccatgagatcagatggaacagacaatgcctatgtggctgatggcaccatgtgtggtccagaaatgtactgtgtaaataaaacctgcagaaaagttcatttaatgggatataactgtaatgccaccacaaaatgcaaagggaaagggatatgtaataattttggtaattgtcaatgcttccctggacatagacctccagattgtaaattccagtttggttccccagggggtagtattgatgatggaaattttcagaaatctggtgacttttatactgaaaaaggctacaatacacactggaacaactggtttattctgagtttctgcatttttctgccgtttttcatagttttcaccactgtgatctttaaaagaaatgaaataagtaaatcatgtaacagagagaatgcagagtataatcgtaattcatccgttgtatcagaaagcgatgacgtgggacattaatattgcacagaacttccatagcaaataacctaaaggaacgaatgtgctttatttataaccttacgttatccccaatgcattgtaaatgtcaaacttttggaaaataaagcctgcgtgccctccca

SEQ ID NO: 17338 - DNA, 852 bp, Homo sapiens
gatggggaaggcggcggcggcggtggcctttggggccgaagtgggcgtgcggctcgcgctgttcgcggccttcctggtgacggagctgctccccccgttccagagactcatccagccggaggagatgtggctctaccggaacccctacgtggaggcggagtatttccccaccaagccgatgtttgttattgcatttctctctccactgtctctgatcttcctggccaaatttctcaagaaggcagacacaagagacagcagacaagcctgcctggctgccagccttgccctggctctgaatggcgtctttaccaacacaataaaactgatcgtagggaggccacgcccagatttcttctaccgctgcttccctgatgggctagcccattctgacttgatgtgtacaggggataaggacgtggtgaatgagggccgaaagagcttccccagtggacattcttcctttgcatttgctggtctggcctttgcgtccttctacctggcagggaagttacactgcttcacaccacaaggccgtgggaaatcttggaggttctgtgcctttctgtcacctctactttttgcagctgtgattgcactgtcccgcacatgtgactacaagcatcactggcaaggaccctttaaatggtgaaaatgggcagatgaatagcaataagtggacctttgttactcttctgagttagaaaaattctaatttagtacactctgaacaaagcttattatacttacttaagatgtgttttgatttggtgttcagaaagcaacctgacaatgataatactgtaactatgataaaattgagaataaaaagattttatttagaaaaaaaaa

SEQ ID NO: 17339 - DNA, 537 bp, Homo sapiens
attttgcctggggcactatttgaccaatagttaacaggattattaatgtctgctacaactgaaaaataatttctggagttaatgatttacgttccaaccatgctgctttcttccaggccacgcccagatttcttctaccgctgcttccctgatgggctagcccattctgacttgatgtgtacaggggataaggacgtggtgaatgagggccgaaagagcttccccagtggacattcttcctgtatgaatatcatatggactctaccctatgcttgttttcacatcattgaatttaacctagaaagctagtagggatgggaaaatctgactactcttgtttctacaatttggaaaatccccccttctttagtaactccacagtttaacaagtctgagccttgactatttgggtaaatattacagaacagaaaggtagtttaccttcatgagatttgcacatttaattgttatattatttgcctagatcctgcaatcttgtactagcaataaaaatacctttaacgaagaaaaaaaaag

SEQ ID NO: 17340 - DNA, 659 bp, Homo sapiens
aacagagaggttaatggtgtccaccacacgtctttctcattcttttctcctttatcttcactctgatttttcttttgtcattcaacgcttactcccttccccatacctcagtcctccaggtgacacctgggctcttttctgcctgaacagcatttcccaccaacggccacagcagtcggtcagtgtcctcttgagcacctcctgaagctgcagtgtcatttgctgtttgccctaaaaagccacgcccagatttcttctaccgctgcttccctgatgggctagcccattctgacttgatgtgtacaggggataaggacgtggtgaatgagggccgaaagagcttccccagtggacattcttcctgtatgaatatcatatggactctaccctatgcttgttttcacatcattgaatttaacctagaaagctagtagggatgggaaaatctgactactcttgtttctacaatttggaaaatccccccttctttagtaactccacagtttaacaagtctgagccttgactatttgggtaaatattacagaacagaaaggtagtttaccttcatgagatttgcacatttaattgttatattatttgcctagatcctgcaatcttgtactagcaataaaaatacctttaacgaagaaaaaaaaag

SEQ ID NO: 17341 - DNA, 936 bp, Homo sapiens
tgcatatttcactcattttattcctagcacctagcacagaggagatgcttactaaatatctgctgaatgaacaaattaatgagtatggatggtctgggttctgtactaagtacatttaaaattataggaaagataagacaaaaagagtttaccaaagataaacatcctaatttttccattatttgaagcattgtaagttcaagttaaactgcatctacaggaaatttaaaacctcaaagttcaatttactctcttaaaaatcaggttcattgtcataggacttttgttcaaaaacataagtaaaattcaagaaaacataaaattataattaaaccaaacaaatttaagctgaatgctatagtaagtaaaatatccaaattacagaacacctggcttggcgcggtggctcacacctcagcactttgggaggctgaggcaggcggatcacctgtagtcaggaattcgagaccagcctggccaacatattgaaaccccgtctctactaaaaatacaaaaattgaggccaggtgcagtggctcatgcctgtaatcacagcactttgggaaggtgaggtaggtggatcacctgaggtcaggctggtctcaatctcctgacctcgggatccatctgcctggtcctcccaaagtgctgggattacaggcgtgagtcaccgtgcccggcgagaagcaactcttaaaatactttattccttcctctaggaccctttaaatggtgaaaatgggcagatgaatagcaataagtggacctttgttactcttctgagttagaaaaattctaatttagtacactctgaacaaagcttattatacttacttaagatgtgttttgatttggtgttcagaaagcaacctgacaatgataatactgtaactatgataaaattgagaataaaaagattttatttagaaaaaaaaa

SEQ ID NO: 17342 - DNA, 322 bp, Homo sapiens
aacagagaggttaatggtgtccaccacacgtctttctcattcttttctcctttatcttcactctgatttttcttttgtcattcaacgcttactcccttccccatacctcagtcctccaggtgacacctgggctcttttctgcctgaacagcatttcccaccaacggccacagcagtcggtcagtgtcctcttgagcacctcctgaagctgcagtgtcatttgctgtttgccctaaaaagtaatcatgtgctggaatgggcgtttttcccctaatttaaatgctcaccttgaaaggcttttctcttagtgtggtgactatact

SEQ ID NO: 17343 - DNA, 2938 bp, Homo sapiens
gatggggaaggcggcggcggcggtggcctttggggccgaagtgggcgtgcggctcgcgctgttcgcggccttcctggtgacggagctgctccccccgttccagagactcatccagccggaggagatgtggctctaccggaacccctacgtggaggcggagtatttccccaccaagccgatgtttgtgcgtggagaaagatcgtctttcctccctccccatgacccggcttcccgcgggcacctgtgcgttttccaccccgagacggcctttgtagggacccactgcccactccgctgctgtgcgctgggttccgcctcctagggctcgagtgtttaagatcctgattgagagaggagggtgtccgagcctctttgggctgagacaacgttttcccgggcgctctgtgcctcagcctgaggtaccggggcccgagccgcacgggcgctgctgttcactggtggcgctgcctggcgcccggttacgcgcactcagagaccttatgttagctccagtgagtcctgctgtgtcacatccctctttcctgtaggagcacgagtgtggcttttttttggattgtttttaacctctgacattctgattcaggttattgcatttctctctccactgtctctgatcttcctggccaaatttctcaagaaggcagacacaagagacagcagacaagcctgcctgggtgagcgctagccctttcgggccggtttcttcgtgctgggaacctaggaggtcgttgtgggattcagccacggtgagcctgtgtggaggccactgagttctgcattcctaaaggaactctatccccgcgggagaggaaaatagcactgcagggacttggttacgcaggctacacggcaggcagccctgtgcctaaatgcactgggttatttgtacctcagaaatgtctttggcctagtacaaaagttctcggctacaaaagagtgatcactgaggaccctaattatttttgtgcccaggcctggttggattctatccatctcagaaacagcacggctgctctcataacgaggccatgaccatacctttcctcctagacagatcctttcaactaatggctttgctttgcagctgccagccttgccctggctctgaatggcgtctttaccaacacaataaaactgatcgtagggaggccacgcccagatttcttctaccgctgcttccctgatgggctagcccattctgacttgatgtgtacaggggataaggacgtggtgaatgagggccgaaagagcttccccagtggacattcttcctttgcatttgctggtctggcctttgcgtccttctacctggcagggaagttacactgcttcacaccacaaggccgtgggaaatcttggaggttctgtgcctttctgtcacctctactttttgcagctgtgattgcactgtcccgcacatgtgactacaagcatcactggcaagatgtactagttggatccatgattggaatgacatttgcctatgtctgctatcggcagtattatcctcctctgactgatgcagaatgccataaaccatttcaagacaaacttgtactttccactgcacagaagcctggggattcttattgttttgatatttaaaaattgaatctggccgggcgtggtggctcatgcctgtaatcccaacactttgggaggctgaggagggtggatcacctgaggtcaggaccagcctggccaacatggtgaaccctgtctctactaaaaatacaaaaattagccaggagttgtgtgccgtaatcccagctacctgggaggctgaggtaggagaattgcttgaacctgggagctggaggttccagtgagccgagatcgcaccactgcactccagcctaggcaacagagtgagaccccatctcaaaaaaaaaaaaaaattgaatctatctcaatagagaacaggtgaactagccctcctaaccggaccatgcacaagacaagaaattctagcctttttttccccttccaaggtgcaagtgaggacataagccacactgtattctgcctccaaatgattacacacttttgcccctgctcatctatcttgaggagttacggttcttttccactactgtatgccacatgttctagtaaaaggatctttcaaaggtgtccaacaccttatgaatctggtctatcagattaatatctgaagatctacagtgtttttacatttaatttaaatgccattcttagaaggatcttgtcacaaagaagcctttacatagccccaccttgtctcagaagctagagttcattatcaaaacttaatttccatttcatatagctcaaaatcttaaaatctagggcatggccaactaaattactttgattctgtttaccttctctgatgacaattccatcaagccttaaataggaaaatgtcgaatctagggtaatttatcacttttgtgtgcatcttatctgagtccagccatctggtactgctgtgcattttgaacaccgtgggcataaacaatttgttgaattactaagtgaaaacaataataaagaagaaaatggtcaggagtgtggtttcagcactactaacagatgactgtttctacctcatttgaccataactgtacttgtgagcttctttccttccattcatgactgaagatctgctcaaatgcaccaacactgccaagtgactaaggtagaaaagaaaaatgacaggtatcgtcatctgaaggacagatgaatctttttctgccccttcttcacaatggaatataaggaacaattatgggatgtcatcagaatggatgccataggacctacagctccctttctctttattgtgattatactttaaatatgacattgtcttttatgtgtatgttcctatattttcaatgtatctttttccttcagtaaacctgatattcaaata

SEQ ID NO: 17344 - DNA, 2108 bp, Homo sapiens
gatggggaaggcggcggcggcggtggcctttggggccgaagtgggcgtgcggctcgcgctgttcgcggccttcctggtgacggagctgctccccccgttccagagactcatccagccggaggagatgtggctctaccggaacccctacgtggaggcggagtatttccccaccaagccgatgtttgttattgcatttctctctccactgtctctgatcttcctggccaaatttctcaagaaggcagacacaagagacagcagacaagcctgcctggctgccagccttgccctggctctgaatggcgtctttaccaacacaataaaactgatcgtagggaggccacgcccagatttcttctaccgctgcttccctgatgggctagcccattctgacttgatgtgtacaggggataaggacgtggtgaatgagggccgaaagagcttccccagtggacattcttcctttgcatttgctggtctggcctttgcgtccttctacctggcagggaagttacactgcttcacaccacaaggccgtgggaaatcttggaggttctgtgcctttctgtcacctctactttttgcagctgtgattgcactgtcccgcacatgtgactacaagcatcactggcaagatgtactagttggatccatgattggaatgacatttgcctatgtctgctatcggcagtattatcctcctctgactgatgcagaatgccataaaccatttcaagacaaacttgtactttccactgcacagaagcctggggattcttattgttttgatatttaaaaattgaatctggccgggcgtggtggctcatgcctgtaatcccaacactttgggaggctgaggagggtggatcacctgaggtcaggaccagcctggccaacatggtgaaccctgtctctactaaaaatacaaaaattagccaggagttgtgtgccgtaatcccagctacctgggaggctgaggtaggagaattgcttgaacctgggagctggaggttccagtgagccgagatcgcaccactgcactccagcctaggcaacagagtgagaccccatctcaaaaaaaaaaaaaaattgaatctatctcaatagagaacaggtgaactagccctcctaaccggaccatgcacaagacaagaaattctagcctttttttccccttccaaggtgcaagtgaggacataagccacactgtattctgcctccaaatgattacacacttttgcccctgctcatctatcttgaggagttacggttcttttccactactgtatgccacatgttctagtaaaaggatctttcaaaggtgtccaacaccttatgaatctggtctatcagattaatatctgaagatctacagtgtttttacatttaatttaaatgccattcttagaaggatcttgtcacaaagaagcctttacatagccccaccttgtctcagaagctagagttcattatcaaaacttaatttccatttcatatagctcaaaatcttaaaatctagggcatggccaactaaattactttgattctgtttaccttctctgatgacaattccatcaagccttaaataggaaaatgtcgaatctagggtaatttatcacttttgtgtgcatcttatctgagtccagccatctggtactgctgtgcattttgaacaccgtgggcataaacaatttgttgaattactaagtgaaaacaataataaagaagaaaatggtcaggagtgtggtttcagcactactaacagatgactgtttctacctcatttgaccataactgtacttgtgagcttctttccttccattcatgactgaagatctgctcaaatgcaccaacactgccaagtgactaaggtagaaaagaaaaatgacaggtatcgtcatctgaaggacagatgaatctttttctgccccttcttcacaatggaatataaggaacaattatgggatgtcatcagaatggatgccataggacctacagctccctttctctttattgtgattatactttaaatatgacattgtcttttatgtgtatgttcctatattttcaatgtatctttttccttcagtaaacctgatattcaaata

SEQ ID NO: 17345 - DNA, 3073 bp, Homo sapiens
gatggggaaggcggcggcggcggtggcctttggggccgaagtgggcgtgcggctcgcgctgttcgcggccttcctgtaagaaagatccacggccgggcccgggcggccccgcttcccaggcaggcgggcggcacggggcggcgggtcgggcagtggggaagcggggaggaagccaggcgacctgctctgcgcttctttgttcccctctagggtgacggagctgctccccccgttccagagactcatccagccggaggagatgtggctctaccggaacccctacgtggaggcggagtatttccccaccaagccgatgtttgtgcgtggagaaagatcgtctttcctccctccccatgacccggcttcccgcgggcacctgtgcgttttccaccccgagacggcctttgtagggacccactgcccactccgctgctgtgcgctgggttccgcctcctagggctcgagtgtttaagatcctgattgagagaggagggtgtccgagcctctttgggctgagacaacgttttcccgggcgctctgtgcctcagcctgaggtaccggggcccgagccgcacgggcgctgctgttcactggtggcgctgcctggcgcccggttacgcgcactcagagaccttatgttagctccagtgagtcctgctgtgtcacatccctctttcctgtaggagcacgagtgtggcttttttttggattgtttttaacctctgacattctgattcaggttattgcatttctctctccactgtctctgatcttcctggccaaatttctcaagaaggcagacacaagagacagcagacaagcctgcctgggtgagcgctagccctttcgggccggtttcttcgtgctgggaacctaggaggtcgttgtgggattcagccacggtgagcctgtgtggaggccactgagttctgcattcctaaaggaactctatccccgcgggagaggaaaatagcactgcagggacttggttacgcaggctacacggcaggcagccctgtgcctaaatgcactgggttatttgtacctcagaaatgtctttggcctagtacaaaagttctcggctacaaaagagtgatcactgaggaccctaattatttttgtgcccaggcctggttggattctatccatctcagaaacagcacggctgctctcataacgaggccatgaccatacctttcctcctagacagatcctttcaactaatggctttgctttgcagctgccagccttgccctggctctgaatggcgtctttaccaacacaataaaactgatcgtagggaggccacgcccagatttcttctaccgctgcttccctgatgggctagcccattctgacttgatgtgtacaggggataaggacgtggtgaatgagggccgaaagagcttccccagtggacattcttcctttgcatttgctggtctggcctttgcgtccttctacctggcagggaagttacactgcttcacaccacaaggccgtgggaaatcttggaggttctgtgcctttctgtcacctctactttttgcagctgtgattgcactgtcccgcacatgtgactacaagcatcactggcaagatgtactagttggatccatgattggaatgacatttgcctatgtctgctatcggcagtattatcctcctctgactgatgcagaatgccataaaccatttcaagacaaacttgtactttccactgcacagaagcctggggattcttattgttttgatatttaaaaattgaatctggccgggcgtggtggctcatgcctgtaatcccaacactttgggaggctgaggagggtggatcacctgaggtcaggaccagcctggccaacatggtgaaccctgtctctactaaaaatacaaaaattagccaggagttgtgtgccgtaatcccagctacctgggaggctgaggtaggagaattgcttgaacctgggagctggaggttccagtgagccgagatcgcaccactgcactccagcctaggcaacagagtgagaccccatctcaaaaaaaaaaaaaaattgaatctatctcaatagagaacaggtgaactagccctcctaaccggaccatgcacaagacaagaaattctagcctttttttccccttccaaggtgcaagtgaggacataagccacactgtattctgcctccaaatgattacacacttttgcccctgctcatctatcttgaggagttacggttcttttccactactgtatgccacatgttctagtaaaaggatctttcaaaggtgtccaacaccttatgaatctggtctatcagattaatatctgaagatctacagtgtttttacatttaatttaaatgccattcttagaaggatcttgtcacaaagaagcctttacatagccccaccttgtctcagaagctagagttcattatcaaaacttaatttccatttcatatagctcaaaatcttaaaatctagggcatggccaactaaattactttgattctgtttaccttctctgatgacaattccatcaagccttaaataggaaaatgtcgaatctagggtaatttatcacttttgtgtgcatcttatctgagtccagccatctggtactgctgtgcattttgaacaccgtgggcataaacaatttgttgaattactaagtgaaaacaataataaagaagaaaatggtcaggagtgtggtttcagcactactaacagatgactgtttctacctcatttgaccataactgtacttgtgagcttctttccttccattcatgactgaagatctgctcaaatgcaccaacactgccaagtgactaaggtagaaaagaaaaatgacaggtatcgtcatctgaaggacagatgaatctttttctgccccttcttcacaatggaatataaggaacaattatgggatgtcatcagaatggatgccataggacctacagctccctttctctttattgtgattatactttaaatatgacattgtcttttatgtgtatgttcctatattttcaatgtatctttttccttcagtaaacctgatattcaaata

SEQ ID NO: 17346 - DNA, 2054 bp, Homo sapiens
gatggggaaggcggcggcggcggtggcctttggggccgaagtgggcgtgcggctcgcgctgttcgcggccttcctggtgacggagctgctccccccgttccagagactcatccagccggaggagatgtggctctaccggaacccctacgtggaggcggagtatttccccaccaagccgatgtttgttattgcatttctctctccactgtctctgatcttcctggccaaatttctcaagaaggcagacacaagagacagcagacaagcctgcctggctgccagccttgccctggctctgaatggcgtctttaccaacacaattgggctagcccattctgacttgatgtgtacaggggataaggacgtggtgaatgagggccgaaagagcttccccagtggacattcttcctttgcatttgctggtctggcctttgcgtccttctacctggcagggaagttacactgcttcacaccacaaggccgtgggaaatcttggaggttctgtgcctttctgtcacctctactttttgcagctgtgattgcactgtcccgcacatgtgactacaagcatcactggcaagatgtactagttggatccatgattggaatgacatttgcctatgtctgctatcggcagtattatcctcctctgactgatgcagaatgccataaaccatttcaagacaaacttgtactttccactgcacagaagcctggggattcttattgttttgatatttaaaaattgaatctggccgggcgtggtggctcatgcctgtaatcccaacactttgggaggctgaggagggtggatcacctgaggtcaggaccagcctggccaacatggtgaaccctgtctctactaaaaatacaaaaattagccaggagttgtgtgccgtaatcccagctacctgggaggctgaggtaggagaattgcttgaacctgggagctggaggttccagtgagccgagatcgcaccactgcactccagcctaggcaacagagtgagaccccatctcaaaaaaaaaaaaaaattgaatctatctcaatagagaacaggtgaactagccctcctaaccggaccatgcacaagacaagaaattctagcctttttttccccttccaaggtgcaagtgaggacataagccacactgtattctgcctccaaatgattacacacttttgcccctgctcatctatcttgaggagttacggttcttttccactactgtatgccacatgttctagtaaaaggatctttcaaaggtgtccaacaccttatgaatctggtctatcagattaatatctgaagatctacagtgtttttacatttaatttaaatgccattcttagaaggatcttgtcacaaagaagcctttacatagccccaccttgtctcagaagctagagttcattatcaaaacttaatttccatttcatatagctcaaaatcttaaaatctagggcatggccaactaaattactttgattctgtttaccttctctgatgacaattccatcaagccttaaataggaaaatgtcgaatctagggtaatttatcacttttgtgtgcatcttatctgagtccagccatctggtactgctgtgcattttgaacaccgtgggcataaacaatttgttgaattactaagtgaaaacaataataaagaagaaaatggtcaggagtgtggtttcagcactactaacagatgactgtttctacctcatttgaccataactgtacttgtgagcttctttccttccattcatgactgaagatctgctcaaatgcaccaacactgccaagtgactaaggtagaaaagaaaaatgacaggtatcgtcatctgaaggacagatgaatctttttctgccccttcttcacaatggaatataaggaacaattatgggatgtcatcagaatggatgccataggacctacagctccctttctctttattgtgattatactttaaatatgacattgtcttttatgtgtatgttcctatattttcaatgtatctttttccttcagtaaacctgatattcaaata

SEQ ID NO: 17347 - DNA, 2243 bp, Homo sapiens
gatggggaaggcggcggcggcggtggcctttggggccgaagtgggcgtgcggctcgcgctgttcgcggccttcctgtaagaaagatccacggccgggcccgggcggccccgcttcccaggcaggcgggcggcacggggcggcgggtcgggcagtggggaagcggggaggaagccaggcgacctgctctgcgcttctttgttcccctctagggtgacggagctgctccccccgttccagagactcatccagccggaggagatgtggctctaccggaacccctacgtggaggcggagtatttccccaccaagccgatgtttgttattgcatttctctctccactgtctctgatcttcctggccaaatttctcaagaaggcagacacaagagacagcagacaagcctgcctggctgccagccttgccctggctctgaatggcgtctttaccaacacaataaaactgatcgtagggaggccacgcccagatttcttctaccgctgcttccctgatgggctagcccattctgacttgatgtgtacaggggataaggacgtggtgaatgagggccgaaagagcttccccagtggacattcttcctttgcatttgctggtctggcctttgcgtccttctacctggcagggaagttacactgcttcacaccacaaggccgtgggaaatcttggaggttctgtgcctttctgtcacctctactttttgcagctgtgattgcactgtcccgcacatgtgactacaagcatcactggcaagatgtactagttggatccatgattggaatgacatttgcctatgtctgctatcggcagtattatcctcctctgactgatgcagaatgccataaaccatttcaagacaaacttgtactttccactgcacagaagcctggggattcttattgttttgatatttaaaaattgaatctggccgggcgtggtggctcatgcctgtaatcccaacactttgggaggctgaggagggtggatcacctgaggtcaggaccagcctggccaacatggtgaaccctgtctctactaaaaatacaaaaattagccaggagttgtgtgccgtaatcccagctacctgggaggctgaggtaggagaattgcttgaacctgggagctggaggttccagtgagccgagatcgcaccactgcactccagcctaggcaacagagtgagaccccatctcaaaaaaaaaaaaaaattgaatctatctcaatagagaacaggtgaactagccctcctaaccggaccatgcacaagacaagaaattctagcctttttttccccttccaaggtgcaagtgaggacataagccacactgtattctgcctccaaatgattacacacttttgcccctgctcatctatcttgaggagttacggttcttttccactactgtatgccacatgttctagtaaaaggatctttcaaaggtgtccaacaccttatgaatctggtctatcagattaatatctgaagatctacagtgtttttacatttaatttaaatgccattcttagaaggatcttgtcacaaagaagcctttacatagccccaccttgtctcagaagctagagttcattatcaaaacttaatttccatttcatatagctcaaaatcttaaaatctagggcatggccaactaaattactttgattctgtttaccttctctgatgacaattccatcaagccttaaataggaaaatgtcgaatctagggtaatttatcacttttgtgtgcatcttatctgagtccagccatctggtactgctgtgcattttgaacaccgtgggcataaacaatttgttgaattactaagtgaaaacaataataaagaagaaaatggtcaggagtgtggtttcagcactactaacagatgactgtttctacctcatttgaccataactgtacttgtgagcttctttccttccattcatgactgaagatctgctcaaatgcaccaacactgccaagtgactaaggtagaaaagaaaaatgacaggtatcgtcatctgaaggacagatgaatctttttctgccccttcttcacaatggaatataaggaacaattatgggatgtcatcagaatggatgccataggacctacagctccctttctctttattgtgattatactttaaatatgacattgtcttttatgtgtatgttcctatattttcaatgtatctttttccttcagtaaacctgatattcaaata

SEQ ID NO: 17348 - DNA, 2982 bp, Homo sapiens
gatggggaaggcggcggcggcggtggcctttggggccgaagtgggcgtgcggctcgcgctgttcgcggccttcctgtaagaaagatccacggccgggcccgggcggccccgcttcccagggtgacggagctgctccccccgttccagagactcatccagccggaggagatgtggctctaccggaacccctacgtggaggcggagtatttccccaccaagccgatgtttgtgcgtggagaaagatcgtctttcctccctccccatgacccggcttcccgcgggcacctgtgcgttttccaccccgagacggcctttgtagggacccactgcccactccgctgctgtgcgctgggttccgcctcctagggctcgagtgtttaagatcctgattgagagaggagggtgtccgagcctctttgggctgagacaacgttttcccgggcgctctgtgcctcagcctgaggtaccggggcccgagccgcacgggcgctgctgttcactggtggcgctgcctggcgcccggttacgcgcactcagagaccttatgttagctccagtgagtcctgctgtgtcacatccctctttcctgtaggagcacgagtgtggcttttttttggattgtttttaacctctgacattctgattcaggttattgcatttctctctccactgtctctgatcttcctggccaaatttctcaagaaggcagacacaagagacagcagacaagcctgcctgggtgagcgctagccctttcgggccggtttcttcgtgctgggaacctaggaggtcgttgtgggattcagccacggtgagcctgtgtggaggccactgagttctgcattcctaaaggaactctatccccgcgggagaggaaaatagcactgcagggacttggttacgcaggctacacggcaggcagccctgtgcctaaatgcactgggttatttgtacctcagaaatgtctttggcctagtacaaaagttctcggctacaaaagagtgatcactgaggaccctaattatttttgtgcccaggcctggttggattctatccatctcagaaacagcacggctgctctcataacgaggccatgaccatacctttcctcctagacagatcctttcaactaatggctttgctttgcagctgccagccttgccctggctctgaatggcgtctttaccaacacaataaaactgatcgtagggaggccacgcccagatttcttctaccgctgcttccctgatgggctagcccattctgacttgatgtgtacaggggataaggacgtggtgaatgagggccgaaagagcttccccagtggacattcttcctttgcatttgctggtctggcctttgcgtccttctacctggcagggaagttacactgcttcacaccacaaggccgtgggaaatcttggaggttctgtgcctttctgtcacctctactttttgcagctgtgattgcactgtcccgcacatgtgactacaagcatcactggcaagatgtactagttggatccatgattggaatgacatttgcctatgtctgctatcggcagtattatcctcctctgactgatgcagaatgccataaaccatttcaagacaaacttgtactttccactgcacagaagcctggggattcttattgttttgatatttaaaaattgaatctggccgggcgtggtggctcatgcctgtaatcccaacactttgggaggctgaggagggtggatcacctgaggtcaggaccagcctggccaacatggtgaaccctgtctctactaaaaatacaaaaattagccaggagttgtgtgccgtaatcccagctacctgggaggctgaggtaggagaattgcttgaacctgggagctggaggttccagtgagccgagatcgcaccactgcactccagcctaggcaacagagtgagaccccatctcaaaaaaaaaaaaaaattgaatctatctcaatagagaacaggtgaactagccctcctaaccggaccatgcacaagacaagaaattctagcctttttttccccttccaaggtgcaagtgaggacataagccacactgtattctgcctccaaatgattacacacttttgcccctgctcatctatcttgaggagttacggttcttttccactactgtatgccacatgttctagtaaaaggatctttcaaaggtgtccaacaccttatgaatctggtctatcagattaatatctgaagatctacagtgtttttacatttaatttaaatgccattcttagaaggatcttgtcacaaagaagcctttacatagccccaccttgtctcagaagctagagttcattatcaaaacttaatttccatttcatatagctcaaaatcttaaaatctagggcatggccaactaaattactttgattctgtttaccttctctgatgacaattccatcaagccttaaataggaaaatgtcgaatctagggtaatttatcacttttgtgtgcatcttatctgagtccagccatctggtactgctgtgcattttgaacaccgtgggcataaacaatttgttgaattactaagtgaaaacaataataaagaagaaaatggtcaggagtgtggtttcagcactactaacagatgactgtttctacctcatttgaccataactgtacttgtgagcttctttccttccattcatgactgaagatctgctcaaatgcaccaacactgccaagtgactaaggtagaaaagaaaaatgacaggtatcgtcatctgaaggacagatgaatctttttctgccccttcttcacaatggaatataaggaacaattatgggatgtcatcagaatggatgccataggacctacagctccctttctctttattgtgattatactttaaatatgacattgtcttttatgtgtatgttcctatattttcaatgtatctttttccttcagtaaacctgatattcaaata

SEQ ID NO: 17349 - DNA, 2167 bp, Homo sapiens
gatggggaaggcggcggcggcggtggcctttggggccgaagtgggcgtgcggctcgcgctgttcgcggccttcctggtgacggagctgctccccccgttccagagactcatccagccggaggagatgtggctctaccggaacccctacgtggaggcggagtatttccccaccaagccgatgtttgtgcgtggagaaagatcgtctttcctccctccccatgacccggcttcccgcgggcacctgttattgcatttctctctccactgtctctgatcttcctggccaaatttctcaagaaggcagacacaagagacagcagacaagcctgcctggctgccagccttgccctggctctgaatggcgtctttaccaacacaataaaactgatcgtagggaggccacgcccagatttcttctaccgctgcttccctgatgggctagcccattctgacttgatgtgtacaggggataaggacgtggtgaatgagggccgaaagagcttccccagtggacattcttcctttgcatttgctggtctggcctttgcgtccttctacctggcagggaagttacactgcttcacaccacaaggccgtgggaaatcttggaggttctgtgcctttctgtcacctctactttttgcagctgtgattgcactgtcccgcacatgtgactacaagcatcactggcaagatgtactagttggatccatgattggaatgacatttgcctatgtctgctatcggcagtattatcctcctctgactgatgcagaatgccataaaccatttcaagacaaacttgtactttccactgcacagaagcctggggattcttattgttttgatatttaaaaattgaatctggccgggcgtggtggctcatgcctgtaatcccaacactttgggaggctgaggagggtggatcacctgaggtcaggaccagcctggccaacatggtgaaccctgtctctactaaaaatacaaaaattagccaggagttgtgtgccgtaatcccagctacctgggaggctgaggtaggagaattgcttgaacctgggagctggaggttccagtgagccgagatcgcaccactgcactccagcctaggcaacagagtgagaccccatctcaaaaaaaaaaaaaaattgaatctatctcaatagagaacaggtgaactagccctcctaaccggaccatgcacaagacaagaaattctagcctttttttccccttccaaggtgcaagtgaggacataagccacactgtattctgcctccaaatgattacacacttttgcccctgctcatctatcttgaggagttacggttcttttccactactgtatgccacatgttctagtaaaaggatctttcaaaggtgtccaacaccttatgaatctggtctatcagattaatatctgaagatctacagtgtttttacatttaatttaaatgccattcttagaaggatcttgtcacaaagaagcctttacatagccccaccttgtctcagaagctagagttcattatcaaaacttaatttccatttcatatagctcaaaatcttaaaatctagggcatggccaactaaattactttgattctgtttaccttctctgatgacaattccatcaagccttaaataggaaaatgtcgaatctagggtaatttatcacttttgtgtgcatcttatctgagtccagccatctggtactgctgtgcattttgaacaccgtgggcataaacaatttgttgaattactaagtgaaaacaataataaagaagaaaatggtcaggagtgtggtttcagcactactaacagatgactgtttctacctcatttgaccataactgtacttgtgagcttctttccttccattcatgactgaagatctgctcaaatgcaccaacactgccaagtgactaaggtagaaaagaaaaatgacaggtatcgtcatctgaaggacagatgaatctttttctgccccttcttcacaatggaatataaggaacaattatgggatgtcatcagaatggatgccataggacctacagctccctttctctttattgtgattatactttaaatatgacattgtcttttatgtgtatgttcctatattttcaatgtatctttttccttcagtaaacctgatattcaaata

SEQ ID NO: 17350 - DNA, 2120 bp, Homo sapiens
gatggggaaggcggcggcggcggtggcctttggggccgaagtgggcgtgcggctcgcgctgttcgcggccttcctgtaagaaagatccacggccgggcccgggcggccccgcttcccagggtgacggagctgctccccccgttccagagactcatccagccggaggagatgtggctctaccggaacccctacgtggaggcggagtatttccccaccaagccgatgtttgtgcgtggagaaagatcgtctttcctccctccccatgacccggcttcccgcgggcacctctgccagccttgccctggctctgaatggcgtctttaccaacacaataaaactgatcgtagggaggccacgcccagatttcttctaccgctgcttccctgatgggctagcccattctgacttgatgtgtacaggggataaggacgtggtgaatgagggccgaaagagcttccccagtggacattcttcctttgcatttgctggtctggcctttgcgtccttctacctggcagggaagttacactgcttcacaccacaaggccgtgggaaatcttggaggttctgtgcctttctgtcacctctactttttgcagctgtgattgcactgtcccgcacatgtgactacaagcatcactggcaagatgtactagttggatccatgattggaatgacatttgcctatgtctgctatcggcagtattatcctcctctgactgatgcagaatgccataaaccatttcaagacaaacttgtactttccactgcacagaagcctggggattcttattgttttgatatttaaaaattgaatctggccgggcgtggtggctcatgcctgtaatcccaacactttgggaggctgaggagggtggatcacctgaggtcaggaccagcctggccaacatggtgaaccctgtctctactaaaaatacaaaaattagccaggagttgtgtgccgtaatcccagctacctgggaggctgaggtaggagaattgcttgaacctgggagctggaggttccagtgagccgagatcgcaccactgcactccagcctaggcaacagagtgagaccccatctcaaaaaaaaaaaaaaattgaatctatctcaatagagaacaggtgaactagccctcctaaccggaccatgcacaagacaagaaattctagcctttttttccccttccaaggtgcaagtgaggacataagccacactgtattctgcctccaaatgattacacacttttgcccctgctcatctatcttgaggagttacggttcttttccactactgtatgccacatgttctagtaaaaggatctttcaaaggtgtccaacaccttatgaatctggtctatcagattaatatctgaagatctacagtgtttttacatttaatttaaatgccattcttagaaggatcttgtcacaaagaagcctttacatagccccaccttgtctcagaagctagagttcattatcaaaacttaatttccatttcatatagctcaaaatcttaaaatctagggcatggccaactaaattactttgattctgtttaccttctctgatgacaattccatcaagccttaaataggaaaatgtcgaatctagggtaatttatcacttttgtgtgcatcttatctgagtccagccatctggtactgctgtgcattttgaacaccgtgggcataaacaatttgttgaattactaagtgaaaacaataataaagaagaaaatggtcaggagtgtggtttcagcactactaacagatgactgtttctacctcatttgaccataactgtacttgtgagcttctttccttccattcatgactgaagatctgctcaaatgcaccaacactgccaagtgactaaggtagaaaagaaaaatgacaggtatcgtcatctgaaggacagatgaatctttttctgccccttcttcacaatggaatataaggaacaattatgggatgtcatcagaatggatgccataggacctacagctccctttctctttattgtgattatactttaaatatgacattgtcttttatgtgtatgttcctatattttcaatgtatctttttccttcagtaaacctgatattcaaata

SEQ ID NO: 17351 - DNA, 2007 bp, Homo sapiens
aacagagaggttaatggtgtccaccacacgtctttctcattcttttctcctttatcttcactctgatttttcttttgtcattcaacgcttactcccttccccatacctcagtcctccaggtgacacctgggctcttttctgcctgaacagcatttcccaccaacggccacagcagtcggtcagtgtcctcttgagcacctcctgaagctgcagtgtcatttgctgtttgccctaaaaagccacgcccagatttcttctaccgctgcttccctgatgggctagcccattctgacttgatgtgtacaggggataaggacgtggtgaatgagggccgaaagagcttccccagtggacattcttcctttgcatttgctggtctggcctttgcgtccttctacctggcagggaagttacactgcttcacaccacaaggccgtgggaaatcttggaggttctgtgcctttctgtcacctctactttttgcagctgtgattgcactgtcccgcacatgtgactacaagcatcactggcaagatgtactagttggatccatgattggaatgacatttgcctatgtctgctatcggcagtattatcctcctctgactgatgcagaatgccataaaccatttcaagacaaacttgtactttccactgcacagaagcctggggattcttattgttttgatatttaaaaattgaatctggccgggcgtggtggctcatgcctgtaatcccaacactttgggaggctgaggagggtggatcacctgaggtcaggaccagcctggccaacatggtgaaccctgtctctactaaaaatacaaaaattagccaggagttgtgtgccgtaatcccagctacctgggaggctgaggtaggagaattgcttgaacctgggagctggaggttccagtgagccgagatcgcaccactgcactccagcctaggcaacagagtgagaccccatctcaaaaaaaaaaaaaaattgaatctatctcaatagagaacaggtgaactagccctcctaaccggaccatgcacaagacaagaaattctagcctttttttccccttccaaggtgcaagtgaggacataagccacactgtattctgcctccaaatgattacacacttttgcccctgctcatctatcttgaggagttacggttcttttccactactgtatgccacatgttctagtaaaaggatctttcaaaggtgtccaacaccttatgaatctggtctatcagattaatatctgaagatctacagtgtttttacatttaatttaaatgccattcttagaaggatcttgtcacaaagaagcctttacatagccccaccttgtctcagaagctagagttcattatcaaaacttaatttccatttcatatagctcaaaatcttaaaatctagggcatggccaactaaattactttgattctgtttaccttctctgatgacaattccatcaagccttaaataggaaaatgtcgaatctagggtaatttatcacttttgtgtgcatcttatctgagtccagccatctggtactgctgtgcattttgaacaccgtgggcataaacaatttgttgaattactaagtgaaaacaataataaagaagaaaatggtcaggagtgtggtttcagcactactaacagatgactgtttctacctcatttgaccataactgtacttgtgagcttctttccttccattcatgactgaagatctgctcaaatgcaccaacactgccaagtgactaaggtagaaaagaaaaatgacaggtatcgtcatctgaaggacagatgaatctttttctgccccttcttcacaatggaatataaggaacaattatgggatgtcatcagaatggatgccataggacctacagctccctttctctttattgtgattatactttaaatatgacattgtcttttatgtgtatgttcctatattttcaatgtatctttttccttcagtaaacctgatattcaaata

SEQ ID NO: 17352 - DNA, 1885 bp, Homo sapiens
attttgcctggggcactatttgaccaatagttaacaggattattaatgtctgctacaactgaaaaataatttctggagttaatgatttacgttccaaccatgctgctttcttccaggccacgcccagatttcttctaccgctgcttccctgatgggctagcccattctgacttgatgtgtacaggggataaggacgtggtgaatgagggccgaaagagcttccccagtggacattcttcctttgcatttgctggtctggcctttgcgtccttctacctggcagggaagttacactgcttcacaccacaaggccgtgggaaatcttggaggttctgtgcctttctgtcacctctactttttgcagctgtgattgcactgtcccgcacatgtgactacaagcatcactggcaagatgtactagttggatccatgattggaatgacatttgcctatgtctgctatcggcagtattatcctcctctgactgatgcagaatgccataaaccatttcaagacaaacttgtactttccactgcacagaagcctggggattcttattgttttgatatttaaaaattgaatctggccgggcgtggtggctcatgcctgtaatcccaacactttgggaggctgaggagggtggatcacctgaggtcaggaccagcctggccaacatggtgaaccctgtctctactaaaaatacaaaaattagccaggagttgtgtgccgtaatcccagctacctgggaggctgaggtaggagaattgcttgaacctgggagctggaggttccagtgagccgagatcgcaccactgcactccagcctaggcaacagagtgagaccccatctcaaaaaaaaaaaaaaattgaatctatctcaatagagaacaggtgaactagccctcctaaccggaccatgcacaagacaagaaattctagcctttttttccccttccaaggtgcaagtgaggacataagccacactgtattctgcctccaaatgattacacacttttgcccctgctcatctatcttgaggagttacggttcttttccactactgtatgccacatgttctagtaaaaggatctttcaaaggtgtccaacaccttatgaatctggtctatcagattaatatctgaagatctacagtgtttttacatttaatttaaatgccattcttagaaggatcttgtcacaaagaagcctttacatagccccaccttgtctcagaagctagagttcattatcaaaacttaatttccatttcatatagctcaaaatcttaaaatctagggcatggccaactaaattactttgattctgtttaccttctctgatgacaattccatcaagccttaaataggaaaatgtcgaatctagggtaatttatcacttttgtgtgcatcttatctgagtccagccatctggtactgctgtgcattttgaacaccgtgggcataaacaatttgttgaattactaagtgaaaacaataataaagaagaaaatggtcaggagtgtggtttcagcactactaacagatgactgtttctacctcatttgaccataactgtacttgtgagcttctttccttccattcatgactgaagatctgctcaaatgcaccaacactgccaagtgactaaggtagaaaagaaaaatgacaggtatcgtcatctgaaggacagatgaatctttttctgccccttcttcacaatggaatataaggaacaattatgggatgtcatcagaatggatgccataggacctacagctccctttctctttattgtgattatactttaaatatgacattgtcttttatgtgtatgttcctatattttcaatgtatctttttccttcagtaaacctgatattcaaata

SEQ ID NO: 17353 - DNA, 3096 bp, Homo sapiens
gatggggaaggcggcggcggcggtggcctttggggccgaagtgggcgtgcggctcgcgctgttcgcggccttcctggtgacggagctgctccccccgttccagagactcatccagccggaggagatgtggctctaccggaacccctacgtggaggcggagtatttccccaccaagccgatgtttgtgcgtggagaaagatcgtctttcctccctccccatgacccggcttcccgcgggcacctgtgcgttttccaccccgagacggcctttgtagggacccactgcccactccgctgctgtgcgctgggttccgcctcctagggctcgagtgtttaagatcctgattgagagaggagggtgtccgagcctctttgggctgagacaacgttttcccgggcgctctgtgcctcagcctgaggtaccggggcccgagccgcacgggcgctgctgttcactggtggcgctgcctggcgcccggttacgcgcactcagagaccttatgttagctccagtgagtcctgctgtgtcacatccctctttcctgtaggagcacgagtgtggcttttttttggattgtttttaacctctgacattctgattcaggttattgcatttctctctccactgtctctgatcttcctggccaaatttctcaagaaggcagacacaagagacagcagacaagcctgcctgggtgagcgctagccctttcgggccggtttcttcgtgctgggaacctaggaggtcgttgtgggattcagccacggtgagcctgtgtggaggccactgagttctgcattcctaaaggaactctatccccgcgggagaggaaaatagcactgcagggacttggttacgcaggctacacggcaggcagccctgtgcctaaatgcactgggttatttgtacctcagaaatgtctttggcctagtacaaaagttctcggctacaaaagagtgatcactgaggaccctaattatttttgtgcccaggcctggttggattctatccatctcagaaacagcacggctgctctcataacgaggccatgaccatacctttcctcctagacagatcctttcaactaatggctttgctttgcagctgccagccttgccctggctctgaatggcgtctttaccaacacaataaaactgatcgtagggaggccacgcccagatttcttctaccgctgcttccctgatgggctagcccattctgacttgatgtgtacaggggataaggacgtggtgaatgagggccgaaagagcttccccagtggacattcttcctttgcatttgctggtctggcctttgcgtccttctacctggcagggaagttacactgcttcacaccacaaggccgtgggaaatcttggaggttctgtgcctttctgtcacctctactttttgcagctgtgattgcactgtcccgcacatgtgactacaagcatcactggcaagatgtactagttggatccatgattggaatgacatttgcctatgtctgctatcggcagtattatcctcctctgactgatgcagaatgccataaaccatttcaagacaaacttgtactttccactgcacagaagcctggggattcttattgttttgatatttaaaaattgaatctggccgggcgtggtggctcatgcctgtaatcccaacactttgggaggctgaggagggtggatcacctgaggtcaggaccagcctggccaacatggtgaaccctgtctctactaaaaatacaaaaattagccaggagttgtgtgccgtaatcccagctacctgggaggctgaggtaggagaattgcttgaacctgggagctggaggttccagtgagccgagatcgcaccactgcactccagcctaggcaacagagtgagaccccatctcaaaaaaaaaaaaaaattgaatctatctcaatagagaacaggtgaactagccctcctaaccggaccatgcacaagacaagaaattctagcctttttttccccttccaaggtgcaagtgaggacataagccacactgtattctgcctccaaatgattacacacttttgcccctgctcatctatcttgaggagttacggttcttttccactactgtatgccacatgttctagtaaaaggatctttcaaaggtgtccaacaccttatgaatctggtctatcagattaatatctgaagatctacagtgtttttacatttaatttaaatgccattcttagaaggatcttgtcacaaagaagcctttacatagccccaccttgtctcagaagctagagttcattatcaaaacttaatttccatttcatatagctcaaaatcttaaaatctagggcatggccaactaaattactttgattctgtttaccttctctgatgacaattccatcaagccttaaataggaaaatgtcgaatctagggtaatttatcacttttgtgtgcatcttatctgagtccagccatctggtactgctgtgcattttgaacaccgtgggcataaacaatttgttgaattactaagtgaaaacaataataaagaagaaaatggtcaggagtgtggtttcagcactactaacagatgactgtttctacctcatttgaccataactgtacttgtgagcttctttccttccattcatgactgaagatctgctcaaatgcaccaacactgccaagtgactaaggtagaaaagaaaaatgacaggtatcgtcatctgaaggacagatgaatctttttctgccccttcttcacaatggaatataaggaacaattatgggatgtcatcagaatggatgccataggacctacagctccctttctctttattgtgattatactttaaatatgacattgtcttttatgtgtatgttcctatattttcaatgtatctttttccttcagtaaacctgatattcaaataaaatggtaaatgtgtgcttttttaaatatttaaagtacattaaggggctggaactttagtaaagcaaaacattgaattccccatccgccctaagtgattcaactgctgttatctatagtactggctaatatttataaataccaaaggaaagtctctta

SEQ ID NO: 17354 - DNA, 1590 bp, Homo sapiens
gatggggaaggcggcggcggcggtggcctttggggccgaagtgggcgtgcggctcgcgctgttcgcggccttcctggtgacggagctgctccccccgttccagagactcatccagccggaggagatgtggctctaccggaacccctacgtggaggcggagtatttccccaccaagccgatgtttgtgcgtggagaaagatcgtctttcctccctccccatgacccggcttcccgcgggcacctgtgcgttttccaccccgagacggcctttgtagggacccactgcccactccgctgctgtgcgctgggttccgcctcctagggctcgagtgtttaagatcctgattgagagaggagggtgtccgagcctctttgggctgagacaacgttttcccgggcgctctgtgcctcagcctgaggtaccggggcccgagccgcacgggcgctgctgttcactggtggcgctgcctggcgcccggttacgcgcactcagagaccttatgttagctccagtgagtcctgctgtgtcacatccctctttcctgtaggagcacgagtgtggcttttttttggattgtttttaacctctgacattctgattcaggttattgcatttctctctccactgtctctgatcttcctggccaaatttctcaagaaggcagacacaagagacagcagacaagcctgcctgggtgagcgctagccctttcgggccggtttcttcgtgctgggaacctaggaggtcgttgtgggattcagccacggtgagcctgtgtggaggccactgagttctgcattcctaaaggaactctatccccgcgggagaggaaaatagcactgcagggacttggttacgcaggctacacggcaggcagccctgtgcctaaatgcactgggttatttgtacctcagaaatgtctttggcctagtacaaaagttctcggctacaaaagagtgatcactgaggaccctaattatttttgtgcccaggcctggttggattctatccatctcagaaacagcacggctgctctcataacgaggccatgaccatacctttcctcctagacagatcctttcaactaatggctttgctttgcagctgccagccttgccctggctctgaatggcgtctttaccaacacaataaaactgatcgtagggaggccacgcccagatttcttctaccgctgcttccctgatgggctagcccattctgacttgatgtgtacaggggataaggacgtggtgaatgagggccgaaagagcttccccagtggacattcttcctgtatgaatatcatatggactctaccctatgcttgttttcacatcattgaatttaacctagaaagctagtagggatgggaaaatctgactactcttgtttctacaatttggaaaatccccccttctttagtaactccacagtttaacaagtctgagccttgactatttgggtaaatattacagaacagaaaggtagtttaccttcatgagatttgcacatttaattgttatattatttgcctagatcctgcaatcttgtactagcaataaaaatacctttaacgaagaaaaaaaaag

SEQ ID NO: 17355 - DNA, 535 bp, Homo sapiens
ctgttgatagctgactcttgagggtaaaactagggtaatttatcacttttgtgtgcatcttatctgagtccagccatctggtactgctgtgcattttgaacaccgtgggcataaacaatttgttgaattactaagtgaaaacaataataaagaagaaaatggtcaggagtgtggtttcagcactactaacagatgactgtttctacctcatttgaccataactgtacttgtgagcttctttccttccattcatgactgaagatctgctcaaatgcaccaacactgccaagtgactaaggtagaaaagaaaaatgacaggtatcgtcatctgaaggacagatgaatctttttctgccccttcttcacaatggaatataaggaacaattatgggatgtcatcagaatggatgccataggacctacagctccctttctctttattgtgattatactttaaatatgacattgtcttttatgtgtatgttcctatattttcaatgtatctttttccttcagtaaacctgatattcaaata

SEQ ID NO: 17356 - DNA, 1261 bp, Homo sapiens
gatggggaaggcggcggcggcggtggcctttggggccgaagtgggcgtgcggctcgcgctgttcgcggccttcctggtgacggagctgctccccccgttccagagactcatccagccggaggagatgtggctctaccggaacccctacgtggaggcggagtatttccccaccaagccgatgtttgttattgcatttctctctccactgtctctgatcttcctggccaaatttctcaagaaggcagacacaagagacagcagacaagcctgcctggctgccagccttgccctggctctgaatggcgtctttaccaacacaataaaactgatcgtagggaggccacgcccagatttcttctaccgctgcttccctgatgggctagcccattctgacttgatgtgtacaggggataaggacgtggtgaatgagggccgaaagagcttccccagtggacattcttcctttgcatttgctggtctggcctttgcgtccttctacctggcagggaagttacactgcttcacaccacaaggccgtgggaaatcttggaggttctgtgcctttctgtcacctctactttttgcagctgtgattgcactgtcccgcacatgtgactacaagcatcactggcaagatgtactagttggatccatgattggaatgacatttgcctatgtctgctatcggcagtattatcctcctctgactgatgcagaatgccataaaccatttcaagacaaacttgtaactttccactgcacagaagcctggggattcttcatgttgatatttaaccaattgaatctggccgggcgtggtgggctcatgcctgtaatcacagcactttgggaaggtgaggtcaggctggtctcaatctcctgacctcgggatccatctgcctggtcctcccaaagtgctgggattacaggcgtgagtcaccgtgcccggcgagaagcaactcttaaaatactttattccttcctctaggaccctttaaatggtgaaaatgggcagatgaatagcaataagtggacctttgttactcttctgagttagaaaaattctaatttagtacactctgaacaaagcttattatacttacttaagatgtgttttgatttggtgttcagaaagcaacctgacaatgataatactgtaactatgataaaattgagaataagtagagtatcctggagggccaggtcctctatgctatgtgtatgtaataggatttaggagcctaatattaagagaagacct

SEQ ID NO: 17357 - DNA, 847 bp, Homo sapiens
gatggggaaggcggcggcggcggtggcctttggggccgaagtgggcgtgcggctcgcgctgttcgcggccttcctggtgacggagctgctccccccgttccagagactcatccagccggaggagatgtggctctaccggaacccctacgtggaggcggagtatttccccaccaagccgatgtttgttattgcatttctctctccactgtctctgatcttcctggccaaatttctcaagaaggcagacacaagagacagcagacaagcctgcctggctgccagccttgccctggctctgaatggcgtctttaccaacacaataaaactgatcgtagggaggccacgcccagatttcttctaccgctgcttccctgatgggctagcccattctgacttgatgtgtacaggggataaggacgtggtgaatgagggccgaaagagcttccccagtggacattcttcctttgcatttgctggtctggcctttgcgtccttctacctggcagggaagttacactgcttcacaccacaaggccgtgggaaatcttggaggttctgtgcctttctgtcacctctactttttgcagctgtgattgcactgtcccgcacatgtgactacaagcatcactggcaagatgtactagttggatccatgattggaatgacatttgcctatgtctgctatcggcagtattatcctcctctgactgatgcagaatgccataaaccatttcaagacaaacttgtactttccactgcacagaagcctggggattcttattattcacatgctcataaaaatgcttttacaggccaggcacggtggctcacgcctgtaatcctagca

SEQ ID NO: 17358 - DNA, 1633 bp, Homo sapiens
gatggggaaggcggcggcggcggtggcctttggggccgaagtgggcgtgcggctcgcgctgttcgcggccttcctggtgacggagctgctccccccgttccagagactcatccagccggaggagatgtggctctaccggaacccctacgtggaggcggagtatttccccaccaagccgatgtttgtgcgtggagaaagatcgtctttcctccctccccatgacccggcttcccgcgggcacctgtgcgttttccaccccgagacggcctttgtagggacccactgcccactccgctgctgtgcgctgggttccgcctcctagggctcgagtgtttaagatcctgattgagagaggagggtgtccgagcctctttgggctgagacaacgttttcccgggcgctctgtgcctcagcctgaggtaccggggcccgagccgcacgggcgctgctgttcactggtggcgctgcctggcgcccggttacgcgcactcagagaccttatgttagctccagtgagtcctgctgtgtcacatccctctttcctgtaggagcacgagtgtggcttttttttggattgtttttaacctctgacattctgattcaggttattgcatttctctctccactgtctctgatcttcctggccaaatttctcaagaaggcagacacaagagacagcagacaagcctgcctgggtgagcgctagccctttcgggccggtttcttcgtgctgggaacctaggaggtcgttgtgggattcagccacggtgagcctgtgtggaggccactgagttctgcattcctaaaggaactctatccccgcgggagaggaaaatagcactgcagggacttggttacgcaggctacacggcaggcagccctgtgcctaaatgcactgggttatttgtacctcagaaatgtctttggcctagtacaaaagttctcggctacaaaagagtgatcactgaggaccctaattatttttgtgcccaggcctggttggattctatccatctcagaaacagcacggctgctctcataacgaggccatgaccatacctttcctcctagacagatcctttcaactaatggctttgctttgcagctgccagccttgccctggctctgaatggcgtctttaccaacacaataaaactgatcgtagggaggccacgcccagatttcttctaccgctgcttccctgatgggctagcccattctgacttgatgtgtacaggggataaggacgtggtgaatgagggccgaaagagcttccccagtggacattcttcctttgcatttgctggtctggcctttgcgtccttctacctggcagggaagttacactgcttcacaccacaaggccgtgggaaatcttggaggttctgtgcctttctgtcacctctactttttgcagctgtgattgcactgtcccgcacatgtgactacaagcatcactggcaagtaattcatccgttgtatcagaaagcgatgacgtgggacattaatattgcacagaacttccatagcaaataacctaaaggaacgaatgtgctttatttataaccttacgttatccccaatgcattgtaaatgtcaaacttttggaaaataaagcctgcgtgccctccca

SEQ ID NO: 17359 - DNA, 1071 bp, Homo sapiens
tgcatatttcactcattttattcctagcacctagcacagaggagatgcttactaaatatctgctgaatgaacaaattaatgagtatggatggtctgggttctgtactaagtacatttaaaattataggaaagataagacaaaaagagtttaccaaagataaacatcctaatttttccattatttgaagcattgtaagttcaagttaaactgcatctacaggaaatttaaaacctcaaagttcaatttactctcttaaaaatcaggttcattgtcataggacttttgttcaaaaacataagtaaaattcaagaaaacataaaattataattaaaccaaacaaatttaagctgaatgctatagtaagtaaaatatccaaattacagaacacctggcttggcgcggtggctcacacctcagcactttgggaggctgaggcaggcggatcacctgtagtcaggaattcgagaccagcctggccaacatattgaaaccccgtctctactaaaaatacaaaaattgaggccaggtgcagtggctcatgcctgtaatcacagcactttgggaaggtgaggtaggtggatcacctgaggtcaggagttgaagaccagcctgaccaacagtgaaacgctatctctactaaaaatacaaaatcagctgggcatggtggcacacgcctttaatcccagctacttgggaggctgaggcaggagaatggcttgaacctgacacaattccaaaaaaaacgctggaggtattgcccacaggtcctcaggaaccctattttaaatttttaaataaactagttttttgcaaagagaagcaacttcttaaaatactttattccttcctctaggaccctttaaatggtgaaaatgggcagatgaatagcaataagtggacctttgttactcttctgagttagaaaaattctaatttagtacactctgaacaaagcttattatacttacttaagatgtgttttgatttggtgttcagaaagcaacctgacaatgataatactgtaactatgataaaattgagaataaaaagattttatttagaaaaaaaaa

SEQ ID NO: 17360 - DNA, 450 bp, Homo sapiens
taactaaagaaggtattggaaggagttttgaaagacaagaatgaacatttcaaatagctaacaggtctttctttatttcaactaacagagaaaccatttatgggaggatgtggtatttcacttcagacttctccagaggtgacactgcgtacaccaagctagctctggatcggcacactgacactacctattttcaagagccctgtgggtaggtggattagacttttacagtgtaaagtctttatatgtgatagtcttgagtggtttcttaattattttccattctgttcgaaccaagatcatatctgctcctgcagatttgtatgactttctcttcccctggaaacatgatcattttgaaataccttaactcagtttttagattctgtattaggccattcttgcattgctataaataaatacctgagactgggtaatttataaaaaaaa

SEQ ID NO: 17361 - DNA, 733 bp, Homo sapiens
attcagccctaaaacttcaaaggaatgcctatttcactatgagagatggccatagtcatgcctatcaccacatggttcatagaagtatcagtgccatttaaaatgccagagacagagtggacaacctcagaccagccacaagattacttccttaaagaatgaaaatagacagtttccttccaattctaaggatgtggtaccacagattgtcccacctacacagcaggcttcaggacttgctgaagggaggagtcatatatccggcccttccacagcccaacttcaaaagcttacttcctttagctgtccattggcaccatacagcctccaagtctctgacttgtgcttggcagcaacatgaagatcattttgagctgaaatatgctaataccgtgatgcgctttgattacgtctggcttcgagaccactgccgctcagcatcgtgctacaactctaagactcaccagcgcagcctggatactgccagtgtggatttatgtatcaagccaaagaccattcgtctggatgagaccacactctttttcacttgtgagtggacaggagacttgatcttctttgggggtactcttctgaaggacagttattttgtggaaaatggtttgttcctttcaaaaataggttattacttacttttctttttttcttgttttggaaggattttttgaaacattttatttttctcttcaaataaaattgttacaatccacagcta

SEQ ID NO: 17362 - DNA, 653 bp, Homo sapiens
tggggcggggcctacaggctctccgctgggcccgagcgggctgggggaggggagcgtggggccgacagttttgggggtgaaaaggcaaaaggcgggtgaaaggctgcctcccgagactctccttgcttggaattctgcccactctgcggagttagcagtcacgacctccagcacagggttgtcgtcacgatctgtgccagttgcgcgacagagtctgcccggagatcagcgtgaggccggatgggcctagcgctcaggaagagctggaagagctggagcaagctcgcgttgggactgacgcccagtgtacattgtttcaatctcggtcggactttacagccctggatctgtcactgacttggtgtttagctttcagcgagtccctaccctcttcctgcctcactttgttcggcagtagagtggaaggtggaactcagctgtctgcaagatcttgcagcactttctttcgttctcatatccactaatgttctctgcccagattttaccctttgtctgccccctctggagcaaggctctgggtaagtaagttaggctaggaagttttctttctcttccgaaaacaatggaaaagcctttaaatactcctgactgccctggaaacgacattcaaaccattaattgaatgtcaactc

SEQ ID NO: 17363 - DNA, 330 bp, Homo sapiens
tggggcggggcctacaggctctccgctgggcccgagcgggctgggggaggggagcgtggggccgacagttttgggggtgaaaaggcaaaaggcgggtgaaaggctgcctcccgagactctccttgcttggaattctgcccactctgcggagttagcagtcacgacctccagcacaggcaatcaatgaatgtcaactctgtgccaggatgctgatccattcactgagattggcagcacaggacagccagttcgggaggacaacaggaattcaactttaagcatactcagtctgaggcctcctcacctttccccactccctatatctaactg

SEQ ID NO: 17364 - DNA, 3982 bp, Homo sapiens
tggggcggggcctacaggctctccgctgggcccgagcgggctgggggaggggagcgtggggccgacagttttgggggtgaaaaggcaaaaggcgggtgaaaggctgcctcccgagactctccttgcttggaattctgcccactctgcggagttagcagtcacgacctccagcacaggatgtggtaccacagattgtcccacctacacagcaggcttcaggacttgctgaagggaggagtcatatatccggcccttccacagcccaacttcaaaagcttacttcctttagctgtccattggcaccatacagcctccaagtctctgacttgtgcttggcagcaacatgaagatcattttgagctgaaatatgctaataccgtgatgcgctttgattacgtctggcttcgagaccactgccgctcagcatcgtgctacaactctaagactcaccagcgcagcctggatactgccagtgtggatttatgtatcaagccaaagaccattcgtctggatgagaccacactctttttcacttggccagatggtcatgtgactaaatatgatttgaattggctggtgaaaaacagctatgaagggcagaaacaaaaagtcatccagcctagaatactatggaatgctgaaatctaccagcaagcccaagttccatcggtagattgccagagcttcttagaaaccaacgagggactgaagaagtttctgcaaaactttctgctctatggaattgcattcgtagaaaatgtccctcccactcaagagcacacagagaagttggcagaaaggatcagcttaatcagagaaaccatttatgggaggatgtggtatttcacttcagacttctccagaggtgacactgcgtacaccaagctagctctggatcggcacactgacactacctattttcaagagccctgtggcattcaagtgtttcattgtcttaaacatgaaggaactggtggcaggacactgctagtagatggattctatgcagcagaacaggtacttcaaaaggcacctgaggaatttgaactcctcagtaaagtgccattgaagcatgaatatattgaagatgttggagaatgtcacaaccacatgattgggattgggccagtcttaaatatctacccatggaataaagagctgtatttgatcaggtacaacaactatgaccgggctgtcatcaataccgttccttatgatgtcgtccatcgctggtatacagcacaccggactctaacgatagagttgaggagacctgagaatgagttttgggtcaaactaaagcctggcagggtcctatttatagacaactggcgtgtcctacatggcagggaatgcttcactggctaccgccaactgtgtggctgctatttaacaagagatgatgtattaaacactgctcgcctcttggggcttcaggcttaaaattgacagcatctggattatgaatacacctggcaccctggctaccagaatttcatatgggcagaataatattgtgtcaaactctacttcagattgtctccttatcccatcccacaaaacagaatctgtccgtttctctagtaagggagacttgttggagaggcgggactctgagttatctaatgtcagacatctagtggggcagctctcttcctcatgttataacatggatccacttgttttatttaaaccttttaatataattttggtcagtctccttcagaaatataatctccatattgataggaaagcaataattgccatgaggtaacgatttttttcccaagtagatcagttagaaagaaatgcattctagaaataacaaaaatcctgataaagcaacaatttgcaaaatgtttggtcttaggacaccttaacactcttaaaagttattgaaggccccaaggagttcttgggtgtgggttctatctattgatactaattattttaggtattaagactgagaaatatttaaagctcaagaagaacacagaagcacacatccctcagctatgagagagatgacataaccatatgtcatgtagcctctggaaaagtcctctgtatcctcatgagataacgagagggggaaaaaaagctactactgcctttgtaacttccacttagcctactacagggctatgcacatcttagtttccaaaagtctgcttaatttcaaaagaaaaatgcctaattgaatgtaactcatcttggtgttattatacaaaataatttttaatctgcagacccacgaaaagggtctcagggactcctccaggggtcttcagaccatactttgagaacccatgggctagcgactaccttgagacagtcctttacctaggcctgtggattaaagggtttagctgaaaccctagattcttctctgtagtctaatagaactccaaacattgtaagaattgcttggtagcataagctcagggataaggtgggaattgagttcaaatatagtgttttatcttccacacaaatcatctctataggagttaaattaggaagtcacaacagcgcctgttgaacaaactcatcagtgtggtaatcctatgagggataattgcagaaaggttttagagacttgtgaggttccatatgataattctttacacctcccccccccaagagaaagtacacagggctattctgtaatattgttcagggaaatcagcatgatagatgctgtgcctccagagagttctctggagattactacccaaatgtgtattttggcaatttggtggtatttaggatgtaatatgttttcctccatttctgctaattttctctctctctctctcataacatactatacatgctaattgccaagatttgaatgagtcaaatttagtagcttgctgcttttattttttaaatggcttcttttacgtattggcgggggcggggggggggaggggggcagggtatgaggcttcttttccctcagctttcattgaaagtgaagctgtacaataaccacattgaccactgtagaatgatgaaagagaatataggctaggatgcacacaagaggggggaaaaggcattattagtgaagataggagttacaaagcaaagcaaagtcagtattcagatagagaatagagcctaatctgatgtttgcagggagttcctagatcacatttggcaatttacacattattttattgacctatccagtgctccaaaatgtgttccaaaatattttggcattttatttgtactatataggaatctttaggggagtccctgaaatttgttttcctcttaggtcaaaggactgataattaactttggttcttaaggagtatgccctttagcaataagaacagcaataacattttaccctgcagttttttctctatacctactattatgcactcctaaaatatgtcatcattagtcttcatgaggatgtttaccatttctgaagttttgcgtaaattagccttgaagattacactataactgaggtcatcagcattgacttatggccagcaaaggacatgctcatggccctggagagatgaggacacaaaacaaatcaatttccccacttactgaaggactccccttaccttctgtctctcctgagaccttgactcattaattattttactctcctttttggaaatttgcaaccggtccttctcaacaatgtgctccctttagtacactgaagaaaaagagaagggaattatttgagtcctgatcacgatgcattgaaaacttcctatgtgagatgtttctgtttttatatctcttccaggtgtccctgagtatataagcatgggtctatgtctaccaagctcactgtagagtcacttttaccttttgctatggtggaatgggatctgtagggtcaggaacacagcacctaacacagtgccttatggatagtagttttataatacagatgtgttggaagaataaatgaatgggtccttttcaaacaaattcacca

SEQ ID NO: 17365 - DNA, 4187 bp, Homo sapiens
tggggcggggcctacaggctctccgctgggcccgagcgggctgggggaggggagcgtggggccgacagttttgggggtgaaaaggcaaaaggcgggtgaaaggctgcctcccgagactctccttgcttggaattctgcccactctgcggagttagcagtcacgacctccagcacaggatgtggtaccacagattgtcccacctacacagcaggcttcaggacttgctgaagggaggagtcatatatccggcccttccacagcccaacttcaaaagcttacttcctttagctgtccattggcaccatacagcctccaagtctctgacttgtgcttggcagcaacatgaagatcattttgagctgaaatatgctaataccgtgatgcgctttgattacgtctggcttcgagaccactgccgctcagcatcgtgctacaactctaagactcaccagcgcagcctggatactgccagtgtggatttatgtatcaagccaaagaccattcgtctggatgagaccacactctttttcacttggccagatggtcatgtgactaaatatgatttgaattggctggtgaaaaacagctatgaagggcagaaacaaaaagtcatccagcctagaatactatggaatgctgaaatctaccagcaagcccaagttccatcggtagattgccagagcttcttagaaaccaacgagggactgaagaagtttctgcaaaactttctgctctatggaattgcattcgtagaaaatgtccctcccactcaagagcacacagagaagttggcagaaaggatcagcttaatcagagaaaccatttatgggaggatgtggtatttcacttcagacttctccagaggtgacactgcgtacaccaagctagctctggatcggcacactgacactacctattttcaagagccctgtggcattcaagtgtttcattgtcttaaacatgaaggaactggtggcaggacactgctagtagatggattctatgcagcagaacaggtacttcaaaaggcacctgaggaatttgaactcctcagtaaagtgccattgaagcatgaatatattgaagatgttggagaatgtcacaaccacatgattgggattgggccagtcttaaatatctacccatggaataaagagctgtatttgatcagattattcaaagaaaaacaaaacacggtcaacaggcagtggaactcctcactccaatgtgatattcctgagagaatattgacttatcgtcacttcgtctctgggacaagtattgaacataggggaagccttatataaaattgttcaataaacaaaagatgtctttaacatgtgtttgagatctttcttctcatgattccatgttaggtacaacaactatgaccgggctgtcatcaataccgttccttatgatgtcgtccatcgctggtatacagcacaccggactctaacgatagagttgaggagacctgagaatgagttttgggtcaaactaaagcctggcagggtcctatttatagacaactggcgtgtcctacatggcagggaatgcttcactggctaccgccaactgtgtggctgctatttaacaagagatgatgtattaaacactgctcgcctcttggggcttcaggcttaaaattgacagcatctggattatgaatacacctggcaccctggctaccagaatttcatatgggcagaataatattgtgtcaaactctacttcagattgtctccttatcccatcccacaaaacagaatctgtccgtttctctagtaagggagacttgttggagaggcgggactctgagttatctaatgtcagacatctagtggggcagctctcttcctcatgttataacatggatccacttgttttatttaaaccttttaatataattttggtcagtctccttcagaaatataatctccatattgataggaaagcaataattgccatgaggtaacgatttttttcccaagtagatcagttagaaagaaatgcattctagaaataacaaaaatcctgataaagcaacaatttgcaaaatgtttggtcttaggacaccttaacactcttaaaagttattgaaggccccaaggagttcttgggtgtgggttctatctattgatactaattattttaggtattaagactgagaaatatttaaagctcaagaagaacacagaagcacacatccctcagctatgagagagatgacataaccatatgtcatgtagcctctggaaaagtcctctgtatcctcatgagataacgagagggggaaaaaaagctactactgcctttgtaacttccacttagcctactacagggctatgcacatcttagtttccaaaagtctgcttaatttcaaaagaaaaatgcctaattgaatgtaactcatcttggtgttattatacaaaataatttttaatctgcagacccacgaaaagggtctcagggactcctccaggggtcttcagaccatactttgagaacccatgggctagcgactaccttgagacagtcctttacctaggcctgtggattaaagggtttagctgaaaccctagattcttctctgtagtctaatagaactccaaacattgtaagaattgcttggtagcataagctcagggataaggtgggaattgagttcaaatatagtgttttatcttccacacaaatcatctctataggagttaaattaggaagtcacaacagcgcctgttgaacaaactcatcagtgtggtaatcctatgagggataattgcagaaaggttttagagacttgtgaggttccatatgataattctttacacctcccccccccaagagaaagtacacagggctattctgtaatattgttcagggaaatcagcatgatagatgctgtgcctccagagagttctctggagattactacccaaatgtgtattttggcaatttggtggtatttaggatgtaatatgttttcctccatttctgctaattttctctctctctctctcataacatactatacatgctaattgccaagatttgaatgagtcaaatttagtagcttgctgcttttattttttaaatggcttcttttacgtattggcgggggcggggggggggaggggggcagggtatgaggcttcttttccctcagctttcattgaaagtgaagctgtacaataaccacattgaccactgtagaatgatgaaagagaatataggctaggatgcacacaagaggggggaaaaggcattattagtgaagataggagttacaaagcaaagcaaagtcagtattcagatagagaatagagcctaatctgatgtttgcagggagttcctagatcacatttggcaatttacacattattttattgacctatccagtgctccaaaatgtgttccaaaatattttggcattttatttgtactatataggaatctttaggggagtccctgaaatttgttttcctcttaggtcaaaggactgataattaactttggttcttaaggagtatgccctttagcaataagaacagcaataacattttaccctgcagttttttctctatacctactattatgcactcctaaaatatgtcatcattagtcttcatgaggatgtttaccatttctgaagttttgcgtaaattagccttgaagattacactataactgaggtcatcagcattgacttatggccagcaaaggacatgctcatggccctggagagatgaggacacaaaacaaatcaatttccccacttactgaaggactccccttaccttctgtctctcctgagaccttgactcattaattattttactctcctttttggaaatttgcaaccggtccttctcaacaatgtgctccctttagtacactgaagaaaaagagaagggaattatttgagtcctgatcacgatgcattgaaaacttcctatgtgagatgtttctgtttttatatctcttccaggtgtccctgagtatataagcatgggtctatgtctaccaagctcactgtagagtcacttttaccttttgctatggtggaatgggatctgtagggtcaggaacacagcacctaacacagtgccttatggatagtagttttataatacagatgtgttggaagaataaatgaatgggtccttttcaaacaaattcacca

SEQ ID NO: 17366 - DNA, 4057 bp, Homo sapiens
tggggcggggcctacaggctctccgctgggcccgagcgggctgggggaggggagcgtggggccgacagttttgggggtgaaaaggcaaaaggcgggtgaaaggctgcctcccgagactctccttgcttggaattctgcccactctgcggagttagcagtcacgacctccagcacaggatgtggtaccacagattgtcccacctacacagcaggcttcaggacttgctgaagggaggagtcatatatccggcccttccacagcccaacttcaaaagcttacttcctttagctgtccattggcaccatacagcctccaagtctctgacttgtgcttggcagcaacatgaagatcattttgagctgaaatatgctaataccgtgatgcgctttgattacgtctggcttcgagaccactgccgctcagcatcgtgctacaactctaagactcaccagcgcagcctggatactgccagtgtggatttatgtatcaagccaaagaccattcgtctggatgagaccacactctttttcacttggccagatggtcatgtgactaaatatgatttgaattggctggtgaaaaacagctatgaagggcagaaacaaaaagtcatccagcctagaatactatggaatgctgaaatctaccagcaagcccaagttccatcggtagattgccagagcttcttagaaaccaacgagggactgaagaagtttctgcaaaactttctgctctatggaattgcattcgtagaaaatgtccctcccactcaagagcacacagagaagttggcagaaaggatcagcttaatcagagaaaccatttatgggaggatgtggtatttcacttcagacttctccagaggtgacactgcgtacaccaagctagctctggatcggcacactgacactacctattttcaagagccctgtggcattcaagtgtttcattgtcttaaacatgaaggaactggtggcaggacactgctagtagatggattctatgcagcagaacaggtacttcaaaaggcacctgaggaatttgaactcctcagtaaagtgccattgaagcatgaatatattgaagatgttggagaatgtcacaaccacatgattgggattgggccagtcttaaatatctacccatggaataaagagctgtatttgatcaggtacaacaactatgaccgggctgtcatcaataccgttccttatgatgtcgtccatcgctggtatacagcacaccggactctaacgatagagttgaggagacctgagaatgagttttgggtcaaactaaagcctggcagggtgggtcctaatctctaaagatgtcaagcaagcttgtaatactgaagcagtgaagaacgggtacttacttaatatgtcctatttatagacaactggcgtgtcctacatggcagggaatgcttcactggctaccgccaactgtgtggctgctatttaacaagagatgatgtattaaacactgctcgcctcttggggcttcaggcttaaaattgacagcatctggattatgaatacacctggcaccctggctaccagaatttcatatgggcagaataatattgtgtcaaactctacttcagattgtctccttatcccatcccacaaaacagaatctgtccgtttctctagtaagggagacttgttggagaggcgggactctgagttatctaatgtcagacatctagtggggcagctctcttcctcatgttataacatggatccacttgttttatttaaaccttttaatataattttggtcagtctccttcagaaatataatctccatattgataggaaagcaataattgccatgaggtaacgatttttttcccaagtagatcagttagaaagaaatgcattctagaaataacaaaaatcctgataaagcaacaatttgcaaaatgtttggtcttaggacaccttaacactcttaaaagttattgaaggccccaaggagttcttgggtgtgggttctatctattgatactaattattttaggtattaagactgagaaatatttaaagctcaagaagaacacagaagcacacatccctcagctatgagagagatgacataaccatatgtcatgtagcctctggaaaagtcctctgtatcctcatgagataacgagagggggaaaaaaagctactactgcctttgtaacttccacttagcctactacagggctatgcacatcttagtttccaaaagtctgcttaatttcaaaagaaaaatgcctaattgaatgtaactcatcttggtgttattatacaaaataatttttaatctgcagacccacgaaaagggtctcagggactcctccaggggtcttcagaccatactttgagaacccatgggctagcgactaccttgagacagtcctttacctaggcctgtggattaaagggtttagctgaaaccctagattcttctctgtagtctaatagaactccaaacattgtaagaattgcttggtagcataagctcagggataaggtgggaattgagttcaaatatagtgttttatcttccacacaaatcatctctataggagttaaattaggaagtcacaacagcgcctgttgaacaaactcatcagtgtggtaatcctatgagggataattgcagaaaggttttagagacttgtgaggttccatatgataattctttacacctcccccccccaagagaaagtacacagggctattctgtaatattgttcagggaaatcagcatgatagatgctgtgcctccagagagttctctggagattactacccaaatgtgtattttggcaatttggtggtatttaggatgtaatatgttttcctccatttctgctaattttctctctctctctctcataacatactatacatgctaattgccaagatttgaatgagtcaaatttagtagcttgctgcttttattttttaaatggcttcttttacgtattggcgggggcggggggggggaggggggcagggtatgaggcttcttttccctcagctttcattgaaagtgaagctgtacaataaccacattgaccactgtagaatgatgaaagagaatataggctaggatgcacacaagaggggggaaaaggcattattagtgaagataggagttacaaagcaaagcaaagtcagtattcagatagagaatagagcctaatctgatgtttgcagggagttcctagatcacatttggcaatttacacattattttattgacctatccagtgctccaaaatgtgttccaaaatattttggcattttatttgtactatataggaatctttaggggagtccctgaaatttgttttcctcttaggtcaaaggactgataattaactttggttcttaaggagtatgccctttagcaataagaacagcaataacattttaccctgcagttttttctctatacctactattatgcactcctaaaatatgtcatcattagtcttcatgaggatgtttaccatttctgaagttttgcgtaaattagccttgaagattacactataactgaggtcatcagcattgacttatggccagcaaaggacatgctcatggccctggagagatgaggacacaaaacaaatcaatttccccacttactgaaggactccccttaccttctgtctctcctgagaccttgactcattaattattttactctcctttttggaaatttgcaaccggtccttctcaacaatgtgctccctttagtacactgaagaaaaagagaagggaattatttgagtcctgatcacgatgcattgaaaacttcctatgtgagatgtttctgtttttatatctcttccaggtgtccctgagtatataagcatgggtctatgtctaccaagctcactgtagagtcacttttaccttttgctatggtggaatgggatctgtagggtcaggaacacagcacctaacacagtgccttatggatagtagttttataatacagatgtgttggaagaataaatgaatgggtccttttcaaacaaattcacca

SEQ ID NO: 17367 - DNA, 3800 bp, Homo sapiens
tggggcggggcctacaggctctccgctgggcccgagcgggctgggggaggggagcgtggggccgacagttttgggggtgaaaaggcaaaaggcgggtgaaaggctgcctcccgagactctccttgcttggaattctgcccactctgcggagttagcagtcacgacctccagcacagagctgaaatatgctaataccgtgatgcgctttgattacgtctggcttcgagaccactgccgctcagcatcgtgctacaactctaagactcaccagcgcagcctggatactgccagtgtggatttatgtatcaagccaaagaccattcgtctggatgagaccacactctttttcacttggccagatggtcatgtgactaaatatgatttgaattggctggtgaaaaacagctatgaagggcagaaacaaaaagtcatccagcctagaatactatggaatgctgaaatctaccagcaagcccaagttccatcggtagattgccagagcttcttagaaaccaacgagggactgaagaagtttctgcaaaactttctgctctatggaattgcattcgtagaaaatgtccctcccactcaagagcacacagagaagttggcagaaaggatcagcttaatcagagaaaccatttatgggaggatgtggtatttcacttcagacttctccagaggtgacactgcgtacaccaagctagctctggatcggcacactgacactacctattttcaagagccctgtggcattcaagtgtttcattgtcttaaacatgaaggaactggtggcaggacactgctagtagatggattctatgcagcagaacaggtacttcaaaaggcacctgaggaatttgaactcctcagtaaagtgccattgaagcatgaatatattgaagatgttggagaatgtcacaaccacatgattgggattgggccagtcttaaatatctacccatggaataaagagctgtatttgatcaggtacaacaactatgaccgggctgtcatcaataccgttccttatgatgtcgtccatcgctggtatacagcacaccggactctaacgatagagttgaggagacctgagaatgagttttgggtcaaactaaagcctggcagggtcctatttatagacaactggcgtgtcctacatggcagggaatgcttcactggctaccgccaactgtgtggctgctatttaacaagagatgatgtattaaacactgctcgcctcttggggcttcaggcttaaaattgacagcatctggattatgaatacacctggcaccctggctaccagaatttcatatgggcagaataatattgtgtcaaactctacttcagattgtctccttatcccatcccacaaaacagaatctgtccgtttctctagtaagggagacttgttggagaggcgggactctgagttatctaatgtcagacatctagtggggcagctctcttcctcatgttataacatggatccacttgttttatttaaaccttttaatataattttggtcagtctccttcagaaatataatctccatattgataggaaagcaataattgccatgaggtaacgatttttttcccaagtagatcagttagaaagaaatgcattctagaaataacaaaaatcctgataaagcaacaatttgcaaaatgtttggtcttaggacaccttaacactcttaaaagttattgaaggccccaaggagttcttgggtgtgggttctatctattgatactaattattttaggtattaagactgagaaatatttaaagctcaagaagaacacagaagcacacatccctcagctatgagagagatgacataaccatatgtcatgtagcctctggaaaagtcctctgtatcctcatgagataacgagagggggaaaaaaagctactactgcctttgtaacttccacttagcctactacagggctatgcacatcttagtttccaaaagtctgcttaatttcaaaagaaaaatgcctaattgaatgtaactcatcttggtgttattatacaaaataatttttaatctgcagacccacgaaaagggtctcagggactcctccaggggtcttcagaccatactttgagaacccatgggctagcgactaccttgagacagtcctttacctaggcctgtggattaaagggtttagctgaaaccctagattcttctctgtagtctaatagaactccaaacattgtaagaattgcttggtagcataagctcagggataaggtgggaattgagttcaaatatagtgttttatcttccacacaaatcatctctataggagttaaattaggaagtcacaacagcgcctgttgaacaaactcatcagtgtggtaatcctatgagggataattgcagaaaggttttagagacttgtgaggttccatatgataattctttacacctcccccccccaagagaaagtacacagggctattctgtaatattgttcagggaaatcagcatgatagatgctgtgcctccagagagttctctggagattactacccaaatgtgtattttggcaatttggtggtatttaggatgtaatatgttttcctccatttctgctaattttctctctctctctctcataacatactatacatgctaattgccaagatttgaatgagtcaaatttagtagcttgctgcttttattttttaaatggcttcttttacgtattggcgggggcggggggggggaggggggcagggtatgaggcttcttttccctcagctttcattgaaagtgaagctgtacaataaccacattgaccactgtagaatgatgaaagagaatataggctaggatgcacacaagaggggggaaaaggcattattagtgaagataggagttacaaagcaaagcaaagtcagtattcagatagagaatagagcctaatctgatgtttgcagggagttcctagatcacatttggcaatttacacattattttattgacctatccagtgctccaaaatgtgttccaaaatattttggcattttatttgtactatataggaatctttaggggagtccctgaaatttgttttcctcttaggtcaaaggactgataattaactttggttcttaaggagtatgccctttagcaataagaacagcaataacattttaccctgcagttttttctctatacctactattatgcactcctaaaatatgtcatcattagtcttcatgaggatgtttaccatttctgaagttttgcgtaaattagccttgaagattacactataactgaggtcatcagcattgacttatggccagcaaaggacatgctcatggccctggagagatgaggacacaaaacaaatcaatttccccacttactgaaggactccccttaccttctgtctctcctgagaccttgactcattaattattttactctcctttttggaaatttgcaaccggtccttctcaacaatgtgctccctttagtacactgaagaaaaagagaagggaattatttgagtcctgatcacgatgcattgaaaacttcctatgtgagatgtttctgtttttatatctcttccaggtgtccctgagtatataagcatgggtctatgtctaccaagctcactgtagagtcacttttaccttttgctatggtggaatgggatctgtagggtcaggaacacagcacctaacacagtgccttatggatagtagttttataatacagatgtgttggaagaataaatgaatgggtccttttcaaacaaattcacca

SEQ ID NO: 17368 - DNA, 3996 bp, Homo sapiens
attcagccctaaaacttcaaaggaatgcctatttcactatgagagatggccatagtcatgcctatcaccacatggttcatagaagtatcagtgccatttaaaatgccagagacagagtggacaacctcagaccagccacaagattacttccttaaagaatgaaaatagacagtttccttccaattctaaggatgtggtaccacagattgtcccacctacacagcaggcttcaggacttgctgaagggaggagtcatatatccggcccttccacagcccaacttcaaaagcttacttcctttagctgtccattggcaccatacagcctccaagtctctgacttgtgcttggcagcaacatgaagatcattttgagctgaaatatgctaataccgtgatgcgctttgattacgtctggcttcgagaccactgccgctcagcatcgtgctacaactctaagactcaccagcgcagcctggatactgccagtgtggatttatgtatcaagccaaagaccattcgtctggatgagaccacactctttttcacttggccagatggtcatgtgactaaatatgatttgaattggctggtgaaaaacagctatgaagggcagaaacaaaaagtcatccagcctagaatactatggaatgctgaaatctaccagcaagcccaagttccatcggtagattgccagagcttcttagaaaccaacgagggactgaagaagtttctgcaaaactttctgctctatggaattgcattcgtagaaaatgtccctcccactcaagagcacacagagaagttggcagaaaggatcagcttaatcagagaaaccatttatgggaggatgtggtatttcacttcagacttctccagaggtgacactgcgtacaccaagctagctctggatcggcacactgacactacctattttcaagagccctgtggcattcaagtgtttcattgtcttaaacatgaaggaactggtggcaggacactgctagtagatggattctatgcagcagaacaggtacttcaaaaggcacctgaggaatttgaactcctcagtaaagtgccattgaagcatgaatatattgaagatgttggagaatgtcacaaccacatgattgggattgggccagtcttaaatatctacccatggaataaagagctgtatttgatcaggtacaacaactatgaccgggctgtcatcaataccgttccttatgatgtcgtccatcgctggtatacagcacaccggactctaacgatagagttgaggagacctgagaatgagttttgggtcaaactaaagcctggcagggtcctatttatagacaactggcgtgtcctacatggcagggaatgcttcactggctaccgccaactgtgtggctgctatttaacaagagatgatgtattaaacactgctcgcctcttggggcttcaggcttaaaattgacagcatctggattatgaatacacctggcaccctggctaccagaatttcatatgggcagaataatattgtgtcaaactctacttcagattgtctccttatcccatcccacaaaacagaatctgtccgtttctctagtaagggagacttgttggagaggcgggactctgagttatctaatgtcagacatctagtggggcagctctcttcctcatgttataacatggatccacttgttttatttaaaccttttaatataattttggtcagtctccttcagaaatataatctccatattgataggaaagcaataattgccatgaggtaacgatttttttcccaagtagatcagttagaaagaaatgcattctagaaataacaaaaatcctgataaagcaacaatttgcaaaatgtttggtcttaggacaccttaacactcttaaaagttattgaaggccccaaggagttcttgggtgtgggttctatctattgatactaattattttaggtattaagactgagaaatatttaaagctcaagaagaacacagaagcacacatccctcagctatgagagagatgacataaccatatgtcatgtagcctctggaaaagtcctctgtatcctcatgagataacgagagggggaaaaaaagctactactgcctttgtaacttccacttagcctactacagggctatgcacatcttagtttccaaaagtctgcttaatttcaaaagaaaaatgcctaattgaatgtaactcatcttggtgttattatacaaaataatttttaatctgcagacccacgaaaagggtctcagggactcctccaggggtcttcagaccatactttgagaacccatgggctagcgactaccttgagacagtcctttacctaggcctgtggattaaagggtttagctgaaaccctagattcttctctgtagtctaatagaactccaaacattgtaagaattgcttggtagcataagctcagggataaggtgggaattgagttcaaatatagtgttttatcttccacacaaatcatctctataggagttaaattaggaagtcacaacagcgcctgttgaacaaactcatcagtgtggtaatcctatgagggataattgcagaaaggttttagagacttgtgaggttccatatgataattctttacacctcccccccccaagagaaagtacacagggctattctgtaatattgttcagggaaatcagcatgatagatgctgtgcctccagagagttctctggagattactacccaaatgtgtattttggcaatttggtggtatttaggatgtaatatgttttcctccatttctgctaattttctctctctctctctcataacatactatacatgctaattgccaagatttgaatgagtcaaatttagtagcttgctgcttttattttttaaatggcttcttttacgtattggcgggggcggggggggggaggggggcagggtatgaggcttcttttccctcagctttcattgaaagtgaagctgtacaataaccacattgaccactgtagaatgatgaaagagaatataggctaggatgcacacaagaggggggaaaaggcattattagtgaagataggagttacaaagcaaagcaaagtcagtattcagatagagaatagagcctaatctgatgtttgcagggagttcctagatcacatttggcaatttacacattattttattgacctatccagtgctccaaaatgtgttccaaaatattttggcattttatttgtactatataggaatctttaggggagtccctgaaatttgttttcctcttaggtcaaaggactgataattaactttggttcttaaggagtatgccctttagcaataagaacagcaataacattttaccctgcagttttttctctatacctactattatgcactcctaaaatatgtcatcattagtcttcatgaggatgtttaccatttctgaagttttgcgtaaattagccttgaagattacactataactgaggtcatcagcattgacttatggccagcaaaggacatgctcatggccctggagagatgaggacacaaaacaaatcaatttccccacttactgaaggactccccttaccttctgtctctcctgagaccttgactcattaattattttactctcctttttggaaatttgcaaccggtccttctcaacaatgtgctccctttagtacactgaagaaaaagagaagggaattatttgagtcctgatcacgatgcattgaaaacttcctatgtgagatgtttctgtttttatatctcttccaggtgtccctgagtatataagcatgggtctatgtctaccaagctcactgtagagtcacttttaccttttgctatggtggaatgggatctgtagggtcaggaacacagcacctaacacagtgccttatggatagtagttttataatacagatgtgttggaagaataaatgaatgggtccttttcaaacaaattcacca

SEQ ID NO: 17369 - DNA, 1492 bp, Homo sapiens
tggggcggggcctacaggctctccgctgggcccgagcgggctgggggaggggagcgtggggccgacagttttgggggtgaaaaggcaaaaggcgggtgaaaggctgcctcccgagactctccttgcttggaattctgcccactctgcggagttagcagtcacgacctccagcacaggatgtggtaccacagattgtcccacctacacagcaggcttcaggacttgctgaagggaggagtcatatatccggcccttccacagcccaacttcaaaagcttacttcctttagctgtccattggcaccatacagcctccaagtctctgacttgtgcttggcagcaacatgaagatcattttgagctgaaatatgctaataccgtgatgcgctttgattacgtctggcttcgagaccactgccgctcagcatcgtgctacaactctaagactcaccagcgcagcctggatactgccagtgtggatttatgtatcaagccaaagaccattcgtctggatgagaccacactctttttcacttggccagatggtcatgtgactaaatatgatttgaattggctggtgaaaaacagctatgaagggcagaaacaaaaagtcatccagcctagaatactatggaatgctgaaatctaccagcaagcccaagttccatcggtagattgccagagcttcttagaaaccaacgagggactgaagaagtttctgcaaaactttctgctctatggaattgcattcgtagaaaatgtccctcccactcaagagcacacagagaagttggcagaaaggatcagcttaatcagagaaaccatttatgggaggatgtggtatttcacttcagacttctccagaggtgacactgcgtacaccaagctagctctggatcggcacactgacactacctattttcaagagccctgtggcattcaagtgtttcattgtcttaaacatgaaggaactggtggcaggacactgctagtagatggattctatgcagcagaacaggtacttcaaaaggcacctgaggaatttgaactcctcagtaaagtgccattgaagcatgaatatattgaagatgttggagaatgtcacaaccacatgattgggattgggccagtcttaaatatctacccatggaataaagagctgtatttgatcaggtacaacaactatgaccgggctgtcatcaataccgttccttatgatgtcgtccatcgctggtatacagcacaccggactctaacgatagagttgaggagacctgagaatgagttttgggtcaaactaaagcctggcagggtcctatttatagacaactggcgtgtcctacatggcagggaatgcttcactggctaccgccaactgtgtggctgctatttaacaagagatgatgtattaaacactgctcgcctcttggggcttcaggcttaaaattgacagcatctggattatgaatacacctggcaccctggctaccaga

SEQ ID NO: 17370 - DNA, 3658 bp, Homo sapiens
gaggtgactctagaggaccccgaagatcattttgagctgaaatatgctaataccgtgatgcgctttgattacgtctggcttcgagaccactgccgctcagcatcgtgctacaactctaagactcaccagcgcagcctggatactgccagtgtggatttatgtatcaagccaaagaccattcgtctggatgagaccacactctttttcacttggccagatggtcatgtgactaaatatgatttgaattggctggtgaaaaacagctatgaagggcagaaacaaaaagtcatccagcctagaatactatggaatgctgaaatctaccagcaagcccaagttccatcggtagattgccagagcttcttagaaaccaacgagggactgaagaagtttctgcaaaactttctgctctatggaattgcattcgtagaaaatgtccctcccactcaagagcacacagagaagttggcagaaaggatcagcttaatcagagaaaccatttatgggaggatgtggtatttcacttcagacttctccagaggtgacactgcgtacaccaagctagctctggatcggcacactgacactacctattttcaagagccctgtggcattcaagtgtttcattgtcttaaacatgaaggaactggtggcaggacactgctagtagatggattctatgcagcagaacaggtacttcaaaaggcacctgaggaatttgaactcctcagtaaagtgccattgaagcatgaatatattgaagatgttggagaatgtcacaaccacatgattgggattgggccagtcttaaatatctacccatggaataaagagctgtatttgatcaggtacaacaactatgaccgggctgtcatcaataccgttccttatgatgtcgtccatcgctggtatacagcacaccggactctaacgatagagttgaggagacctgagaatgagttttgggtcaaactaaagcctggcagggtcctatttatagacaactggcgtgtcctacatggcagggaatgcttcactggctaccgccaactgtgtggctgctatttaacaagagatgatgtattaaacactgctcgcctcttggggcttcaggcttaaaattgacagcatctggattatgaatacacctggcaccctggctaccagaatttcatatgggcagaataatattgtgtcaaactctacttcagattgtctccttatcccatcccacaaaacagaatctgtccgtttctctagtaagggagacttgttggagaggcgggactctgagttatctaatgtcagacatctagtggggcagctctcttcctcatgttataacatggatccacttgttttatttaaaccttttaatataattttggtcagtctccttcagaaatataatctccatattgataggaaagcaataattgccatgaggtaacgatttttttcccaagtagatcagttagaaagaaatgcattctagaaataacaaaaatcctgataaagcaacaatttgcaaaatgtttggtcttaggacaccttaacactcttaaaagttattgaaggccccaaggagttcttgggtgtgggttctatctattgatactaattattttaggtattaagactgagaaatatttaaagctcaagaagaacacagaagcacacatccctcagctatgagagagatgacataaccatatgtcatgtagcctctggaaaagtcctctgtatcctcatgagataacgagagggggaaaaaaagctactactgcctttgtaacttccacttagcctactacagggctatgcacatcttagtttccaaaagtctgcttaatttcaaaagaaaaatgcctaattgaatgtaactcatcttggtgttattatacaaaataatttttaatctgcagacccacgaaaagggtctcagggactcctccaggggtcttcagaccatactttgagaacccatgggctagcgactaccttgagacagtcctttacctaggcctgtggattaaagggtttagctgaaaccctagattcttctctgtagtctaatagaactccaaacattgtaagaattgcttggtagcataagctcagggataaggtgggaattgagttcaaatatagtgttttatcttccacacaaatcatctctataggagttaaattaggaagtcacaacagcgcctgttgaacaaactcatcagtgtggtaatcctatgagggataattgcagaaaggttttagagacttgtgaggttccatatgataattctttacacctcccccccccaagagaaagtacacagggctattctgtaatattgttcagggaaatcagcatgatagatgctgtgcctccagagagttctctggagattactacccaaatgtgtattttggcaatttggtggtatttaggatgtaatatgttttcctccatttctgctaattttctctctctctctctcataacatactatacatgctaattgccaagatttgaatgagtcaaatttagtagcttgctgcttttattttttaaatggcttcttttacgtattggcgggggcggggggggggaggggggcagggtatgaggcttcttttccctcagctttcattgaaagtgaagctgtacaataaccacattgaccactgtagaatgatgaaagagaatataggctaggatgcacacaagaggggggaaaaggcattattagtgaagataggagttacaaagcaaagcaaagtcagtattcagatagagaatagagcctaatctgatgtttgcagggagttcctagatcacatttggcaatttacacattattttattgacctatccagtgctccaaaatgtgttccaaaatattttggcattttatttgtactatataggaatctttaggggagtccctgaaatttgttttcctcttaggtcaaaggactgataattaactttggttcttaaggagtatgccctttagcaataagaacagcaataacattttaccctgcagttttttctctatacctactattatgcactcctaaaatatgtcatcattagtcttcatgaggatgtttaccatttctgaagttttgcgtaaattagccttgaagattacactataactgaggtcatcagcattgacttatggccagcaaaggacatgctcatggccctggagagatgaggacacaaaacaaatcaatttccccacttactgaaggactccccttaccttctgtctctcctgagaccttgactcattaattattttactctcctttttggaaatttgcaaccggtccttctcaacaatgtgctccctttagtacactgaagaaaaagagaagggaattatttgagtcctgatcacgatgcattgaaaacttcctatgtgagatgtttctgtttttatatctcttccaggtgtccctgagtatataagcatgggtctatgtctaccaagctcactgtagagtcacttttaccttttgctatggtggaatgggatctgtagggtcaggaacacagcacctaacacagtgccttatggatagtagttttataatacagatgtgttggaagaataaatgaatgggtccttttcaaacaaattcacca

SEQ ID NO: 17371 - DNA, 1672 bp, Homo sapiens
tggggcggggcctacaggctctccgctgggcccgagcgggctgggggaggggagcgtggggccgacagttttgggggtgaaaaggcaaaaggcgggtgaaaggctgcctcccgagactctccttgcttggaattctgcccactctgcggagttagcagtcacgacctccagcacaggatgtggtaccacagattgtcccacctacacagcaggcttcaggacttgctgaagggaggagtcatatatccggcccttccacagcccaacttcaaaagcttacttcctttagctgtccattggcaccatacagcctccaagtctctgacttgtgcttggcagcaacatgaagatcattttgagctgaaatatgctaataccgtgatgcgctttgattacgtctggcttcgagaccactgccgctcagcatcgtgctacaactctaagactcaccagcgcagcctggatactgccagtgtggatttatgtatcaagccaaagaccattcgtctggatgagaccacactctttttcacttggccagatggtcatgtgactaaatatgatttgaattggctggtgaaaaacagctatgaagggcagaaacaaaaagtcatccagcctagaatactatggaatgctgaaatctaccagcaagcccaagttccatcggtagattgccagagcttcttagaaaccaacgagggactgaagaagtttctgcaaaactttctgctctatggaattgcattcgtagaaaatgtccctcccactcaagagcacacagagaagttggcagaaaggatcagcttaatcagagaaaccatttatgggaggatgtggtatttcacttcagacttctccagaggtgacactgcgtacaccaagctagctctggatcggcacactgacactacctattttcaagagccctgtggcattcaagtgtttcattgtcttaaacatgaaggaactggtggcaggacactgctagtagatggattctatgcagcagaacaggtacttcaaaaggcacctgaggaatttgaactcctcagtaaagtgccattgaagcatgaatatattgaagatgttggagaatgtcacaaccacatgattgggattgggccagtcttaaatatctacccatggaataaagagctgtatttgatcaggtacaacaactatgaccgggctgtcatcaataccgttccttatgatgtcgtccatcgctggtatacagcacaccggactctaacgatagagttgaggagacctgagaatgagttttgggtcaaactaaagcctggcagggtgggtcctaatctctaaagatgtcaagcaagcttgtaatactgaagcagtgaagaacgggtacttacttaatatgtgagtcacgatgttgcaaaggaaaaagagaaaagagtccttggttttgtttatggtcctgccgcccactcactgaatgctctggaagcaagcctcatcccatctctaaggcatcagtgactctatttgtatgatgaaggggtttaactagatgacccccaagggtccttccagcttcatgattccatagtttttatttttggtatttcctctggatgaaaaataccttcagcttagcataaaatgtcatgagataatttaaccctttgagaaagggtagaataag

SEQ ID NO: 17372 - DNA, 1177 bp, Homo sapiens
tggggcggggcctacaggctctccgctgggcccgagcgggctgggggaggggagcgtggggccgacagttttgggggtgaaaaggcaaaaggcgggtgaaaggctgcctcccgagactctccttgcttggaattctgcccactctgcggagttagcagtcacgacctccagcacaggatgtggtaccacagattgtcccacctacacagcaggcttcaggacttgctgaagggaggagtcatatatccggcccttccacagcccaacttcaaaagcttacttcctttagctgtccattggcaccatacagcctccaagtctctgacttgtgcttggcagcaacatgaagatcattttgagctgaaatatgctaataccgtgatgcgctttgattacgtctggcttcgagaccactgccgctcagcatcgtgctacaactctaagactcaccagcgcagcctggatactgccagtgtggatttatgtatcaagccaaagaccattcgtctggatgagaccacactctttttcacttggccagatggtcatgtgactaaatatgatttgaattggctggtgaaaaacagctatgaagggcagaaacaaaaagtcatccagcctagaatactatggaatgctgaaatctaccagcaagcccaagttccatcggtagattgccagagcttcttagaaaccaacgagggactgaagaagtttctgcaaaactttctgctctatggaattgcattcgtagaaaatgtccctcccactcaagagcacacagagaagttggcagaaaggatcagcttaatcagagaaaccatttatgggaggatgtggtatttcacttcagacttctccagaggtgacactgcgtacaccaagctagctctggatcggcacactgacactacctattttcaagagccctgtgggtaggtggattagacttttacagtgtaaagtctttatatgtgatagtcttgagtggtttcttaattattttccattctgttcgaaccaagatcatatctgctcctgcagatttgtatgactttctcttcccctggaaacatgatcattttgaaataccttaactcagtttttagattctgtattaggccattcttgcattgctataaataaatacctgagactgggtaatttataaaaaaaa

SEQ ID NO: 17373 - DNA, 3133 bp, Homo sapiens
tgagagaaacagttggaacttaacttctatcccgtatccttagattattcaaagaaaaacaaaacacggtcaacaggcagtggaactcctcactccaatgtgatattcctgagagaatattgacttatcgtcacttcgtctctgggacaagtattgaacataggggaagccttatataaaattgttcaataaacaaaagatgtctttaacatgtgtttgagatctttcttctcatgattccatgttaggtacaacaactatgaccgggctgtcatcaataccgttccttatgatgtcgtccatcgctggtatacagcacaccggactctaacgatagagttgaggagacctgagaatgagttttgggtcaaactaaagcctggcagggtgggtcctaatctctaaagatgtcaagcaagcttgtaatactgaagcagtgaagaacgggtacttacttaatatgtcctatttatagacaactggcgtgtcctacatggcagggaatgcttcactggctaccgccaactgtgtggctgctatttaacaagagatgatgtattaaacactgctcgcctcttggggcttcaggcttaaaattgacagcatctggattatgaatacacctggcaccctggctaccagaatttcatatgggcagaataatattgtgtcaaactctacttcagattgtctccttatcccatcccacaaaacagaatctgtccgtttctctagtaagggagacttgttggagaggcgggactctgagttatctaatgtcagacatctagtggggcagctctcttcctcatgttataacatggatccacttgttttatttaaaccttttaatataattttggtcagtctccttcagaaatataatctccatattgataggaaagcaataattgccatgaggtaacgatttttttcccaagtagatcagttagaaagaaatgcattctagaaataacaaaaatcctgataaagcaacaatttgcaaaatgtttggtcttaggacaccttaacactcttaaaagttattgaaggccccaaggagttcttgggtgtgggttctatctattgatactaattattttaggtattaagactgagaaatatttaaagctcaagaagaacacagaagcacacatccctcagctatgagagagatgacataaccatatgtcatgtagcctctggaaaagtcctctgtatcctcatgagataacgagagggggaaaaaaagctactactgcctttgtaacttccacttagcctactacagggctatgcacatcttagtttccaaaagtctgcttaatttcaaaagaaaaatgcctaattgaatgtaactcatcttggtgttattatacaaaataatttttaatctgcagacccacgaaaagggtctcagggactcctccaggggtcttcagaccatactttgagaacccatgggctagcgactaccttgagacagtcctttacctaggcctgtggattaaagggtttagctgaaaccctagattcttctctgtagtctaatagaactccaaacattgtaagaattgcttggtagcataagctcagggataaggtgggaattgagttcaaatatagtgttttatcttccacacaaatcatctctataggagttaaattaggaagtcacaacagcgcctgttgaacaaactcatcagtgtggtaatcctatgagggataattgcagaaaggttttagagacttgtgaggttccatatgataattctttacacctcccccccccaagagaaagtacacagggctattctgtaatattgttcagggaaatcagcatgatagatgctgtgcctccagagagttctctggagattactacccaaatgtgtattttggcaatttggtggtatttaggatgtaatatgttttcctccatttctgctaattttctctctctctctctcataacatactatacatgctaattgccaagatttgaatgagtcaaatttagtagcttgctgcttttattttttaaatggcttcttttacgtattggcgggggcggggggggggaggggggcagggtatgaggcttcttttccctcagctttcattgaaagtgaagctgtacaataaccacattgaccactgtagaatgatgaaagagaatataggctaggatgcacacaagaggggggaaaaggcattattagtgaagataggagttacaaagcaaagcaaagtcagtattcagatagagaatagagcctaatctgatgtttgcagggagttcctagatcacatttggcaatttacacattattttattgacctatccagtgctccaaaatgtgttccaaaatattttggcattttatttgtactatataggaatctttaggggagtccctgaaatttgttttcctcttaggtcaaaggactgataattaactttggttcttaaggagtatgccctttagcaataagaacagcaataacattttaccctgcagttttttctctatacctactattatgcactcctaaaatatgtcatcattagtcttcatgaggatgtttaccatttctgaagttttgcgtaaattagccttgaagattacactataactgaggtcatcagcattgacttatggccagcaaaggacatgctcatggccctggagagatgaggacacaaaacaaatcaatttccccacttactgaaggactccccttaccttctgtctctcctgagaccttgactcattaattattttactctcctttttggaaatttgcaaccggtccttctcaacaatgtgctccctttagtacactgaagaaaaagagaagggaattatttgagtcctgatcacgatgcattgaaaacttcctatgtgagatgtttctgtttttatatctcttccaggtgtccctgagtatataagcatgggtctatgtctaccaagctcactgtagagtcacttttaccttttgctatggtggaatgggatctgtagggtcaggaacacagcacctaacacagtgccttatggatagtagttttataatacagatgtgttggaagaataaatgaatgggtccttttcaaacaaattcacca

SEQ ID NO: 17374 - DNA, 713 bp, Homo sapiens
tggggcggggcctacaggctctccgctgggcccgagcgggctgggggaggggagcgtggggccgacagttttgggggtgaaaaggcaaaaggcgggtgaaaggctgcctcccgagactctccttgcttggaattctgcccactctgcggagttagcagtcacgacctccagcacaggatgtggtaccacagattgtcccacctacacagcaggcttcaggacttgctgaagggaggagtcatatatccggcccttccacagcccaacttcaaaagcttacttcctttagctgtccattggcaccatacagcctccaagtctctgacttgtgcttggcagcaacatgaagatcattttggtaagagatgtgtgaagacagatactttttaaaacttgtggtaagaaatgtttgctttggcagcacatatatcaaaaattggaatgataaaattgtggtaagaaaacacatagtacaaaatttactatcttaaccattttaagtgtacaattcacattgttatgcaatgataaataccttttgtgtggtctgaaaatactttttgtggagttgacaggacctctagccatttatttttaagattagcctacaagttgggagaaagacaaaaataacagagggcaatagtgaaatcccttctcaactaggggaaggcaactcagcctgctccagccccactccatctccctgtctt

SEQ ID NO: 17375 - DNA, 341 bp, Homo sapiens
ggcggagaggaaggccactcctgccttgccgcagggttgtcgtcacgatctgtgccagttgcgcgacagagtctgcccggagatcagcgtgaggccggatgggcctagcgctcaggaagagctggaagagctggagcaagctcgcgttgggactgacgcccagtgtacattgtttcaatctcggtcggactttacagccctggatctgtcactgacttggtgtttagctttcagcgagtccctaccctcttcctgcctcactttgttcggcagtagagtggaaggtggaactcagctgtctgcaagatcttgcagcactttctttcgttctcatatccact

SEQ ID NO: 17376 - DNA, 1208 bp, Homo sapiens
  misc_feature (5)..(6): n is a, c, g, or t
ggcgnnggtcgctggcagctgagcggcggaacccttcgctggcgggagcgcggttcggggccgcagaggggacattgaataaacctgagtattgtgtgcctgtattttgactgcgacctatcagatgagatcaggtcaagagacaactgcctttgaaagagagtgagtgactgtttccaaaacagcaagcatagggagagccgccggaagtattgacggaaagcttgaattacctacatgattgatgatggtctccagctgtcaaagaagattgtggttgccaagagaaaggtaaccatttctcatccccttgagtggaattggatgcctctaggagcccacattggctggcagtagacatggccgaatttacaagctacaaggagacggcctccagccgccacttgcggtttaagctacagagtctaagccgccgccttgatgagttggaggaagccacaaaaaacctccagaaagcagaggatgaactcctggatctccaggacaaggtgattcaggcagaaggtagcaactccagcatgttggcggagattgaagtgctgcgccagcgggtgctgagaattgaaggcaaagacgaggaaattaagagagcagaggatctgtgtcgtctgatgaaggagaaacttgaagaggaagaaaacctcacccgggagctgaaatctgagattgagcggcttcagaaacgaatggctgaattagagaagctagaagaggccttcagcaggagtaagaatgactgtacccagctgtgtctgagcctgaatgaggagagaaatctgaccaagaaaatctcctctgagctggaaatgctcagagtcaaagtgaaagaactagaatcttctgaggaccgcctggataaaactgagcagagtttagcgtcagagttagaaaagctgaaatcattaactctgagctttgtaagtgagagaaaatacttgaatgaaaaggagaaagaaaatgagaaattgataaaagaactcactcaaaaactagagcagaacaaaaaaatgaaccgagattatacaaggaatgcttctaatctggaaagaaatgacctacggattgaggatggcatctcttccacactgccgtccaaagaatcaagaaggaagggtggtctggactacctaaagcaggtagtccaggcaccctccttcctgtttttatctaataaaatgctaacctgc

SEQ ID NO: 17377 - DNA, 1359 bp, Homo sapiens
gcaattctcttacctcagcctctcccaagtagctgggaccagaggcgtgcgccaccatgccaggctaattttaaaaatttttttgtagagacagggtctcaccatgttgcccaggctggtctcaaactcctgggctcaagcagtcctctcgcctcggccttccagagtgctgggattacaggcatgagccactgcgcccagtctgtctcattgttgatggggacattgaataaacctgagtattgtgtgcctgtattttgactgcgacctatcagatgagatcaggtcaagagacaactgcctttgaaagagagtgagtgactgtttccaaaacagcaagcatagggagagccgccggaagtattgacggaaagcttgaattacctacatgattgatgatggtctccagctgtcaaagaagattgtggttgccaagagaaaggtaaccatttctcatccccttgagtggaattggatgcctctaggagcccacattggctggcagtagacatggccgaatttacaagctacaaggagacggcctccagccgccacttgcggtttaagctacagagtctaagccgccgccttgatgagttggaggaagccacaaaaaacctccagaaagcagaggatgaactcctggatctccaggacaaggtgattcaggcagaaggtagcaactccagcatgttggcggagattgaagtgctgcgccagcgggtgctgagaattgaaggcaaagacgaggaaattaagagagcagaggatctgtgtcgtctgatgaaggagaaacttgaagaggaagaaaacctcacccgggagctgaaatctgagattgagcggcttcagaaacgaatggctgaattagagaagctagaagaggccttcagcaggagtaagaatgactgtacccagctgtgtctgagcctgaatgaggagagaaatctgaccaagaaaatctcctctgagctggaaatgctcagagtcaaagtgaaagaactagaatcttctgaggaccgcctggataaaactgagcagagtttagcgtcagagttagaaaagctgaaatcattaactctgagctttgtaagtgagagaaaatacttgaatgaaaaggagaaagaaaatgagaaattgataaaagaactcactcaaaaactagagcagaacaaaaaaatgaaccgagattatacaaggaatgcttctaatctggaaagaaatgacctacggattgaggatggcatctcttccacactgccgtccaaagaatcaagaaggaagggtggtctggactacctaaagcaggtagtccaggcaccctccttcctgtttttatctaataaaatgctaacctgc

SEQ ID NO: 17378 - DNA, 1142 bp, Homo sapiens
  misc_feature (5)..(6): n is a, c, g, or t
ggcgnnggtcgctggcagctgagcggcggaacccttcgctggcgggagcgcggttcggggccgcagaggtcaagagacaactgcctttgaaagagagtgagtgactgtttccaaaacagcaagcatagggagagccgccggaagtattgacggaaagcttgaattacctacatgattgatgatggtctccagctgtcaaagaagattgtggttgccaagagaaaggtaaccatttctcatccccttgagtggaattggatgcctctaggagcccacattggctggcagtagacatggccgaatttacaagctacaaggagacggcctccagccgccacttgcggtttaagctacagagtctaagccgccgccttgatgagttggaggaagccacaaaaaacctccagaaagcagaggatgaactcctggatctccaggacaaggtgattcaggcagaaggtagcaactccagcatgttggcggagattgaagtgctgcgccagcgggtgctgagaattgaaggcaaagacgaggaaattaagagagcagaggatctgtgtcgtctgatgaaggagaaacttgaagaggaagaaaacctcacccgggagctgaaatctgagattgagcggcttcagaaacgaatggctgaattagagaagctagaagaggccttcagcaggagtaagaatgactgtacccagctgtgtctgagcctgaatgaggagagaaatctgaccaagaaaatctcctctgagctggaaatgctcagagtcaaagtgaaagaactagaatcttctgaggaccgcctggataaaactgagcagagtttagcgtcagagttagaaaagctgaaatcattaactctgagctttgtaagtgagagaaaatacttgaatgaaaaggagaaagaaaatgagaaattgataaaagaactcactcaaaaactagagcagaacaaaaaaatgaaccgagattatacaaggaatgcttctaatctggaaagaaatgacctacggattgaggatggcatctcttccacactgccgtccaaagaatcaagaaggaagggtggtctggactacctaaagcaggtagtccaggcaccctccttcctgtttttatctaataaaatgctaacctgc

SEQ ID NO: 17379 - DNA, 1036 bp, Homo sapiens
  misc_feature (5)..(6): n is a, c, g, or t
ggcgnnggtcgctggcagctgagcggcggaacccttcgctggcgggagcgcggttcggggccgcagagattgatgatggtctccagctgtcaaagaagattgtggttgccaagagaaaggtaaccatttctcatccccttgagtggaattggatgcctctaggagcccacattggctggcagtagacatggccgaatttacaagctacaaggagacggcctccagccgccacttgcggtttaagctacagagtctaagccgccgccttgatgagttggaggaagccacaaaaaacctccagaaagcagaggatgaactcctggatctccaggacaaggtgattcaggcagaaggtagcaactccagcatgttggcggagattgaagtgctgcgccagcgggtgctgagaattgaaggcaaagacgaggaaattaagagagcagaggatctgtgtcgtctgatgaaggagaaacttgaagaggaagaaaacctcacccgggagctgaaatctgagattgagcggcttcagaaacgaatggctgaattagagaagctagaagaggccttcagcaggagtaagaatgactgtacccagctgtgtctgagcctgaatgaggagagaaatctgaccaagaaaatctcctctgagctggaaatgctcagagtcaaagtgaaagaactagaatcttctgaggaccgcctggataaaactgagcagagtttagcgtcagagttagaaaagctgaaatcattaactctgagctttgtaagtgagagaaaatacttgaatgaaaaggagaaagaaaatgagaaattgataaaagaactcactcaaaaactagagcagaacaaaaaaatgaaccgagattatacaaggaatgcttctaatctggaaagaaatgacctacggattgaggatggcatctcttccacactgccgtccaaagaatcaagaaggaagggtggtctggactacctaaagcaggtagtccaggcaccctccttcctgtttttatctaataaaatgctaacctgc

SEQ ID NO: 17380 - DNA, 1050 bp, Homo sapiens
gcccatagtaggccaatgttggtgctggcaaaaagtgagctggagattggatcacagccgaaggagtaaaggtgctgcaatgattgatgatggtctccagctgtcaaagaagattgtggttgccaagagaaaggtaaccatttctcatccccttgagtggaattggatgcctctaggagcccacattggctggcagtagacatggccgaatttacaagctacaaggagacggcctccagccgccacttgcggtttaagctacagagtctaagccgccgccttgatgagttggaggaagccacaaaaaacctccagaaagcagaggatgaactcctggatctccaggacaaggtgattcaggcagaaggtagcaactccagcatgttggcggagattgaagtgctgcgccagcgggtgctgagaattgaaggcaaagacgaggaaattaagagagcagaggatctgtgtcgtctgatgaaggagaaacttgaagaggaagaaaacctcacccgggagctgaaatctgagattgagcggcttcagaaacgaatggctgaattagagaagctagaagaggccttcagcaggagtaagaatgactgtacccagctgtgtctgagcctgaatgaggagagaaatctgaccaagaaaatctcctctgagctggaaatgctcagagtcaaagtgaaagaactagaatcttctgaggaccgcctggataaaactgagcagagtttagcgtcagagttagaaaagctgaaatcattaactctgagctttgtaagtgagagaaaatacttgaatgaaaaggagaaagaaaatgagaaattgataaaagaactcactcaaaaactagagcagaacaaaaaaatgaaccgagattatacaaggaatgcttctaatctggaaagaaatgacctacggattgaggatggcatctcttccacactgccgtccaaagaatcaagaaggaagggtggtctggactacctaaagcaggtagtccaggcaccctccttcctgtttttatctaataaaatgctaacctgc

SEQ ID NO: 17381 - DNA, 1066 bp, Homo sapiens
ggcagtgcaccgtgattgctgctagtctgctctagagtatcccctctcattcttgaatccctggaagtattgattggaaagcttgaattacctacatgattgatgatggtctccagctgtcaaagaagattgtggttgccaagagaaaggtaaccatttctcatccccttgagtggaattggatgcctctaggagcccacattggctggcagtagacatggccgaatttacaagctacaaggagacggcctccagccgccacttgcggtttaagctacagagtctaagccgccgccttgatgagttggaggaagccacaaaaaacctccagaaagcagaggatgaactcctggatctccaggacaaggtgattcaggcagaaggtagcaactccagcatgttggcggagattgaagtgctgcgccagcgggtgctgagaattgaaggcaaagacgaggaaattaagagagcagaggatctgtgtcgtctgatgaaggagaaacttgaagaggaagaaaacctcacccgggagctgaaatctgagattgagcggcttcagaaacgaatggctgaattagagaagctagaagaggccttcagcaggagtaagaatgactgtacccagctgtgtctgagcctgaatgaggagagaaatctgaccaagaaaatctcctctgagctggaaatgctcagagtcaaagtgaaagaactagaatcttctgaggaccgcctggataaaactgagcagagtttagcgtcagagttagaaaagctgaaatcattaactctgagctttgtaagtgagagaaaatacttgaatgaaaaggagaaagaaaatgagaaattgataaaagaactcactcaaaaactagagcagaacaaaaaaatgaaccgagattatacaaggaatgcttctaatctggaaagaaatgacctacggattgaggatggcatctcttccacactgccgtccaaagaatcaagaaggaagggtggtctggactacctaaagcaggtagtccaggcaccctccttcctgtttttatctaataaaatgctaacctgc

SEQ ID NO: 17382 - DNA, 337 bp, Homo sapiens
cttcctagctgtaagatgtcatgtacatttttagactgttgaggaatgttcgggtgttttaatttaagcaaagacagtgggttctaccctaggaccatatcatcttataggaaaggggaagtctcctacagccaaattctttcttgactttcctgagagagacatagccagcttagccaggttcctttagtgtcaggatctagatgcagatcttaccttggccccttgctgacagtgaattgtatgtgaaagtctttgggacagccctctgggtcacctcagtcttggtatgattcatgcattacctatctcttccattctgtttatattctatcca

SEQ ID NO: 17383 - DNA, 413 bp, Homo sapiens
ggctcactgcagcctccccctcctaggttcaagtgatcctcccgcctcagcctcccaagaagctgggatgacaagtgtgtgccaccatgcctggctaatttttgtatttttagtagaaacagggtttcaccattttggccaggctgttctcaaactcctgacttcaagtcatccactcgcctcggccttccagagtgctgggattacaggcatgagccactgcgcccagtctgtctcattgttgatggtaagttttatctttccgttgtagggatccctacttccctttgtgagaaatctgtacggtgactttgagagagtataaatatcctattttccaaccaaatggttttagcatccactgataatcttagcttgaatcaattattacactggcggttgtgattatagtt

SEQ ID NO: 17384 - DNA, 199 bp, Homo sapiens
acaggagactaatatccagaattacgaggaactcaactcaacaactacaacaataaaagccataatttcatttaaagtgggcaaaggacacagatagacatttttcaaaagacaccttaatggatgacaagcatatgaaaaaatgctcaacattactactaaaagaaatgcaaattaaaaccacaatgaaatgtaatct

SEQ ID NO: 17385 - DNA, 426 bp, Homo sapiens
tggaacagccctgagcaacatataaatatatacatacatatctatgtatgcaatatcctacacctgcgaattactacccatcctattcctcactgccaatggaaacaaactactcttttctttggattcattgatggatataaaaaattaatttgctattaactgctttcatattctgtttagttcttatagtatggtaaatgatacaggtgcagtatcagtattgtaaaattgtatggtgaaaactacaaaagtcattctgtggatatattttaaaaggaagaacagaaactatatttcagattcttgtgtgaatataattacagaataggtaactatttttatgtgtttccataaatgactccatttcatatgcattgtaatttagcacaaatcataataaatcatttggtaacaaaaaaaaaa

SEQ ID NO: 17386 - DNA, 338 bp, Homo sapiens
gattccagtcctagctgtgtcactgagttgctgtgaccttgggctagtccctgctcctctctcagcctcagtttacccatctataaaatgagtggggggaagggcaccgtggctcatgcctgtaatcccagcactttgggaggccgaggcaggtggatcacttgagatcaggagtttgagaccagcctggccaatgtggtgcaaccccgtctctactaaaaattagccggatgtggtggttcacacctgtagtcacagctactcgggaggctgaggcagaagaatcacttgaacccaggaggtggaggttgcagtgagctgaggtcatgccactgcac

SEQ ID NO: 17387 - DNA, 468 bp, Homo sapiens
ttaaaaggtattttcaccagaaatctaccaatgggactttaaaaaaaaacactaaatgaagtataataataagaatgaatagctcacatatatttaacacacagcagcttcatgggaaaacaactgtattttaaatgaagaacaggcctcctcagtgataactctaaaatttctcaacaatgtacagacacagactaatcatgaaagaagataatgacgatgctgggcagtgtctggaggtagccttttctcctggcattcactctagatgctcaaacttgggagtgcagcgctctggcagagttgggagatgttctctggagggctctggcggtgcttatttatcagccagtattgaaatttgtcaatatatcaaaaacgatttagtagctatatcagaccttatcacctgaatgcagcctttggcccacattctaaaggtggtgacacacatagataaggaatgag

SEQ ID NO: 17388 - DNA, 464 bp, Homo sapiens
tgtaatcgtgtatactgatatcataatttataggactgttgtaagattcagaggagagaatgtgtatgcaatggctaccgcgttgcctggcagggaactggcctcagtaaagctcagttccttccctgcagtttctctcccctgctttcctcaccagcaacagtcacggggtgaccagttagcttttgtaaatgatgaagccaaaacttttctttggtgggagtgtcaatggtattgtaatttagtaattatgtggtataaatagtcatcatctatagctgtgttcacataactcgagtagattcaaattcaattattatatagaaaggaattcgatttttgtaaagtcagagcaaactgcatctcaaggcttttattttcagttttggattgatgactcaaactaagcggggagatttgctttttcccctagaaaaacaagtatggtttatgcttgtattttt

SEQ ID NO: 17389 - DNA, 298 bp, Homo sapiens
tgtgccagagccctacacctacaatggcatcttcaccaccttaaatttccaaggaaactatatttcatacattgatggaaatgtatggaaagcatacagttggaccgagaaactaattctcagtgaaaattatttgactgaattacctaaggattcatttgaaggcctgctatccctccagtatttacagattctttcaaatgtgaaaggcttaaggaaagtgggtgtaaagaccctcaagtggatgccaaagtgctgcagaggccatgaagtaataaaactacatttgctttaaaat

SEQ ID NO: 17390 - DNA, 530 bp, Homo sapiens
aacaaaccacatgacccaccacctgcctatcttcctcacaggacactcgagggctctgtgtgggcagctcatcttccacggggctcagaacattattgacagtcgggaaaatggtcgttcccttcacattgtagttggcaaggtggggcagtgggggttgtcgcgcctcattagttttctgttgtacaaagttgagaacttttagagttctcaaactcaacgagggctacaaacaccctgttcctcttgtgcggcaagcactgctgggtgtgccccaggcctgtttctcatgccctgccttttatcagcccactgggagccccacaaaacagcagagcaggatttctggggtgggaggatggcagcgcagggtcacagcatgaggggttaagcacctggctctagccacacaccaacaagtcaccttcagtgttccgggctgtttcacctggtgcttccacccctcgtgggctgggctggcaaatgaaagcttggcttttctgcacagaatagactgtctgaggtggtgc

SEQ ID NO: 17391 - DNA, 347 bp, Homo sapiens
aactgagatatgttctgggaccacaaaattgaataagacacagtcccactcttagacacttttcttcagcggggataaaataaaagcaaatgaactaacataatattgtggctaagtataatactagtgtaaaagaggtaagattgaaggtaggaagaaagaacacctaattgttgggattgaatatcaggaaaggcatcctggaaggaatgttaactgaactgagttttaaagttttaagaaataattaaccatgtatttcttaacagtaggtgttgactaagctttcctactcagtcttcttcccgcccagctccaaacttccttatagcttttatcctaaaaaa

SEQ ID NO: 17392 - DNA, 156 bp, Homo sapiens
gcggccgcctactactactactactactgctcgaattcaagcttctaacgatgtacggggacatgtatttcttaacagtaggtgttgactaagctttcctactcagtcttcttcccgcccagctccaaacttccttatagcttttatcctaaaaaa

SEQ ID NO: 17393 - DNA, 2504 bp, Homo sapiens
ggcacgagggcagcgagtggccttcccggttggcgcgcgcccggggcggcggcgctggaggagctcgagacggagcctagttatgtctgggaggcgaacgcggtccggaggagccgctcagcgctccgggccaagggccccatctcctactaagcctctgcggaggtcccagcggaaatcaggctctgaactcccgagcatcctccctgaaatctggccgaagacacccagtgcggctgcagtcagaaagcccatcgtcttaaagaggatcgtggcccatgctgtagaggtcccagctgtccaatcacctcgcaggagccctaggatttcctttttcttggagaaagaaaacgagccccctggcagggagcttactaaggaggaccttttcaagacacacagcgtccctgccacccccaccagcactcctgtgccgaaccctgaggccgagtccagctccaaggaaggagagctggacgccagagacttggaaatgtctaagaaagtcaggcgttcctacagccggctggagaccctgggctctgcctctacctccaccccaggccgccggtcctgctttggcttcgaggggctgctgggggcagaagacttgtccggagtctcgccagtggtgtgctccaaactcaccgaggtccccagggtttgtgcaaagccctgggccccagacatgactctccctggaatctccccaccacccgagaaacagaaacgtaagaagaagaaaatgccagagatcttgaaaacggagctggatgagtgggctgcggccatgaatgccgagtttgaagctgctgagcagtttgatctcctggttgaatgagatgcagtggggggtgcacctggccagactctccctcctgtcctgtacatagccacctccctgtggagaggacacttagggtcccctcccctggtcttgttacctgtgtgtgtgctggtgctgcgcatgaggactgtctgcctttgagggcttgggcagcagcggcagccatcttggttttaggaaatggggccgcctggcccagccactcactggtgtcctgtctcttgtcgtcctgtccttcctatctccccaaagtaccatagccagtttccagatgggccacagactggggaggagaatcagtggcccagccagaagttaaagggctgagggttgaggtgagaggcacctctgctcttgttgggaggggtggctgcttggaaataggcccaggggctctgccagcctcggcctctccctcctgagttgccttctgttggtggctttcttcttgaacccacctgtgtaaagaggttttcagttccgtgggtttcccctttgattctgtaaatagtcccagagagaattcgtgggctgagggcaattctgtcttggaggaagaagctggacattcagcctgtggagtctgagttttgaaggatgtagggagccttagttgggtctcagaccataagtgtgtactacacagaagctgtgttttctagttctggtctgctgttgagatgtttggtaaatgccaggttgatagggcgctggctgcttggagcaaagggtgcatttcagggtgtggccaccaggtgctgtgagtttctgtggctcatggcctctgggctggtcccttgcacagggcccacgctggagtcttaccactctgctgcaggggtggaaggtggcccctcttgtcacccatacccatttcttacaaaataagttacaccgagtctacttggccctagaagagaaagttgaagagtcccagacctactagcattttgcaactatgcttgtaaagtcctcggaaagtttcctcgcgtaccagacagcggcgggggctgatagcaattttagtttttggcctccctatcctctcacatgagaacactgcctggatgcatctcatgatctctggagaatttccccatctttctcttctttccatcgtgtggattcaatagtttggatttgaaggctgccctgcccccgactctcctgccgcacccctggccattgtaccttttgatgtttagaagttcgtggaagtagacgctgaggtgtgcagaggagctggtggataacagagaatgccagggaagatgagtgctgggtcagggtacttggatgaaacggtgcaggccaggcgggccctaataaaaccctctgccaggtctgggagtcccaggccatctgctcaacgctctgtggtttgtcagacctgcaagcaagccccctgctggggaagcctaggtgtccttgagctgaaccgcactgaagaactcttgtcctcactggctgatgcagcagaactcttgggaaatgtcttagtcctgcagaatcaggagtcaccagatgatgcagagttgagatcatcattgcaaagttctctgttcctgaggaactaaatttaaggaaaaaatgggattttgttttagagttggaaaaaaagcctgattaaagagtttctgcctgttcatggactgtg

SEQ ID NO: 17394 - DNA, 1940 bp, Homo sapiens
ggcacgagggcagcgagtggccttcccggttggcgcgcgcccggggcggcggcgctggaggagctcgagacggagcctagttatgtctgggaggcgaacgcggtccggaggagccgctcagcgctccgggccaagggccccatctcctactaagcctctgcggaggtcccagcggaaatcaggctctgaactcccgagcatcctccctgaaatctggccgaagacacccagtgcggctgcagtcagaaagcccatcgtcttaaagaggatcgtggcccatgctgtagaggtcccagctgtccaatcacctcgcaggagccctaggatttcctttttcttggagaaagaaaacgagccccctggcagggagcttactaaggaggaccttttcaagacacacagcgtccctgccacccccaccagcactcctgtgccgaaccctgaggccgagtccagctccaaggaaggagagctggacgccagagacttggaaatgtctaagaaagtcaggcgttcctacagccggctggagaccctgggctctgcctctacctccaccccaggccgccggtcctgctttggcttcgaggggctgctgggggcagaagacttgtccggagtctcgccagtggtgtgctccaaactcaccgaggtccccagggtttgtgcaaagccctgggccccagacatgactctccctcctgagttgccttctgttggtggctttcttcttgaacccacctgtgtaaagaggttttcagttccgtgggtttcccctttgattctgtaaatagtcccagagagaattcgtgggctgagggcaattctgtcttggaggaagaagctggacattcagcctgtggagtctgagttttgaaggatgtagggagccttagttgggtctcagaccataagtgtgtactacacagaagctgtgttttctagttctggtctgctgttgagatgtttggtaaatgccaggttgatagggcgctggctgcttggagcaaagggtgcatttcagggtgtggccaccaggtgctgtgagtttctgtggctcatggcctctgggctggtcccttgcacagggcccacgctggagtcttaccactctgctgcaggggtggaaggtggcccctcttgtcacccatacccatttcttacaaaataagttacaccgagtctacttggccctagaagagaaagttgaagagtcccagacctactagcattttgcaactatgcttgtaaagtcctcggaaagtttcctcgcgtaccagacagcggcgggggctgatagcaattttagtttttggcctccctatcctctcacatgagaacactgcctggatgcatctcatgatctctggagaatttccccatctttctcttctttccatcgtgtggattcaatagtttggatttgaaggctgccctgcccccgactctcctgccgcacccctggccattgtaccttttgatgtttagaagttcgtggaagtagacgctgaggtgtgcagaggagctggtggataacagagaatgccagggaagatgagtgctgggtcagggtacttggatgaaacggtgcaggccaggcgggccctaataaaaccctctgccaggtctgggagtcccaggccatctgctcaacgctctgtggtttgtcagacctgcaagcaagccccctgctggggaagcctaggtgtccttgagctgaaccgcactgaagaactcttgtcctcactggctgatgcagcagaactcttgggaaatgtcttagtcctgcagaatcaggagtcaccagatgatgcagagttgagatcatcattgcaaagttctctgttcctgaggaactaaatttaaggaaaaaatgggattttgttttagagttggaaaaaaagcctgattaaagagtttctgcctgttcatggactgtg

SEQ ID NO: 17395 - DNA, 769 bp, Homo sapiens
cggccgctactactactaaattcgcggcccgtcgattgaagagtcccagacctactagcattttgcaactatgcttgtaaagtcctcggaaagtttcctcgcgtaccagacagcggcgggggctgatagcaattttagtttttggcctccctatcctctcacatgagaacactgcctggatgcatctcatgatctctggagaatttccccatctttctcttctttccatcgtgtggattcaatagtttggatttgaaggctgccctgcccccgactctcctgccgcacccctggccattgtaccttttgatgtttagaagttcgtggaagtagacgctgaggtgtgcagaggagctggtggataacagagaatgccagggaagatgagtgctgggtcagggtacttggatgaaacggtgcaggccaggcgggccctaataaaaccctctgccaggtctgggagtcccaggccatctgctcaacgctctgtggtttgtcagacctgcaagcaagccccctgctggggaagcctaggtgtccttgagctgaaccgcactgaagaactcttgtcctcactggctgatgcagcagaactcttgggaaatgtcttagtcctgcagaatcaggagtcaccagatgatgcagagttgagatcatcattgcaaagttctctgttcctgaggaactaaatttaaggaaaaaatgggattttgttttagagttggaaaaaaagcctgattaaagagtttctgcctgttcatggactgtg

SEQ ID NO: 17396 - DNA, 271 bp, Homo sapiens
caaagtaatattcaactcaacaattttaaaaaacacagaaatattcaattacatagacccaaacacagtgagcacttatcaagatcacgaacagactagagcatctgacaaagctcagagacttagaatttttgctccatatatagaaccatttaataagatcatgtatggttatgttcatacactttgaattaggaggaaattttaatatatttatccctgatgaaaattaaatagtccttaactatcctgtgtggattcaatgctaggt

SEQ ID NO: 17397 - DNA, 516 bp, Homo sapiens
ttctagacccctgaccagacatccatgcactggaatttacatatattttcaccttgggccactgtcttgtctgttttgtgttgctataacagaatacttgaggctgggtcatttataaagaaagagctttatttggctcacaattctggtgactggaagattctagattggccacctgcatccaatgagggcctcagactgcttctactcatggcaaaaagtgaaaggggagcaagtgtgtgcaagatcacatggcaggctgggcgcagtggctcacgcctgtaatctcagcactttgggaagccaaggcagaattgcttgagcccaggagttcgagaccagcctgggcagcaaagcaagaccttgtctctacagaaaataaaataaataaataaataaaactaaatgggcatggtgttgtgtgcatgtgcctgtagtcccagctactcaggaatctgaggtgggacgattgcttgagcccaggaggttggggctgcagtgagccatgctgatgct

SEQ ID NO: 17398 - DNA, 1433 bp, Homo sapiens
atgcatagtggaagggagaagccaagcaattgggagcctttccggaaggtggtgtccgggaggatcatcaagcggctactgcaggggagactggctgctgagtttcgtgtaccgcacatcctcggtgcagctccgtgtcgccggcctacagcccgtgctgctgcaggacaggagggtggagaacgtggacctgacctctgtggtcagcggccacctggactatgccaagcagatggatgccatcctgaaggccgtgggcatccgcaccaagccaggctgggacgagaaggggctcttgctggccccaggctgcctgccctccgaggagcctcgccaggcagcagctgccgcctcatcaggcgagaccccccaccaggttgggcaaacccagggtcccatatccggagacacctccaaattggccatgtccacagaccccagccaagcccaggtgccagtagggctggaccagtctgaaggggcctcccttcctgctgctgccagccctgaaaggccccccatctgcagccatggcatggaccccaacccactgggctgccccgattgtgcctgcaagacccagggccccagcacggggctggactgaccacagcaggggacctgagccgtcttccccagtctccatatgcagctctctcttataccctcgggttcctcccaggagctctggaggtacaggatttccacaggcctctttcctaaatggaaggaattggaactgaaagggaaaggaaatggaaggaaggggaatttggaggagagaacacgcccacccttgggaagctgcctgtccccagaggagccccaccagggagcagctgccccctcatcagagacctgcagagtcaaccaagcacaggttagagtcccaggaccggaaaccaactgtgggctttctgtacttctcatagctttggagtctggctgtccatcaggaggtcccgagggctctctggggcctgaggctcccacaccagctctcccctggcctcaataaaaccaggtgcatgcctgttcttccatccacactccagggctgcccaccagctgacaggcaccatcaactggcagcaacagagcaggcgcaggtacaaagaaggcagctcactcctgctcttaggagatccaatcagatctgccctgtacagccatgtaggctgtgcgctgcataactccagggacatgagtcacacagacacaatgtgagtgtgctcccccgtcatgcaacatctggacacaactaacagagcatggtgaatacatgctgaattgcattcagtatggctgtgaactaggcctggggacaagaatgaattttacatggaaagaatttcctgtagcaggaacagaggggataacaacagcaataaataataataagaagaagctaccacttcttgagcatgtaccac

SEQ ID NO: 17399 - DNA, 401 bp, Homo sapiens
ctctcgggccctggagtgtggatggaagaacaggcatgcacctggttttattgaggccaggggagagctggtgtgggagcctcagaaggcagctcactcctgctcttaggagatccaatcagatctgccctgtacagccatgtaggctgtgcgctgcataactccagggacatgagtcacacagacacaatgtgagtgtgctcccccgtcatgcaacatctggacacaactaacagagcatggtgaatacatgctgaattgcattcagtatggctgtgaactaggcctggggacaagaatgaattttacatggaaagaatttcctgtagcaggaacagaggggataacaacagcaataaataataataagaagaagctaccacttcttgagcatgtaccac

SEQ ID NO: 17400 - DNA, 368 bp, Homo sapiens
ttctgaatgccaagaagacagggagctttgttttgttcacctagtggatttcatgtgcctgacacatagaaggtaatgaatatttgttagattaatgaagattttattctggtacaggttgtagtccactaaatcagtttcctatccactagtaggtcatgatccagagcttgaaaaacactcatttaaggaataaaggaaaaaatttgaaaaacacttatttaaggaataaaggtcatacattgattcattcaatacatatttattgttgtagactgatctagttaatatactgtagtaccattgccactcctaactcttgttttcatgggtttagggtatttattccgaagttactcataactagt

SEQ ID NO: 17401 - DNA, 113 bp, Homo sapiens
gagaaaggttgttttctagttgtttattaggtgagaaagcctggtaccagttactgtgttcatggctatgatataacaatttaattttgtatctgcttctgtaagtagatttt

SEQ ID NO: 17402 - DNA, 175 bp, Homo sapiens
aataactgaagtgcatgtactaagccatttcctagagttcctcagcaggattcagctctggttgctgagaggtggtaactcccttgataaagtatgttttgtttgcctcattcccttctctatgcccctcccaacatttcctgaaattactatccagagagactacttgcactta

SEQ ID NO: 17403 - DNA, 490 bp, Homo sapiens
agggcctcgctctgttgcccaggatggagtgcagtggtgcaatcatggctcactgcagcctcaacctcctggactcaagcaatcctcccacctcagcctcctgagtagctgggactacaggcatgtgttgggaaaaaggcttatggggtgcctgcatagactagccataaaaatatgggacaataagttgtggaaagccacaaaaggcctctcagaaggaaagcctcctaattgccatcatgttgccctgctcagagcaagacacactctcttatttgtaaacactgttcaaggagaaagacactcctttgaaacactggaaggtgaacagatgtgcaggctcctagttaagccactcccactagctactctctgataagttaaagatatgctgtttgagcacaaaggagattcatttaaaccgctattactatagattacgtctatgacgcatagcctccctttcactgtttcgccctgaacatctgct

SEQ ID NO: 17404 - DNA, 82 bp, Homo sapiens
aaaatgtgtgagagaaaaggacttctgacgagcccagggatttacgtgctgctttgggaatgttctctccagacttttaaaa

SEQ ID NO: 17405 - DNA, 415 bp, Homo sapiens
gaaataaaacatgcatactaaccatgcatacacacacatctacgtctatttctgtatctgtctgtatacatattaaaataaacatgggttgataactaatgtttctgctgtaatccacagccttcatcctagcctgccactcttcttctttttagctttttcaacagtgggaaatgtggctcttgttatgtacactttattcacttatttgtttgaccctagtatcataaagtagttccgtatgcctgtaacagatcgactaactagagtccattatttgcggaaagatctttttgtccgaagcgttaccgcaggggtgtccaatcttttggcttccctgggccacactagaaaaagaagaattgtcttgggccacacgtaaaatacactaacactaacgatagctgataagcta

SEQ ID NO: 17406 - DNA, 377 bp, Homo sapiens
cacttcaagatagtggggatgtatattttaaaaaatttcacgctcatgggccaaagattttcccggggctgtgtgctgatttgcagcctatcatgtgtggctttgggacactggggaaggtgtggagcagtttaagtgacaaacgggttggaaaagcaaaggacaccaggtgaggatgatggaatttacatcctgttgcttccctgatagttcctgccaatatgggatcccactactatctttctgccctaaaaatatgtgtatattgagatagaaactgttgtaatggctgcatgcattcagtagaggaaaggagagaagaaagaaggaacagatttagtcctgcccagaatctgcacttccacggaggacgccag

SEQ ID NO: 17407 - DNA, 423 bp, Homo sapiens
aattactctttgtctactgcagttcccctgtcttgataaattggctctgtctaggcagcaggcaaggtgaacccatgggtggttacaagaggatcacatgagcccagtaggtcaaggctgcagtgagctgtgaccacaccattgcactccagcctttgggacagagcaagatcctgtctcaaaaaaaaaaaaaatctttttttcaaagagaacgatttacaagctaatctctgttccctgatccattcattctccctagcaatcgtttattgtacctcaacagaattacctatattccccatctcctcactcccctctcaaataaggctatataagtatttgggccccactgggatattgagtgatcactctgattctcccctgtgtacacattaataagttttgatgcctttttcctactaa

SEQ ID NO: 17408 - DNA, 286 bp, Homo sapiens
ccccctagcaatgctctgaggtcgttttcttaatgaccttattttattgctgagtaaattgaggttcagagaggttcaacgactcacccagagtcacgcagcaaatgcagttgtgaaacccaaattcagatgttcctacagccgcagcatccactgcacccaccagcaggttgcaccacaagaggccccagtccccccaggcggccccagctcagtaggggaagttccgtgccgatggtacgaggacgaggagctgttcggtggaaagcccctgaaggccactgtc

SEQ ID NO: 17409 - DNA, 347 bp, Homo sapiens
tcaagggtggaatgtcagtgaaatagaaattgttccagggtttgtctctgtcttgcagtggaatgaagggagggcaatttggcagctgcttgccctctgctttgcattaacatggcatcacaaaaactctgatcgtttgagttgtgatagtgtgaagaactggggctgaacctgggcccctagggctgagactgtgaggagcttaggggtgcatttagggaatcaaggcaggtgggcagaggaggagcagatcctggctgaaccttggtggctgaagcaggaagccagcaggtcttcagcttcctggggggagctgggagtggaacctcctgccccccaatgccctt

SEQ ID NO: 17410 - DNA, 801 bp, Homo sapiens
cccacatacttcatgtgttcatctcccatccagaatgtcctgaggttgtttttctggttggttctcataatccatagtccttggggtcccagcaaagtcagttttcctacaagttgtgtttgttttgtggaagcccaaagaagtggattgagagagaagagatttttatctaaggtggaaggtttttcaactagcccctaaaggtctttggtagttaattaacattcaacagacccacagcaactctggtgtcagaagctataaatggtctggccaaacaagactcagagtattttctgaaatcctgagctgcaaggttctgcctcacctgtctctccactctgacatcacgaaatcagcaaaaccagatatttattctcctcactcccagcagatacgaggacaccaacaatgcagttgatccctctgggcctgagtctcccatctgaaacatggggaattggggtaggtcaagctttttgaaactgcaaaacctctacctgtttttaaaaatgagatcttttgaccaggcacagtggctcacacctaaaatcccagcactttgggaggctgaagcaggtggatcatctgaggtcaggagtttgagatcagcctggtcaacatggtgaaaccccgtctctactaaaaatacaaacattagctgggcatggtggtgggtgcctgtaatcccaactactcgagaggctgaggcaggagaatcgcttaaacttgggaggttgcagtgagctgagaccacaccactgccctctagcctgggtgacggagtgagactatctcaaa

SEQ ID NO: 17411 - DNA, 391 bp, Homo sapiens
gatactcgatccatgagtgactcaagtcttggtctctgctacctaatagaagtgggttaggtccaagataatatctgtctctaaccctctgattattttcctgttgtcattttccctttccttcataccttctcttctgatttccgtaatctccaaacaaaaggcttttttccctatgactgccaaaaacaattatcacccaagacttttgtcagtcttagtgatcttttgagtcatttgatccacacctgctcttaggaccaagataatgaagttcttacaagttgcactcaagagagaaggattccctcaggctgggtgcagtggctcatacctgtaatcccaacactttgggaggccaaggtgagggatctttagctcaagactaccc

SEQ ID NO: 17412 - DNA, 304 bp, Homo sapiens
tgtgacaactaagcccttgcaatgtgtcttgtccacttcaagagatgctataaatgtaaaatacacactatattttgagagcttactatgaaaaaataatgtaaatatgtcactagtaatctttttttttcttttacttttttttttttttttttgagtcttgcactgtcgcccaggctggagtgcaatggtgcaatctcggctcaccgcaacctctgcctcctgggtttaagtgattctcctgcctcagcctcccagctactcgggaggctgaggcaggagaatggcgtgaacccgggaagcg

SEQ ID NO: 17413 - DNA, 486 bp, Homo sapiens
gtgagctatgattgcaccactgtacactagcctgggtgacagaatgagactctgtctctaaaaaaaaagaaatcctcatttctgttgaactaagtaaacatagagttctttaagggaattatttcacgtatgggttaaatagcttagcaggaggagtcaactgggctgttatctccaagaagcctgcacaaacaggttaatttttaaagtctgtgtaatagtttttagctggattttaataaagtccaaagttcaaagtcacattactactagaatattcagtctagtagaaggaatttctgatacacacacacgaactttgtcctatctcaaaagtctgacaacccaccaagaatcagaactggtgcctcataaaataacgggggtgatttttagccttggagcaaaagcaggaggctgggtccaggctggttctcccagtaaggaggctagaactcgtgcaaatacaccacttagcctcactgg

SEQ ID NO: 17414 - DNA, 952 bp, Homo sapiens
aggagatctgatcacacttcctcctgaggcacctctcatggatgttgcaataagcattcgggtactatcacccagaaatatgaattgccagaatagaacatttagcatgttaagcgttgatgcatataaaatcagaaatagatgtgagaatggtggaactttttaaaagaacccagtcaaatgtattttctgctgaaatctgcgctgcctctgtgactttcctcctcttctcagtcttacaccgcctggtcttaggtcatctgctaagctgtcacagaaagtgacgtaccctccacacctgtggatggtctgaagggcaaggaggaaatttcagaaagctgtcaggcacttgatgaaatgaaaccacagcatctggaagttgatgtccttaagccaatgaccagaaggaatgaaccagagaactgatgttgttgtccatggacctgatgtttcttatgagattccaagtagaaaaatttattagattttgaacacttaacggctggataaggacaactttcttatatatatatatatatatgtcatatgtggcaatactcttgtcaattaacatattaagtttggattgaggtaagtaatacttgaaagtgccattaattaataactcagagcatgaaaattatttgattaaaagctcaatgaggctgggtgtggtggctcatgcctgtaatcccagcactttgggaggccaaggtgggtggatcacgaggtcagtagttcaagaccagcctggccaagacggtgaaaccccatctctactgaaaatacaaaaattagtcaggcgtggtggcaggtgcttgtaatcccagctactcaggagactgaggcaggagaattgcttgaacctgggcagcaggggtcgcagtgagcctagatccggccactgcactccagcctaggcgatacagtgagactctgtctcaaaaaaaaa

SEQ ID NO: 17415 - DNA, 1525 bp, Homo sapiens
aggagatctgatcacacttcctcctgaggcacctctcatggatgttgcaataagcattcgggtactatcacccagaaatatgaattgccagaatagaacatttagcatgttaagcgttgatgcatataaaatcagaaatagatgtgagaatggtggaactttttaaaagaacccagtcaaatgtattttctgctgaaatctgcatatttgggaggcatttcccaccaccgattcacagcccatttgatagtgtgggtagttaggggacttcgtgggagtggtgttcagacgtccccggggggctttaaatctcttcatatttaggtccatcatttgttaactatggggctttatttgcagagcttctaaaaggcgtataactgtgtgagtggccagatattcactttttaaatcaaaaacctctcttatggaagctttaaaagtttccgtcacacacaattctcttctcaggaagtatttctcatttaggtcttcaaagtagcctgactgtgtgcatgtgtgtgtgtgataggttatttataaagactttggatagaaggagatgtattttattacctcctattctagagccccatgctcctaacaagccagagaggccccaaacaggattgtttctttcctccacagcccttctgcccatctgagattgagggagcatcgtccacttgagatcagggatggggtggagaatgggtcatgtcatgtaatgagaaaagccctcttcgggatcatgagacttggttctagtccaatttctgccactgaggatgaatgtaactgtgggcaaactatttaccctcctttatctgtgaaatgaaagggttgaattgatggatctctaaaggcttttgtcctctatgaggatgtgaaaaactagggaccacaaaagggaacaagcaaaaaagtttggattcgataaagtgatatgtaatagttgcagaaggctttatatatgcttataatgaaaagatattttttgtatattgacagcataatttatttttaatgctgtcattacacttaaagtcacaggaaaaaaatatacatgcttactcaggctttcttaaaaataaatttttatagagatccttgagtaaagacattttgcttaatttcttttttcttattccccacttgtatatcccctaccagtaccgggatctgcacacatctttttgcagttacctcttcatagccatgaaccaaaacgttctatgaggagcatgcaagtaagtcaagcctcctattctgttagtacttattagaggaggagatggttttcattgcatagtgacattttcttagccttaacgttctgatagtagcttactactcacttctctttttcagttttcataataagtattcatttttttgccataatgcttcctgtaaagccaattttatatactaataaaacatgaactgcccactcttcatgcctgccaaacttggggcaattgatgctaaatggtatttttaaaataaatgtttttattcttta

SEQ ID NO: 17416 - DNA, 1678 bp, Homo sapiens
aggagatctgatcacacttcctcctgaggcacctctcatggatgttgcaataagcattcgggtactatcacccagaaatatgaattgccagaatagaacatttagcatgttaagcgttgatgcatataaaatcagaaatagatgtgagaatggtggaactttttaaaagaacccagtcaaatgtattttctgctgaaatctgcatatttgggaggcatttcccaccaccgattcacagcccatttgatagtgtgggtagttaggggacttcgtgggagtggtgttcagacgtccccggggggctttaaatctcttcatatttaggtccatcatttgttaactatggggctttatttgcagagcttctaaaaggcgtataactgtgtgagtggccagatattcactttttaaatcaaaaacctctcttatggaagctttaaaagtttccgtcacacacaattctcttctcaggaagtatttctcatttaggtcttcaaagtagcctgactgtgtgcatgtgtgtgtgtgataggttatttataaagactttggatagaaggagatgtattttattacctcctattctagagccccatgctcctaacaagccagagaggccccaaacaggattgtttctttcctccacagcccttctgcccatctgagattgagggagcatcgtccacttgagatcagggatggggtggagaatgggtcatgtcatgtaatgagaaaagccctcttcgggatcatgagacttggttctagtccaatttctgccactgaggatgaatgtaactgtgggcaaactatttaccctcctttatctgtgaaatgaaagggttgaattgatggatctctaaaggcttttgtcctctatgaggatgtgaaaaactagggaccacaaaagggaacaagcaaaaaagtttggattcgataaagtgatatgtaatagttgcagaaggctttatatatgcttataatgaaaagatattttttgtatattgacagcataatttatttttaatgctgtcattacacttaaagtcacaggaaaaaaatatacatgcttactcaggctttcttaaaaataaatttttatagagatccttgagtaaagacattttgcttaatttcttttttcttattccccacttgtatatcccctaccagtaccgggatctgcacacatctttttgcagttacctcttcatagccatgaaccaaaacgttctatgaggagcatgcaagtaagtcaagcctcctattctgttagtacttattagaggaggagatggttttcattgcatagtgacattttcttagccttaacgttctgatagtagcttactactcacttctctttttcagttttcataataagtattcatttttttgccataatgcttcctgtaaagccaattttatatactaataaaacatgaactgcccactcttcatgcctgccaaacttggggcaattgatgctaaatggtatttttaaaataaatgtttttattctttactcttgactaaacttgtttattttcaactccaatgaagattgtggaagagtgttttgaaatgaagcatcgatttgtacttcatagagcaccagacacaatgtctcacccaatttggagttccatattttttttatgataaagaaaaatgttgg

SEQ ID NO: 17417 - DNA, 860 bp, Homo sapiens
tccattgatccatgagtgtggtggggctggccccagggctagtgagaagctgttgccatggctgcattgctggtaaggtgggattccgtgtgtttgccctgagcaatctgcgctgcctctgtgactttcctcctcttctcagtcttacaccgcctggtcttaggtcatctgctaagctgtcacagaaagtgacgtaccctccacacctgtggatggtctgaagggcaaggaggaaatttcagaaagctgtcaggcacttgatgaaatgaaaccacagcatctggaagttgatgtccttaagccaatgaccagaaggaatgaaccagagaactgatgttgttgtccatggacctgatgtttcttatgagattccaagtagaaaaatttattagattttgaacacttaacggctggataaggacaactttcttatatatatatatatatatgtcatatgtggcaatactcttgtcaattaacatattaagtttggattgaggtaagtaatacttgaaagtgccattaattaataactcagagcatgaaaattatttgattaaaagctcaatgaggctgggtgtggtggctcatgcctgtaatcccagcactttgggaggccaaggtgggtggatcacgaggtcagtagttcaagaccagcctggccaagacggtgaaaccccatctctactgaaaatacaaaaattagtcaggcgtggtggcaggtgcttgtaatcccagctactcaggagactgaggcaggagaattgcttgaacctgggcagcaggggtcgcagtgagcctagatccggccactgcactccagcctaggcgatacagtgagactctgtctcaaaaaaaaa

SEQ ID NO: 17418 - DNA, 706 bp, Homo sapiens
ggtattttctctttcagaatgaagaagtcaaattcattgaaaatgagctcgagattcaaaagcaaaaatactttaaacttcagacttttgttagaagcttgatattagcaatgaaagctgatgataaggaacaacagcaggcactgctgtcagatttacctcctgaattagaggaaatggatttcaatcatgcctcactggagcctgatgatacctcattcagtgtatcttctttgtcagagaaaaatgtctcagaaagtttgtgatttcagttggagggaatatatgatacagtcttttggcttcgtaacaggtgtgcatttcaagataactgcattctgttgccctggtattctttagttgggaaaacacattgttgaaacggacgtattctgtgaagaatgtacaagatataatggctacagtgcaacaaaaatgtaggtgaaatttaaaagcattgtttgagagagtatttttttaactgatggaactctggaaaaaaattatatttaagtttcagcagtttaaccctgaaattcattatgtctaatttctaaccagagacaaaataactaaagacatttcagcattgcttatcaagttgctacagcttgattagtcttgtttttgtagccattacatcttctttcttcttctctccttttcctatcatccacttacactttttctcaggaaagtggactga

SEQ ID NO: 17419 - DNA, 298 bp, Homo sapiens
atgaacttcctttgttgactttctttgccattaatttaaaagttccagtatcctcaatatttgatgtcttatatgtacagaatcctttccagctgtaagtcatcagcaagtaaaaaatttagtatggcaatagttttcataagaggttttttaaaacagaaaaatgttgacattgccagcctctgggttgcattttgggatatgctacatttcaaaggtatcttttaaatctgaaggcaaagactttttcaacatctgaatattctgatttacagaaattaaaaaaaaaaaaccccgg

SEQ ID NO: 17420 - DNA, 248 bp, Homo sapiens
ggaaatcatgatgctggcttttttgactaggacttcagagatcatgggagcatcgggaagtctctgcaagtgagtgcagagagtgtgagctgtggagtcagaggggtttgcatttgcttaccagctcttgcccacttatgatcttcttacctaacatcttgcaacttatttttgtcatctttgacattcagagataaggactcacctcaaagggttgcgagagagagagagtgtacaaattattcagc

SEQ ID NO: 17421 - DNA, 253 bp, Homo sapiens
tgacagcttcttcccaactgcaatccccgcttttccacacttgagctcgtcctggcctgttgggccaggcttctggggtcttctgggggtggcttgtgatagaaacaatgctgaagcttccgcggagagcccgtcgcttgttgaggcccaacagacttccaggaaatcagggtttatcatcagtgttgagaatggtcccagcaagctctggtcatacgaagtcctctcttccctgccccttcagcacttcccc

SEQ ID NO: 17422 - DNA, 324 bp, Homo sapiens
agagtaggtagatgggtgtttaaatgatattttctaaaatatctttcttcagacatctttttggtcagcaatttttaaaagagatgccgtgaactggaagtacttggcacatgggcaatcatttggaaaagaacaaaatagtactggaacatgggggtaaaataggtttcaattttttaacataaaatatccatcataatccacatagtaagcaaaatctttcaaaggagcttaacttagaaaaaatactttttttaaagctaaaaacatagtgaaatatatttttgatttaaagcttgtaacagcatgccactcaagtcattg

SEQ ID NO: 17423 - DNA, 468 bp, Homo sapiens
gcactaaccattgacttctatgatcccttgttacatttcaggaacctgatcctatttgattcagatattaatattcttttgtatgtgactttcccccctgtattagtccattttcacactgctataaggaactacctgaaactgggtaatttgtaaggaaaaggggtttaattgactcacagttccacacagctggggaggcctccggaaacttaaaatcatggcggaaggggaaggggaagcaaggcacattttacatagcagcaggggttggggaagtgccacacttataaaccatcaggtcttgtgatagtttactgagaatgatgatttccaatttcattcatgtcctttgcaagggcatggatgaagctagaagccatcattctcagttcatcagttttttaggttatgtttattttttcttaagcctaagaaaattatttccttggaattcagaaagctact

SEQ ID NO: 17424 - DNA, 415 bp, Homo sapiens
ttacattggttggtggcattagcctgtcaacagctggatgagatagaagttagaaaatggactttttgaggtcaggaagctaagcaaccagaagaaccaatttgtcaacttaaatcatctggggaatggaaaaaattattccacaatgtgggaaataaaagaccgcctggagctactggtttttgtttttattttctttttgttattcctctttgcacttcccttttccgagcagcattatgtgtgggttatagaaagcttacatgttgactttgttatgtggtcatttgatgtggtcgcgctaacgtttattgtaaatactgtgagtatttttcacccttctggcttaattacctgtggccacatcaacctgaatgtatttgagaggtaaaggggcccaagacttcagtaagag

SEQ ID NO: 17425 - DNA, 471 bp, Homo sapiens
tttgctttcctgatggaaaatctgaaaactagtttggtctgtggtaataaaaatccactggctctcctgccctggaaaagaccctaagagttcccctactgtaaatgctcagctaactagaacatagcaatatttattttcaacaaatatttattgggcacctactttgtgccgctcatttcaggtgcctaggaatacaacactaagcaaaatagaccaaaaaacaccgccctcatagagcttgtattttagtgaatacatcagaatatacagaatattttcaactaaaatttgatgggtttcatgcaatgaatgaacaaatagaaaatcagaaagtctgttcctggtctttccttctatatgactgttctatatgccaatcttcgtcactgaatctctctctgtcttcaaatgctcatgttaataatgtactaatgcattattatccaggtttttttccccaaaaaaaga

SEQ ID NO: 17426 - DNA, 429 bp, Homo sapiens
atgatttaaatcatctgttttttactaatgcatccagaagctttttttgtgtgtgtgggattaggccttatctgcaaataaactttggtagtgatataattataagagaacaataatatatttctgtagtctaccatttagtccatgttttatgcacgtttagaccattgaattaatctctgaaacaatagaaataaattctttactagaaatagcttgcttttgccttggctttgtggcaaagcgacattagggaacatatatggttgttgttgaacctgattgctttagcagcccttgggttgatagtatcaggttccagcctgccctgctaggtcaacgtggacccagggctttaaagagaaaagttcagggaaagttcacttctattgttttaccatggttacaaaacagaaaggaaaaaaaaaa

SEQ ID NO: 17427 - DNA, 357 bp, Homo sapiens
acagatggtacatgcagctttcctcccctttcctgactactgatcattcagctatgtcagttacaaaatgaactgcactttcagactcgctgggagggctggactggaaatttcacgggggcggaggcagggggccacgtaattatctattatcattacatcctcagcaccagcacagcagcctgttagcacttagtaggtattcaataaatattgcttgaataaatgagttaataagactgcataaataaacagaaactgtattgatagtacaagcttgttaaaaagtattagaatggagaggaagtgacactttcccacattactttacaagtgaatgagatcaaaaagaaaaat

SEQ ID NO: 17428 - DNA, 956 bp, Homo sapiens
gcaccagcagcttcatccgcaggcccactcggggtgaatagtgtgggagctctcaagagaaagaattttaggtttgtcgatagtaatcaccaccttcagcgctcctcccactgctggagagaccgcggactgggtgacaagtcttccaggctcccagaaagtttctgctgcaaagcgcagggtccgcctcccacttccaggagggaccaggagggaaccatcgcgaaaccccgaggctgccggggactctgactgaggcctttcctcctgtgtccctctcccccacgccggcctcccctcctttcaactctctgcgctttgaaaccgcggagttggggtagctaggccctccagcccggcgacaggcctcggccacaggcagcggggcggggtgtggacaggaacaaggaggtggggtggggaggaagcctcgggcagagcaggttctctgcggagtttcggcagccgggtttatccattttgattaaagaaaagtaaaaaaaatcccccaaaaccaaacaacaaaaaccctctcccaacccccaacccgcctccacagctgcattttgttcctgggactgttggtgtcaccagagcctctttttttatgcaatcctagactccattgcaaaggacttgtaaagcctattaatttttcaggcaaaacagatcaagcctgcctttgatgctgctgtttcctaatttagtattcaaaggtaaagaatcctactaccgctcttcactttttacataattaaaagagatttttcccccaggggcaaagaactagttgcttagtattttttgaagtgaaaggtctaactttatatcacatctgtttttatgctctttcctaaacataaccaatatttactctttgctggtacttagttgcatgctattcacccttgcattttaatttctgacagagaggggattagtattcctcttctaaa

SEQ ID NO: 17429 - DNA, 461 bp, Homo sapiens
aattcgcgccgcgtcgacacggctgcgagaaacgacagaagggtgattaaagaaaagtacacagctgcattttgttcctgggactgttggtgtcaccagagcctctttttttatgcaatcctagactccattgcaaaggacttgtaaagcctattaatttttcaggcaaaacagatcaagcctgcctttgatgctgctgtttcctaatttagtattcaaaggtaaagaatcctactaccgctcttcactttttacataattaaaagagatttttcccccaggggcaaagaactagttgcttagtattttttgaagtgaaaggtctaactttatatcacatctgtttttatgctctttcctaaacataaccaatatttactctttgctggtacttagttgcatgctattcacccttgcattttaatttctgacagagaggggattagtattcctcttctaaa

SEQ ID NO: 17430 - DNA, 1670 bp, Homo sapiens
ttagatgcaaggtttcagtcaggccagtaatttcagtccttaagttgcttaccatccaagagagccaataatgatcaaacaaggtggaaaaaggtcagtgccctacacaggtaaagtacttactcacgtagagatgagagaaggaaggcttgatggctctgaggccatttgggaagaattctggggaatggataaaatttagacatgaatgatggattatgccttccagaaagagagaatgaatcaaataagggaaaatatatggaggtagaataaggttgggcatggagagtttgaaaaacataaaatagagtgatgaggtggctgggacaagtggccctgaagggaagtttctagagagaaggatggagagaagatggaaccaagtgaggaaagtcctccgatgctagctccctgatgttaggccttcagatgctaggccctttcatgctgagcctccagatgctatgccctcccatgccatgccccaaagttattcattaggctgtgggaactatggaaagttgccagttccccatctctggtgataagagtcgcccctctttctggtactgtgtgggcgccttctcaatgggaaatttatgccctccttttaggcagataggcagataaggggagggcagagaactcttcctgcatctgttggttctctgttgccctcatctcaaaataatctttatgccaacgtggcataatttaggggtgacatattctgatccccttcactggggctggggaatatggaggatcaaattggcatctgctctccatctggtcatgaacagaattttaaaaggcatttctgcttcatcccttcctcatttccttccttccttcttcctttttctttctttctttttaaatgtttcatgctatagattggccctgcagatacttcagtttgccaccactattctacatttaagcttctgaacctcctataagtacagaatacatttttctcttggcatattttgactaataaaactgtgagatgttcaatgggcattgaattttgaagtcagtccaggagatgtacaaataatatccaaagtctgaaggcttaagctgtcatcacagagttactagaggacacttatctttgacatgatctgatatcagaaacgagtgtagacttgtagtcatttagaactcaaaagagatcttagagtcttctagatcagtggctcctaaaagctactcaagaatagggctcatgtttttaatggggaactttaagtggttgtttagacccccaccccaagatataaactgtggtggggcatgggcctgagaagcagagaatccttttcttttaagctgcccaggtgatgttaattcaaatccagtgataacagtgataagtaacacttagccaagtgtttcccatggctcttagcttcagagtgtgacccctatctaagtcaagtatcaaagatttttcttcatgccattactacagaaacagggtagaatactcatattccttcagctcaagagcagcagagagtttctgacaagtatttttgcatttggtaaaatggtagtctaagttggaactcagtaaactatttttgttttcaatgaggggaagtgtagaactgtagtactctcaaattattttttctcaaattggcctttgtgcaaaa

SEQ ID NO: 17431 - DNA, 726 bp, Homo sapiens
tttttaggatgttctgaggaaggaagaggccaacatggtcagttttatatgaagagaagattttgttccaaaggaaatgatggggaaaagcccagcttggggaggggtcagggaacagtgggcaagtgggaaatgagtccaccttctgccaggaagcccaagggggcatgtctttgagctgcaaaagaacaggtccacaaatcatagctgagattggcccagcggtaggaaaagcaacacagaatcaatttagtgtggttgaagcttgtgcgatgactcgggctatcacgctcctcagggcctgaatcatgggacacaatggatccgccagcttattccggcatcctttaactcttgaggagcaaatgccctggcaaggaatccgtcagaatctccttcccctcctgctgctgcgtgcagtgggccgtgccctggtgaggttcctgtgtcctctgtagaaggtaacagattagaaaagcagaagtcccttctctgtctagcatccttccaccttcttctcctcatctgcaaaatggggatgaaacacataaccccagggttgggagaaaggtctgacacagaggcaagtgtcagtgaacgtttgagaactctgaagcggtgatggaaatggggtattcctggtaaccagcaccctctctgacccacgtggtagttatccttttgccaaaatgtgtgactctcttaatacattttgagtctctaggg

SEQ ID NO: 17432 - DNA, 2137 bp, Homo sapiens
acacaaccttggacattagagcctgtccgtctgatctagagaaggaatgttgctggggaaggaaaactcagggcgaggtgagagaggacagaacctctaaccaggaagaggctgtccccgccaagctccggagaggcgcggaagcatgaccctcaggtggtaacagaaaacaatccagatggggtgcaggtgctgtaaaataatacaaagctatctctttgatccagtccaagtgccctctcctggctatgtcaatgaagtcaacagctgcaagctagatgaagacgacactgataaattaaaaggcaaatggagcagtgaagtcttggtgcagaaaaatgaccctcagaggcagggctcaaagaagactgagagcagcagcaggacagctgatccatgggagccctgctggcctcaccaagggccgctcccacagggggacgctggaggggaacaccatgcctgcggtgtcaacggcatcggccctgctgccactccacagcccactgggaattccagccccacccaggatgacaggggctcctgggccagtactgcaaatactgttcccccaactcaacccttcctggaaggagggggcaccaggaaacaggactgtgtgctgctggcctcagaagggacccaagtcatgagaaatggagactccagagctccttctgaggcagaaagttttgccttggaagtacaagaccatgtcttccagataccagccccagattaccttcagcattggggcccagctggagacaacgttgatcataatgaaaaggactgtgttttcaagaaccatactgaggatgaatccctagagggaattcagcccccagtgggggagcatggtttgaatacgcccttctctgtgaggagaagctgggattcattgaatgaggatgtggaaacagaagttctaagcatctgctttaatgagaagggtcctgttcatgccatgcctgtggttgactcaggaaacaggcaggaggatacccatggctccgatggagatggggatggggagattgtggacgaggatgcagcggtggcggaggcccttgcagctttagaagctgctactgcaggagaagatttggatgagactgattaggggaggggatttgcacagggaggtaagctggtgtcatgctgagcatgcagatgcatttgctccctggatgcatagcaggtgattctgccagcatgcaccagtgcagccttaccagttgtttacatccagcatctgttctgattgtcagcatctgtcccatgctgcttgtcacatatctggagtttcactctgtgtagatgagctgtcattcaggacactaggagaaaaatctgagtgggtcattgtgcccatatccacagaaaatgcagaagttgaacagcttgcttgacaaccctcaaacatctttgagcacctggtacagatgtttatgagaatactctaagatctcaacccttgatcccaaaggcacacaatcacagagcattccttttgactgtaaactgtttaccttgcttttgagagccaaacattgtacccaacctggaaaaagtaactaccccaattaaagtgcctcatgtgtccccagagcatggcttaacttcagggacaatcacccagggaactaataactaaccagttgttcaacagcgggttaagctcagcagttttcacagtagagcagaagtccccaggaaacaaagggttagtcattagctgagatgttgattttaaaacaccttgaccttaacttttttacattattacttttaaatctcctttgggattggggaggctggccaaaataagtcttaaaactgcttatgtcatatttggattttaagttcatgacattcggaacagcaaagccatatatgcaatgtttttatgccattaaatgtctgattccaattaaaatataacaacgtatgtgtctttctagaagtcttaactcaaaggtggttctaattttctcagaatatcagtgaccctggatgttactttcaatgtaaagaactaatctagatggccgggcgtggtggctcatgcctgtaatcccagcactttgggaggccgaggcgggtggatcacaaggtcaggagttcaagatcagcc

SEQ ID NO: 17433 - DNA, 726 bp, Homo sapiens
  misc_feature (27)..(27): n is a, c, g, or t
aacctttaaaatttttttgggaaactngaaaaggaggttagggggaaaattctaagatctcaacccttgatcccaaaggcacacaatcacagagcattccttttgactgtaaactgtttaccttgcttttgagagccaaacattgtacccaacctggaaaaagtaactaccccaattaaagtgcctcatgtgtccccagagcatggcttaacttcagggacaatcacccagggaactaataactaaccagttgttcaacagcgggttaagctcagcagttttcacagtagagcagaagtccccaggaaacaaagggttagtcattagctgagatgttgattttaaaacaccttgaccttaacttttttacattattacttttaaatctcctttgggattggggaggctggccaaaataagtcttaaaactgcttatgtcatatttggattttaagttcatgacattcggaacagcaaagccatatatgcaatgtttttatgccattaaatgtctgattccaattaaaatataacaacgtatgtgtctttctagaagtcttaactcaaaggtggttctaattttctcagaatatcagtgaccctggatgttactttcaatgtaaagaactaatctagatggccgggcgtggtggctcatgcctgtaatcccagcactttgggaggccgaggcgggtggatcacaaggtcaggagttcaagatcagcc

SEQ ID NO: 17434 - DNA, 832 bp, Homo sapiens
  misc_feature (8)..(8): n is a, c, g, or t
ccggcgcnatgggcgccgggacccgccgccgccgccgccgccgccgtctggccccaggaagagaagttaaacttctagagaaacctaacagacaatatccacaacaggtggtaacagaaaacaatccagatggggtgcaggtgctgtaaaataatacaaagacagagtcttgctgttgtcaccccggctgaagtgcagtggcatgatctcggctcacggcaacctctgcctcccgggttcaactgactctcctgcctcagcctcccgagtagctgggactacaggtgcccgccaccatgcctacctaatttttgtatttttagtagagatggggtttcaccgtgttgtccaggctggtctcgaactcctgacctcatgatctgcccaccttggcctcccaaagtgctgagattacaggtgtgagccaccgcacccggccaagaaatactttttaaagatataattgtacctccattgatctgaactagcaatcacagctgctctggagtctgcaagtctatgaccttcatctacctggaagaaaactgaatggctcacacacctggacctgatccagacagagccttaaaatccatcagctgctcatcagatgatcccatcggatgccaaggaggccatccaaaggctggaatgatcagttctgtgagctattgagctatgtgaagaaacggcggttgatttgctttcttgccaagaaaagcaaagctccctcacactccacggccactgagcatgtaagctcccaagtataaatttcttcccatccaagccctctcactacctagccctgagatatggggaacattaatcc

SEQ ID NO: 17435 - DNA, 2088 bp, Homo sapiens
  misc_feature (8)..(8): n is a, c, g, or t
ccggcgcnatgggcgccgggacccgccgccgccgccgccgccgccgtctggccccaggaagagaagttaaacttctagagaaacctaacagacaatatccacaacaggtggtaacagaaaacaatccagatggggtgcaggtgctgtaaaataatacaaagctatctctttgatccagtccaagtgccctctcctggctatgtcaatgaagtcaacagctgcaagctagatgaagacgacactgataaattaaaaggcaaatggagcagtgaagtcttggtgcagaaaaatgaccctcagaggcagggctcaaagaagactgagagcagcagcaggacagctgatccatgggagccctgctggcctcaccaagggccgctcccacagggggacgctggaggggaacaccatgcctgcggtgtcaacggcatcggccctgctgccactccacagcccactgggaattccagccccacccaggatgacaggggctcctgggccagtactgcaaatactgttcccccaactcaacccttcctggaaggagggggcaccaggaaacaggactgtgtgctgctggcctcagaagggacccaagtcatgagaaatggagactccagagctccttctgaggcagaaagttttgccttggaagtacaagaccatgtcttccagataccagccccagattaccttcagcattggggcccagctggagacaacgttgatcataatgaaaaggactgtgttttcaagaaccatactgaggatgaatccctagagggaattcagcccccagtgggggagcatggtttgaatacgcccttctctgtgaggagaagctgggattcattgaatgaggatgtggaaacagaagttctaagcatctgctttaatgagaagggtcctgttcatgccatgcctgtggttgactcaggaaacaggcaggaggatacccatggctccgatggagatggggatggggagattgtggacgaggatgcagcggtggcggaggcccttgcagctttagaagctgctactgcaggagaagatttggatgagactgattaggggaggggatttgcacagggaggtaagctggtgtcatgctgagcatgcagatgcatttgctccctggatgcatagcaggtgattctgccagcatgcaccagtgcagccttaccagttgtttacatccagcatctgttctgattgtcagcatctgtcccatgctgcttgtcacatatctggagtttcactctgtgtagatgagctgtcattcaggacactaggagaaaaatctgagtgggtcattgtgcccatatccacagaaaatgcagaagttgaacagcttgcttgacaaccctcaaacatctttgagcacctggtacagatgtttatgagaatactctaagatctcaacccttgatcccaaaggcacacaatcacagagcattccttttgactgtaaactgtttaccttgcttttgagagccaaacattgtacccaacctggaaaaagtaactaccccaattaaagtgcctcatgtgtccccagagcatggcttaacttcagggacaatcacccagggaactaataactaaccagttgttcaacagcgggttaagctcagcagttttcacagtagagcagaagtccccaggaaacaaagggttagtcattagctgagatgttgattttaaaacaccttgaccttaacttttttacattattacttttaaatctcctttgggattggggaggctggccaaaataagtcttaaaactgcttatgtcatatttggattttaagttcatgacattcggaacagcaaagccatatatgcaatgtttttatgccattaaatgtctgattccaattaaaatataacaacgtatgtgtctttctagaagtcttaactcaaaggtggttctaattttctcagaatatcagtgaccctggatgttactttcaatgtaaagaactaatctagatggccgggcgtggtggctcatgcctgtaatcccagcactttgggaggccgaggcgggtggatcacaaggtcaggagttcaagatcagcc

SEQ ID NO: 17436 - DNA, 2022 bp, Homo sapiens
  misc_feature (8)..(8): n is a, c, g, or t
ccggcgcnatgggcgccgggacccgccgccgccgccgccgccgccgtctggccccaggaagagaagttaaacttctagagaaacctaacagacaatatccacaacaggtggtaacagaaaacaatccagatggggtgcaggtgctgtaaaataatacaaagctatctctttgatccagtccaagtgccctctcctggctatgtcaatgaagtcaacagctgcaagctagatgaagacgacactgataaattaaaaggcaaatggagcagtgaagtcttggtgcagaaaaatgaccctcagaggcagggctcaaagaagactgagagcagcagcaggacagctgatccatgggagccctgctggcctcaccaagggccgctcccacagggggacgctggaggggaacaccatgcctgcggtgtcaacggcatcggccctgctgccactccacagcccactgggaattccagccccacccaggatgacaggggctcctgggccagtactgcaaatactgttcccccaactcaacccttcctggaaggagggggcaccaggaaacaggactgtgtgctgctggcctcagaagggacccaagtcatgagaaatggagactccagagctccttctgaggcagaaagttttgccttggaagtacaagaccatgtcttccagataccagccccagattaccttcagcattggggcccagctggagacaacgttgatcataatgaaaaggactgtgttttcaagaaccatactgaggatgaatccctagagggaattcagcccccagtgggggagcatggtttgaatacgcccttctctgtgaggagaagctgggattcattgaatgaggatgtggaaacagaagttctaagcatctgctttaatgagaagggtcctgttcatgccatgcctgtggttgactcaggaaacaggcaggaggatacccatggctccgatggagatggggatggggagattgtggacgaggatgcagcggtggcggaggcccttgcagctttagaagctgctactgcaggagaagatttggatgagactgattaggggaggggatttgcacagggaggtaagctggtgtcatgctgagcatgcagatgcatttgctccctggatgcatagcaggtgattctgccagcatgcaccagtgcagccttaccagttgtttacatccagcatctgttctgattgtcagcatctgtcccatgctgcttgtcacatatctggagtttcactctgtgtagatgagctgtcattcaggacactaggagaaaaatctgagtgggtcattgtgcccatatccacagaaaatgcagaagttgaacagcttgcttgacaaccctcaaacatctttgagcacctggtacagatgtttatgagaatactctaagatctcaacccttgatcccaaaggcacacaatcacagagcattccttttgactgtaaactgtttaccttgcttttgagagccaaacattgtacccaacctggaaaaagtaactaccccaattaaagtgcctcatgtgtccccagagcatggcttaacttcagggacaatcacccagggaactaataactaaccagttgttcaacagcgggttaagctcagcagttttcacagtagagcagaagtccccaggaaacaaagggttagtcattagctgagatgttgattttaaaacaccttgaccttaacttttttacattattacttttaaatctcctttgggattggggaggctggccaaaataagtcttaaaactgcttatgtcatatttggattttaagttcatgacattcggaacagcaaagccatatatgcaatgtttatgcattaatgttgttcacaaaaaaaaaaagaaaaaaaaaattgtggggctgggccaaaattttaaaactgtgggggggccaaggaagaatggaggtcggaatgtggaaggtgggtccccaaagcgggggggtgaacagggtgggtggtaacaagcggtacgag

SEQ ID NO: 17437 - DNA, 1161 bp, Homo sapiens
acacaaccttggacattagagcctgtccgtctgatctagagaaggaatgttgctggggaaggaaaactcagggcgaggtgagagaggacagaacctctaaccaggaagaggctgtccccgccaagctccggagaggcgcggaagcatgaccctcaggtggtaacagaaaacaatccagatggggtgcaggtgctgtaaaataatacaaagctatctctttgatccagtccaagtgccctctcctggctatgtcaatgaagtcaacagctgcaagctagatgaagacgacactgataaattaaaaggcaaatggagcagtgaagtcttggtgcagaaaaatgaccctcagaggcagggctcaaagaagactgagagcagcagcaggacagctgatccatgggagccctgctggcctcaccaagggccgctcccacagggggacgctggaggggaacaccatgcctgcggtgtcaacggcatcggccctgctgccactccacagcccactgggaattccagccccacccaggatgacaggggctcctgggccagtactgcaaatactgttcccccaactcaacccttcctggaaggagggggcaccaggaaacaggactgtgtgctgctggcctcagaagggacccaagtcatgagaaatggagactccagagctccttctgaggcagaaagttttgccttggaagtacaagaccatgtcttccagataccagccccagattaccttcagcattggggcccagctggagacaacgttgatcataatgaaaaggactgtgttttcaagaaccatactgaggatgaatccctagagggaattcagcccccagtgggggagcatggtttgaatacgcccttctctgtgaggagaagctgggattcattgaatgaggatgtggaaacagaagttctaagcatctgctttaatgagaagggtcctgttcatgccatgcctgtggttgactcaggaccccgccgccgccgccgccgccgccgtctggccccaggaagagaagttaaacttctagagaaacctaacagacaatatccacaacaggtggtaacagaaaacaatccagatggggtgcaggtgctgtaaaataacaaagctatctcttgatccagtctctggccccgggtacc

SEQ ID NO: 17438 - DNA, 470 bp, Homo sapiens
accagtggctcccattttcattttagccattttgtcgcctgcacccactcccttcatacaatctagtcagaatagcagttctagagcacaggttctcagtctaagctatggaaaagctccccttatccaacagagtttaaaagtagtgacttgggtttttgcgagtgctttgtttactaaggactttggggaggaaccatgctaagccatgaccagtgaggagaagcaacagagcctgtctgtccccatgagcggagtctgtcctctgctcttctgcagtcaggtcactgcctactgcctgggggctctagtcattccagtggaagacgaatgtaacctgcgtggtgatgtgacaactgtttcctccctgaccccagaggatctggctctaggttgggatcaatcctgaatttcgttatgtgttaatttacttttattaaaaaagtatagtatatataaataatacaaaa

SEQ ID NO: 17439 - DNA, 143 bp, Homo sapiens
attaaatggaaatgtttgaatgctttataaaatagtttatataaatttaaggtgaagcagagaagctagtaatgtatctcaagtcaagctttgctacttaattctctccacacagattagcaaacccactgttcaggctgctc

SEQ ID NO: 17440 - DNA, 442 bp, Homo sapiens
gagaaaaaaaaaaaggggtctctgcccaaaaatatctgtaggaaagagaaaggacaaagtaatcagagcaagagatcccttctacatagaatttcttctaaaagaagaggatgggaaaagtcaacaatttcaagaaacaatctagattatatattagctgttcactttaactggtagggatctgacagaaaataaacaatgaagagcattcctaatgcgttccttacaaatgtatatattttaaagtctctcatacttgttttaggctattctttggtatacgacttttcaagtgctattttttattccatgtatactgaaaaacagatgtaataaaaataattcagccagtggttttacttatgtctgcatattagaatcgtttgggaaaactttgaaacaaacaaacaaaaccaataaagctctgacactaacccagagc

SEQ ID NO: 17441 - DNA, 528 bp, Homo sapiens
aaaaaaaaaaaaagacagatttaatcataagaatatgcagtgcatcttctcaccaatacgataccatcagtagggctccaggataacagtggattacaactgagagctgcaagacatggactctattttaagaaggaatttctagggaaacccaaagacaacaggggagacaaggatattgaggaaaattggagcctctagcacctacagcgaacatcagatgcagcctgttagccagataaacatacaactcacattaaaggtctgtttacgtaagttcttgttacctaatatatcatgtctggcttcagtaaaaaagtacaaagcatgctaaaagggaaaaaagaagagacaaagcgagcatcagagccagactcagatatgtcagaaatttgagagttatcagactgggaatttaaaataactgattaatgtgccagatttctaatagaaaaaatgaacaacatgcaagaatagtcacgtagtataagcaacagatggaaacttagaatcaaaaagaaatgcaaa

SEQ ID NO: 17442 - DNA, 385 bp, Homo sapiens
caaatatattagtgttgttgtatgtttttaaatacttacttccaaatgatttaatctattttggtcattaaaatatgtcttaatttctcaaagaaaggcatgaagtcttaaattttatgagttttttatgctatcaatgagaaagataaagtaaaaattacagtagaaaaagacaaagtccttcaacaaagttaagaaagtttataataattggctaatttttttgaggtagttcatgtagagtgtgttgggagctatcctgaaggttaagtttattaaaatttagggtaaagtagtaagtagttccaagttcaggagatacacctgaataattctgaccacagtataaattttgcaatatgtcgaaaatgaaatcccaagcata

SEQ ID NO: 17443 - DNA, 638 bp, Homo sapiens
taaactgctctcccaacttacaaacgagtaaatttaattgataccagagtatccagctcttcccacctttccccaggaaccccttccgtcttgccgtgggtggcaggcatcttgctgctgtcctaactggcactcttaaacaatttcctacagggatgtcttaatccatttcacactgctgtaaagaactacctgagattgggtaatttatgaagaaagaggtttaagtcactcacagttccgcaggcttaacaggacgcatggctggggaggcctcaggaaacttacaatcatagcgaaaaggtgaaggggaaacaagcacatcttccccatggcagagcaggagagagagagaagggggaagtgccacacactttcaaacaaccagatctcctgagaactcactgtcacgggaacagcaagggggaagtccacccccctgattcagtcatctgccaccaggcctctcccctcacacatggggattattatacaattcgagatgagatttgggtgggaacacagagccaaaccacatcaaggggtgtccaatcatttggcttcccagggccacattggaagaagaattgtctcaggccacacataaaataatactaacgatagctgatgagcttaaa

SEQ ID NO: 17444 - DNA, 831 bp, Homo sapiens
cagacaaaaccttcataccattttattatttaacgtgtttcatattattttaacgtgtgacatgaaacaatttcaggaaattgtattaggtattgcgctcgtgtcttcttaggcgtcctcatcccttttcacctcggagctcagcgtcttcctcagcagcacttccatgtcatctgccccgtgaaatcagcctaacgccgtttctcaatgacgtggatcgccctaggccaccgcaaccttccggaagctctctcagctcagttcccattctcccaccatctcttggttctccttctacctcaccggttgctagtcctccgcttcgcagctgaaaatgtgcccggggcctactgtgggcctagccaggcctgcttacgcagtgcagtttcccatgaatgatgcccagtcattatcacataacctgtggcaagccagcaagatggccctggtgacagcaaaagaaactgcactaggacctgaatgtagatctcagtcatgttccttactaacagcacgttttgcaaccatgcgttaaagaaacatctgactcacaacaaaattttaaagggtttatttgagtgaaaagcaatttatgaattggggaacacctgactgaaagagcgttagtattccagagacaaaacatcaagtgcaagtttttattgggaaaatgtagaagcacaataaagaaattatttgattggttacagttatagagttgctttctttggcttatcctgttggaaagtcagtagttatataatcatgatagttggttacttatgattgggtagattaaaatttatctctgtctaatggaagcatttatca

SEQ ID NO: 17445 - DNA, 539 bp, Homo sapiens
tggctggtacctcctagccctggctcaggccggcatgtaggtacttctgttggatgtgagcacttgcttcctgagggagaagcctgggctcctccacctgctccttgcttaatcccatctcaggagtgtctcgggccaggtgccaggtgaggctcagacaagaaaaagagcctggagtccctgggacaaaggcagggctccctggaaagtaccgtgtgtatttttccttcctctgggacacagcaggcctggggatttctcccttactcaagcagcaaggagatggcctaggagtgtccctggcacccagcctgaaccctactgagcctcaggcgtcctcatcccttttcacctcggagctcagcgtcttcctcagcagcactccagcctgggcaacagagaagactctgtctcaaaaaagaaaaaaaagaaatgactcatgcctgtaatcccagcactttgggtgtgaggccgaggcagggcagatgactagtctttgagaccagcctgggcaacatagcaagaccttgtctctactg

SEQ ID NO: 17446 - DNA, 1051 bp, Homo sapiens
tggctggtacctcctagccctggctcaggccggcatgtaggtacttctgttggatgtgagcacttgcttcctgagggagaagcctgggctcctccacctgctccttgcttaatcccatctcaggagtgtctcgggccaggtgccaggtgaggctcagacaagaaaaagagcctggagtccctgggacaaaggcagggctccctggaaagtaccgtgtgtatttttccttcctctgggacacagcaggcctggggatttctcccttactcaagcagcaaggagatggcctaggagtgtccctggcacccagcctgaaccctactgagcctcaggcgtcctcatcccttttcacctcggagctcagcgtcttcctcagcagcacttccatgtcatctgccccgtgaaatcagcctaacgccgtttctcaatgacgtggatcgccctaggccaccgcaaccttccggaagctctctcagctcagttcccattctcccaccatctcttggttctccttctacctcaccggttgctagtcctccgcttcgcagctgaaaatgtgcccggggcctactgtgggcctagccaggcctgcttacgcagtgcagtttcccatgaatgatgcccagtcattatcacataacctgtggcaagccagcaagatggccctggtgacagcaaaagaaactgcactaggacctgaatgtagatctcagtcatgttccttactaacagcacgttttgcaaccatgcgttaaagaaacatctgactcacaacaaaattttaaagggtttatttgagtgaaaagcaatttatgaattggggaacacctgactgaaagagcgttagtattccagagacaaaacatcaagtgcaagtttttattgggaaaatgtagaagcacaataaagaaattatttgattggttacagttatagagttgctttctttggcttatcctgttggaaagtcagtagttatataatcatgatagttggttacttatgattgggtagattaaaatttatctctgtctaatggaagcatttatca

SEQ ID NO: 17447 - DNA, 481 bp, Homo sapiens
ttaagggctgggtatgctttgaagtaccagtaagagagcagaaggatatgaaaatgctccccaaataagcagattagtactttgagatgtggcacaaccttgtgttgatggattctgtgaaaattaccaagatttgtgactttgactcttcaccatgaggggctggggatagaggtgggctatagtataagaatatgccggccgtgcacagtggctcacgcctgtaatcccagcactttgggaggccaaagcgggcagatcacgaggtcaggagatcgagaccatcctggctaacacggtgaaaccccgtctctactaaaaaatacaaaaaaattagccgggcatggtggcgggtgcttgtagtcccagctactcgggaggctgaggcaggagaatggcatgaacccgggaggtggagctcgcagtgagccgagatcgcgccactgcactccagcctgggcaatggaacgagactccatct

SEQ ID NO: 17448 - DNA, 473 bp, Homo sapiens
tttattttggagatgtgtgctttactcatgtgtttcaagagatccatgatttatgaagtacttttaacacatttcgtgcacttacttccataggaatgtggctgctagagaccctggtgcttcccggggatagttggccgtagatttgcaccacagcagtcatattaaattaaagctcttgcttctactgagcccaaactggagtttagactgtccttcagcatgatgttcccaggtggtaccatcaagtccacgagctggctgccatctgtgaactagactttgctttggctcagccgagttactgtttcagtgttcatctaaatgacttattatatgactaaaatattataaatgcaagaaatggagctatgtgtaatcaccataaacttttaaaatctcatactaaatgtacaaacccttcatcagtgacttccttctctttttctcacattaaaacaataccttgacta

SEQ ID NO: 17449 - DNA, 1120 bp, Homo sapiens
tagcacttcatagactgctatcacgcattcatttttactagtacctattgaacactaagttccaggcactgggctaggcactgggatggtgtggtgagcaaaaactgaccagtcctgccgtggagtttgctgggggagacacatgttactcaaagaatcacactaaggatagcaatttatctcaaagctgcaagttcctgccatctacatgtgcccagagtccccaaaattgagtgtcaaacagaggctgggtgacctcctgtccaggattgctctcatcgtatgaatcgaagttttcatcttaacgtgtttttttctcctgagaataggccaaccaatcaatggctcagacagataagccaacatgcatcccgccggagctgccgaagatgctgaaggagtttgccaaagccgccattagggtgcagccgcaggacctcatccagtgggcagccgattattttgaggccctgtcccgtggagagacgcctccggtgagagagcggtctgagcgagtcgctttgtgtaaccgggcagagctaacacctgagctgttaaagatcctgcattctcaggttgctggcagactgatcatccgtgcagaggagctggcccagatgtggaaagtggtgaatctcccaacagatctgtttaatagtgtgatgaatgtgggtcgcttcacggaggagatcgagtggctgaagtttttagcccttgcttgcagcgctctgggagttactattaccaaaactctcaagatagtgtgtgaggtcttatcatgtgaccataatggtgggtcgccccggatcccgttcagcaccttccagtttctctacacgtatattgccaaagtggatggggagatctctgcatcacatgtcagcaggatgctaaactacatggaacaggaagtaattggccctgatggtataatcacagtgaatgactttacccaaaaccccagggttcagctggagtaaaagcacaattttggcaattttaaaggaagatacagagatgattgtacttcagaatgactgaaacccatataccacccaaaatcaattttcttgtacaactggtacacactaataaacaattaaacatatgagatcagaaa

SEQ ID NO: 17450 - DNA, 905 bp, Homo sapiens
ctggcagcggagcccgcgcagggtttgccaggcgaaggcggagcgctaacgtctaacgctaacggcggtcgtgccccgccgctgctgtcacccccggccgctgctgccctccccgccgaggttctactgctctccttcttaagaagggtgggaggcactcggtctctccccacacctctcgcctgaggccaggcgccaggtgtcgcctgaagccagacagccggtttgggagcgagcctgagttattttgaggccctgtcccgtggagagacgcctccggtgagagagcggtctgagcgagtcgctttgtgtaaccgggcagagctaacacctgagctgttaaagatcctgcattctcaggttgctggcagactgatcatccgtgcagaggagctggcccagatgtggaaagtggtgaatctcccaacagatctgtttaatagtgtgatgaatgtgggtcgcttcacggaggagatcgagtggctgaagtttttagcccttgcttgcagcgctctgggagttactattaccaaaactctcaagatagtgtgtgaggtcttatcatgtgaccataatggtgggtcgccccggatcccgttcagcaccttccagtttctctacacgtatattgccaaagtggatggggagatctctgcatcacatgtcagcaggatgctaaactacatggaacaggaagtaattggccctgatggtataatcacagtgaatgactttacccaaaaccccagggttcagctggagtaaaagcacaattttggcaattttaaaggaagatacagagatgattgtacttcagaatgactgaaacccatataccacccaaaatcaattttcttgtacaactggtacacactaataaacaattaaacatatgagatcagaaa

SEQ ID NO: 17451 - DNA, 1032 bp, Homo sapiens
ctggcagcggagcccgcgcagggtttgccaggcgaaggcggagcgctaacgtctaacgctaacggcggtcgtgccccgccgctgctgtcacccccggccgctgctgccctccccgccgaggttctactgctctccttcttaagaagggtgggaggcactcggtctctccccacacctctcgcctgaggccaggcgccaggtgtcgcctgaagccagacagccggtttgggagcgagcctgagccaaccaatcaatggctcagacagataagccaacatgcatcccgccggagctgccgaagatgctgaaggagtttgccaaagccgccattagggtgcagccgcaggacctcatccagtgggcagccgattattttgaggccctgtcccgtggagagacgcctccggtgagagagcggtctgagcgagtcgctttgtgtaaccgggcagagctaacacctgagctgttaaagatcctgcattctcaggttgctggcagactgatcatccgtgcagaggagctggcccagatgtggaaagtggtgaatctcccaacagatctgtttaatagtgtgatgaatgtgggtcgcttcacggaggagatcgagtggctgaagtttttagcccttgcttgcagcgctctgggagttactattaccaaaactctcaagatagtgtgtgaggtcttatcatgtgaccataatggtgggtcgccccggatcccgttcagcaccttccagtttctctacacgtatattgccaaagtggatggggagatctctgcatcacatgtcagcaggatgctaaactacatggaacaggaagtaattggccctgatggtataatcacagtgaatgactttacccaaaaccccagggttcagctggagtaaaagcacaattttggcaattttaaaggaagatacagagatgattgtacttcagaatgactgaaacccatataccacccaaaatcaattttcttgtacaactggtacacactaataaacaattaaacatatgagatcagaaa

SEQ ID NO: 17452 - DNA, 1190 bp, Homo sapiens
ctggcagcggagcccgcgcagggtttgccaggcgaaggcggagcgctaacgtctaacgctaacggcggtcgtgccccgccgctgctgtcacccccggccgctgctgccctccccgccgaggttctactgctctccttcttaagaagggtgggaggcactcggtctctccccacacctctcgcctgaggccaggcgccaggtgtcgcctgaagccagacagccggtttgggagcgagcctgagcaatttatctcaaagctgcaagttcctgccatctacatgtgcccagagtccccaaaattgagtgtcaaacagaggctgggtgacctcctgtccaggattgctctcatcgtatgaatcgaagttttcatcttaacgtgtttttttctcctgagaataggccaaccaatcaatggctcagacagataagccaacatgcatcccgccggagctgccgaagatgctgaaggagtttgccaaagccgccattagggtgcagccgcaggacctcatccagtgggcagccgattattttgaggccctgtcccgtggagagacgcctccggtgagagagcggtctgagcgagtcgctttgtgtaaccgggcagagctaacacctgagctgttaaagatcctgcattctcaggttgctggcagactgatcatccgtgcagaggagctggcccagatgtggaaagtggtgaatctcccaacagatctgtttaatagtgtgatgaatgtgggtcgcttcacggaggagatcgagtggctgaagtttttagcccttgcttgcagcgctctgggagttactattaccaaaactctcaagatagtgtgtgaggtcttatcatgtgaccataatggtgggtcgccccggatcccgttcagcaccttccagtttctctacacgtatattgccaaagtggatggggagatctctgcatcacatgtcagcaggatgctaaactacatggaacaggaagtaattggccctgatggtataatcacagtgaatgactttacccaaaaccccagggttcagctggagtaaaagcacaattttggcaattttaaaggaagatacagagatgattgtacttcagaatgactgaaacccatataccacccaaaatcaattttcttgtacaactggtacacactaataaacaattaaacatatgagatcagaaa

SEQ ID NO: 17453 - DNA, 1078 bp, Homo sapiens
ctggcagcggagcccgcgcagggtttgccaggcgaaggcggagcgctaacgtctaacgctaacggcggtcgtgccccgccgctgctgtcacccccggccgctgctgccctccccgccgaggttctactgctctccttcttaagaagggtgggaggcactcggtctctccccacacctctcgcctgaggccaggcgccaggtgtcgcctgaagccagacagccggtttgggagcgagcctgagcaatttatctcaaagctgcaagttcctgccatctacatgtgcccagccaaccaatcaatggctcagacagataagccaacatgcatcccgccggagctgccgaagatgctgaaggagtttgccaaagccgccattagggtgcagccgcaggacctcatccagtgggcagccgattattttgaggccctgtcccgtggagagacgcctccggtgagagagcggtctgagcgagtcgctttgtgtaaccgggcagagctaacacctgagctgttaaagatcctgcattctcaggttgctggcagactgatcatccgtgcagaggagctggcccagatgtggaaagtggtgaatctcccaacagatctgtttaatagtgtgatgaatgtgggtcgcttcacggaggagatcgagtggctgaagtttttagcccttgcttgcagcgctctgggagttactattaccaaaactctcaagatagtgtgtgaggtcttatcatgtgaccataatggtgggtcgccccggatcccgttcagcaccttccagtttctctacacgtatattgccaaagtggatggggagatctctgcatcacatgtcagcaggatgctaaactacatggaacaggaagtaattggccctgatggtataatcacagtgaatgactttacccaaaaccccagggttcagctggagtaaaagcacaattttggcaattttaaaggaagatacagagatgattgtacttcagaatgactgaaacccatataccacccaaaatcaattttcttgtacaactggtacacactaataaacaattaaacatatgagatcagaaa

SEQ ID NO: 17454 - DNA, 532 bp, Homo sapiens
acaggcatgagccaccgtgcccggcctcttcttttgtttttattctggagttacttttagtatgttacagctttgtaggggattacctatttcatttatgttttcaaatttattggcacaaagttgttcatagtattgccttattatttctgattctgtagaattgtctttataattttataatcagactatagtgtaatgtgtttaaaaatcaaagaaacaatacaattagcataataacataaactatgaagatggaatatgaccaaatacatctgcctggacacccagcgaaaagacataccttaaatatggtgacttggaacagctgaaaatcaaagaataagtgaaagcattaggcaagtgcaaacaaattaaagctactgttgtggcttaatattgaacacagatgtatttggggcaaaagccattaggattaaaaacattttataatgccaaagactaaaattcacaatgaaaatataagctatgaatatcaatgcattaagtcacgtagcaaaacttatatgga

SEQ ID NO: 17455 - DNA, 498 bp, Homo sapiens
gaagaaatccaggctcagaccgtcggagtccccacccatgagcacccttctccactgatcactcagaacatggtaggccctagagagacagcagcccgaatcttcccagaaaccctgcaggagattccttcttcccattttatagaagggaggctgaggctcggcacgttgaaatggcttgaccaaggtcccacaggcaaaaaaatggtacagcaagatattgtaacccaatatctggctgcaaaacccagtctctccccaacccacctatcgtcaccgagattgtaaaacttctaaccgggaagaatcaaatacatgcacaacgggttacaggttaacagacagatgggagcggaaagggacattccagcgcttccctgggcgtgtcgcacagggcaactccaaccacaggcgaattttcctgggtgacagttaaactcctttttgcatgaaaaaatacagattcttattaaaacaataatcgattagactataaaa

SEQ ID NO: 17456 - DNA, 380 bp, Homo sapiens
aataataatacccttgtgtcaggcttcctgtggtctagcactgtgtcccgtactttatagtttatttcctttaatactcatgcccatctagggtagtaggtaccatggttgttcccagttgatatatgacggaatcgaggcttagcagaataagaagtcacccaaactcatacccactggtcagcagtacagctagaattcaaagccacacttgtctaggtccaaaatctgcacccctaattaaccactcctggtaagaagctggttataagggctggtcaagtcagctatggaagaattctcagaaagtgactctaaaggtgttctttgaaggttgtgtaggaattcaccaaaactggaaggagacaggccttccttgc

SEQ ID NO: 17457 - DNA, 200 bp, Homo sapiens
catgggactaaagatttgagaatagggactgatttcagaaaggtgatttggggtgtcagttgcagtggctcacgcctgtattctcagagctttgagaggctgaggtgggaagatcacttgagcccaggagttcaaggttacaggaaactgtgattatgccactgcactccagtgtgggtgacacagtgagatgtggtctc

SEQ ID NO: 17458 - DNA, 338 bp, Homo sapiens
tatttaaagtttttgaattcattcaccaagttcttgaatctgttaaagaagatctttgatttgttcttaaatctaaccaagtagagagtaccatttgtttggggctccatgtctgtatggtgtaagtaatctttaaacaagcaaatatcacaaggtgctcacattttctaaacaggtatttgaccctgtattccagctgctaaaacatcaacattgtataaaaattatctgataaatagcatttctgttttcaaaagtcaaaaccaaattattgatatgctttacaatttaggggattaattcaggttgtgttttataaggtccaattttccaaatat

SEQ ID NO: 17459 - DNA, 554 bp, Homo sapiens
atagaacatttcttagtatattcgccatggagtaacctcttaaaaaatctgataaacaattttggcatttattcacctttctcccaagtggaattacaaacatttgaacttgatggactttcataattatctgatactagccatataaccttgaagaagcttctaagcctctctgtgcctcagtttctgcatctgtaaagatgataaccccaccttataggggaaatgcaaagattaaatgtgtcactgcacgtgagacaggtacatgcggagcactcagtgcttgttgattcttacgatgttacgttcaccattatggatattattcaaactgagactgtctgtgacaattactgttcagagttgtacagttgatttaggcagcaagtcttctggttcttaatccagtggtgtttttgtgcaattcagaagacatgtatgttgttcccagtaatgacttggtgtgtttgctgaggtagttcggtaggactgctagagctagccatgaaagcataatatattttcacagagttgagctcagttttcttctagaa

SEQ ID NO: 17460 - DNA, 441 bp, Homo sapiens
agacacacccaaaaaaaaaaaaacaaaacccaagcaaggtacacaccagggcagcttcagacacagccctctctagaggcttcagaagtgtaaactgcctgctgcaagggaatttaactcataattaaaaaaaaaaaaaaaaaggcaaggtgcccagggtggctcaaacctggaatcccagcactttgagcagctgaagcaggaggactgcctaaccctacgagttcaaaatcagtctgggcaatatagcaagatcctgtctctacgaaaaaaccaaaccaaaaccaaaaaaactagccaggtgtggtggtgcacctgtagtcccagctactcggcagaatgaagcgggacgatcgcctgagcccaggaggtcgaggctgcagcgagctatgactgcaccactgcactccagcctgggaaacagagcgagactctgtctca

SEQ ID NO: 17461 - DNA, 5398 bp, Homo sapiens
tgctccggctacttagagtcgtcggcgcggcggtgggaaagcagagccgagccgggactgtccagtgggagcaggcgccccggccagcgcagacctggaggcgcacgggcgccgcaccgcacgattcggctcggggtagagcggagccgcagccccacgcgcagcccaggacccactcgccaccgccgcttcctcagcacccatggggaccaggagactttaaaggagtttggggtttcgggagcagggaaatcacggatccccgctcctggccctcgcctcgccacctcattgatgggcaaccaactggaccgcatcacccacctcaactacagcgagttgcccacaggggacccgtcggggattgaaaaggacgaactgcgggtcggggttgcctacttcttctcggatgatgaggaagacctggacgaacgcgggcagcccgacaagtttggcgtgaaggcccccccgggttgcaccccctgcccggagagccccagccgccaccaccaccacctgctgcaccagctggtcctcaacgagactcagttttccgcctttcggggccaggaatgcatcttttccaaagtgagcggtggccctcagggcgccgacctaagcgtctacgcggtcaccgcgctgccagcgctctgcgaacccggcgacctgctggagctgctgtggctgcagcccgcgccggagccgcccgcgcccgccccgcactgggccgtctacgtgggcggcgggcagatcatccacctgcaccaaggcgagatccgccaggacagcctgtatgaggcgggcgcggccaacgtgggccgggtggtgaatagctggtaccgctaccgcccgctggtggccgagctggtggtgcagaacgcctgcggccacctgggcctcaagagcgaggagatctgctggacgaactcggagagcttcgccgcctggtgccgctttggcaagcgggagttcaaggcgggaggggaggtgccggcaggcacgcagcccccgcagcagcagtactatctcaaggtgcacctgggagagaacaaggtccacaccgccaggtttcacagcctggaagacctcatccgcgagaagcgccgtatcgacgccagcggccgcctgcgagtgctccaggagctcgccgacctcgtggacgacaaggagtagccgcctaggggctgccggcccctctgcctcccccgcacctcgctcccttcccttccccgcacccggacttcgcagtcagcggttctcaacctctgccccgccccgccacgcgcgtccgccgccggtggcccgggcccgggctgcacccccgcatccccaagccagcggcaggaagtctcaggaactgccccagggccgaaagggcgccgctgcgagcgcctggctgacagccacagcggtggtgacggtgctgggagaccccgcgtgcgctttccccttgagatgtaaaccgggaacggggaaggggctgaggggagaaaggacatggccttccccgcgagtccatggccagtgactgtggcccgactcgaaaacaaccctcttctcaaaagggaccatcaccgccccgagcgtgcgcacacagaccggtcggaggcgagaactggtctctacagggcacagttcagctcctctgtggatgcgtccccagatcgcaggatttccaagaaatcgagcctgtcccttgtgcacttgggaataattccccaagacagcacttcgggattccgggttatcctgaggctgcccgggacttttccagctctccagccccaggtctcctgacattgtgttccaggctgcgggctaagccagacagtgttgcctccggttctttccaccgtgggaagcgaacgccacccccacccgcctttgcctgcgagtctccctcgctggcagaagggaagccggcccggtcccgggaggaagatggcgctgcgaattcggtgaggacagccggccccgcccccgacaaggagctcgctcgttcacctggtgtctgggaacttgaatgtgtgaagggcgcttattgttctgaacccttgattgctccctcctcgggctgcatttcaaaaatagtcatatttttaaaggagttggaggagagggagggggaggacatggcaccattccagaaaccagcattgttacaacaccatagccagtatatttagtttggcttttcctaacatagaaatcttcaaagctggggaagtggaaataaagttttaaaaatgagagagcagttttccaactatgtcaacaaagcctatcgtgttgatgtttttattgaccattttagcaacaggctaataaaatttcaaattgaaatttttattttcatggctttaatccatgatagtttaaatactgggggccattaagagtggatgtagctaagagcttagctaacattgccttttcactctatttttctcagatattgtaagcattctgtttttcaatattgtagttaattttttggctttcaacagcagccctagtaatggtggagttgttaattaatgtgtatattgtactgaatttctgtcagttaaggggttcactgctttggtggaaattggtggaaattgctagcaggttccacgatgtttatttttttctccatgttgtatatcattaccatttcacatacgcgtttctatttttcttcctctcctcctgatctccttaaaaatgaatctagagttggtggctttttccccctcctctttggccagttccacagttcagttcttcctgaaaacagggatgatgaacttgtaggatcaggacaaatgtgtgtttttcaaaaacttaaggctgggtgtgaaacaccttctgtggacaaggatttgtaaacttctctcctccctccagctgcggccccagcctaactgatagttacttgattcagtgtgctagacacttaaatagcatctatgtctctttcaagggaatttgtcaaataatgctgtttagctaattgttgcaagcaattgcatattaacagctgtgattttgttggacagcaagtattatggccaaagccagtttcttggcatttcaaaaataatgcaataaaaactagttgaggttagctgaggctggaaatgcctttttcatggtaaatgattcacttctatatttttctttctttttctttttttttctttggttttcatcctggattcatcccctgatcttaaatcaaaacgtcagatcaatgaactatgaactaaagtatttttcttaagcctattgagtgatttattttttaaaaaatgtttaaatgcatatgcttttctttcagcacaaacaacagcaaaaacttttgtaataactaacttacctttgcatgtatgaagaactgagtcatttatttccctaacttactcctctttcaagtaacaggtggcagatcataaaatgaattctttattgtatctacacactccacattctttactgtgtcctactactgtatcttggctccctgctgtattaaacaccatcttaagcacttgttcctgcaggactccttcttgacattttgtctcccccttcaaagtcactcaaagagtgggacttcatcaaaagaaatgaattagtctctatcacaccgaatactaagatttatttcctctgatggtacatagatttctctctcactaagagggtcactctcatagaggaatgtcttgtcagttttatacttgctgaggctagactgacaataaaaatgagctgggcagttaaattagcatttgttactatattggcctataaaggatcaggttgatgataatacctctaaaaatatgcaataataaaacaatagttatgaaagaaacttgaaaggtttgcaaggtttctcctatccctgttaaaattatcatttattatctctttgtcagtgttagtaaggtaacccatgacagaataatttgagtgatagttcatcatgcagaggatatgatcaagatattacctaatggttttatcctgaaaaaggtgtatacttttagggcactgttaacaatgcgagtgaaaccaagatggtgcaagttccctttgcagatggcgtgggcacacttgatttttattatgagtgaatgtaatctttctgtattttaccagagttacagcaattacctgaaaagtttcctaacattttaataatgttagggatttcgttttggttttagttgtcctcaagagacaacaggttcacagtaatttccatgatgttgggtgtggctaagctggggattggttctgttccccctgctcccgtgtagagaaaagctatatttatactgcattctttctcaactttcaggtaaaacaaactatgatttaaaaaaagaaaaaagaaaagacaggtacttttacttcaaagagtgctttgctacatttttatttaaaccaaaaatcaaataaaataaggaggggggctgggtatactttaaacaaaaccagtcctgaaatgctgttattctcaaagtacattccaaaaaaaaaaaaaaaaaaaaaacttattagaaatttcccgttgtgtgttcccatttttaaagttatgtgagttaaatgtgggattattaagggtgttccctcaattttttaattatgtgttaagccgtggtggttcatgttggaccaggttattttttctatagacaaattagattaccgcgttattatttattacgtctatccgaaaacacacgtgttgttgcccagtatttagaaaaccattcagagcacagaaagccagctgtgttttgatttacccgtgttttttgtggaaccccttcaagtgtttaaccctttccccttattgtttttaattttttctctttggggcggtgaaccaccttttttgtgtttaagacaccatgggctttttttataaatttttctctcttgggcgaaacaacattttcgcttattaaagctttttctttcccacacaattaccttttattatcccttgaaattacaggcaggtattattccttaaaaaggtttttttcaaaaacatttacttttcattggactaacacttattgtttgaggggggacgcgctttttcaaaacatctccctataagaagtttaaatgtgttcttaaggccaatctctataattacctggggaaccaggggtctcaaacctttcacgtgaaactttaaatcctttatggcgccaatcattaatttttgggcacccctaagttttcttctaaatacaatataggccattatctttaacgagcttccatcccctcttttttggaccaatttgaagaaaaactccagaatagtattgcgccttcagaaggctaatttgccccggttcacacaggggtcctgtaggtgacaacc

SEQ ID NO: 17462 - DNA, 5641 bp, Homo sapiens
tgctccggctacttagagtcgtcggcgcggcggtgggaaagcagagccgagccgggactgtccagtgggagcaggcgccccggccagcgcagacctggaggcgcacgggcgccgcaccgcacgattcggctcggggtagagcggagccgcagccccacgcgcagcccaggacccactcgccaccgccgcttcctcagcacccatggggaccaggagactttaaaggagtttggggtttcgggagcagggaaatcacggcccacccctcggtccttcctgggtgtccgtctcccacactgccacagccagcactctcctccccaccgggaccccgcaagctctccagccagcctgggtgttttcttctgggagttggaccgagttcccggaaggggtcggaggctgtgtggtggcgtctgctctcgcctgacctgtggcggcttctccgcccctcgtacccctggggaggcacggaggactcggctggaaagggtgactccgatccccgctcctggccctcgcctcgccacctcattgatgggcaaccaactggaccgcatcacccacctcaactacagcgagttgcccacaggggacccgtcggggattgaaaaggacgaactgcgggtcggggttgcctacttcttctcggatgatgaggaagacctggacgaacgcgggcagcccgacaagtttggcgtgaaggcccccccgggttgcaccccctgcccggagagccccagccgccaccaccaccacctgctgcaccagctggtcctcaacgagactcagttttccgcctttcggggccaggaatgcatcttttccaaagtgagcggtggccctcagggcgccgacctaagcgtctacgcggtcaccgcgctgccagcgctctgcgaacccggcgacctgctggagctgctgtggctgcagcccgcgccggagccgcccgcgcccgccccgcactgggccgtctacgtgggcggcgggcagatcatccacctgcaccaaggcgagatccgccaggacagcctgtatgaggcgggcgcggccaacgtgggccgggtggtgaatagctggtaccgctaccgcccgctggtggccgagctggtggtgcagaacgcctgcggccacctgggcctcaagagcgaggagatctgctggacgaactcggagagcttcgccgcctggtgccgctttggcaagcgggagttcaaggcgggaggggaggtgccggcaggcacgcagcccccgcagcagcagtactatctcaaggtgcacctgggagagaacaaggtccacaccgccaggtttcacagcctggaagacctcatccgcgagaagcgccgtatcgacgccagcggccgcctgcgagtgctccaggagctcgccgacctcgtggacgacaaggagtagccgcctaggggctgccggcccctctgcctcccccgcacctcgctcccttcccttccccgcacccggacttcgcagtcagcggttctcaacctctgccccgccccgccacgcgcgtccgccgccggtggcccgggcccgggctgcacccccgcatccccaagccagcggcaggaagtctcaggaactgccccagggccgaaagggcgccgctgcgagcgcctggctgacagccacagcggtggtgacggtgctgggagaccccgcgtgcgctttccccttgagatgtaaaccgggaacggggaaggggctgaggggagaaaggacatggccttccccgcgagtccatggccagtgactgtggcccgactcgaaaacaaccctcttctcaaaagggaccatcaccgccccgagcgtgcgcacacagaccggtcggaggcgagaactggtctctacagggcacagttcagctcctctgtggatgcgtccccagatcgcaggatttccaagaaatcgagcctgtcccttgtgcacttgggaataattccccaagacagcacttcgggattccgggttatcctgaggctgcccgggacttttccagctctccagccccaggtctcctgacattgtgttccaggctgcgggctaagccagacagtgttgcctccggttctttccaccgtgggaagcgaacgccacccccacccgcctttgcctgcgagtctccctcgctggcagaagggaagccggcccggtcccgggaggaagatggcgctgcgaattcggtgaggacagccggccccgcccccgacaaggagctcgctcgttcacctggtgtctgggaacttgaatgtgtgaagggcgcttattgttctgaacccttgattgctccctcctcgggctgcatttcaaaaatagtcatatttttaaaggagttggaggagagggagggggaggacatggcaccattccagaaaccagcattgttacaacaccatagccagtatatttagtttggcttttcctaacatagaaatcttcaaagctggggaagtggaaataaagttttaaaaatgagagagcagttttccaactatgtcaacaaagcctatcgtgttgatgtttttattgaccattttagcaacaggctaataaaatttcaaattgaaatttttattttcatggctttaatccatgatagtttaaatactgggggccattaagagtggatgtagctaagagcttagctaacattgccttttcactctatttttctcagatattgtaagcattctgtttttcaatattgtagttaattttttggctttcaacagcagccctagtaatggtggagttgttaattaatgtgtatattgtactgaatttctgtcagttaaggggttcactgctttggtggaaattggtggaaattgctagcaggttccacgatgtttatttttttctccatgttgtatatcattaccatttcacatacgcgtttctatttttcttcctctcctcctgatctccttaaaaatgaatctagagttggtggctttttccccctcctctttggccagttccacagttcagttcttcctgaaaacagggatgatgaacttgtaggatcaggacaaatgtgtgtttttcaaaaacttaaggctgggtgtgaaacaccttctgtggacaaggatttgtaaacttctctcctccctccagctgcggccccagcctaactgatagttacttgattcagtgtgctagacacttaaatagcatctatgtctctttcaagggaatttgtcaaataatgctgtttagctaattgttgcaagcaattgcatattaacagctgtgattttgttggacagcaagtattatggccaaagccagtttcttggcatttcaaaaataatgcaataaaaactagttgaggttagctgaggctggaaatgcctttttcatggtaaatgattcacttctatatttttctttctttttctttttttttctttggttttcatcctggattcatcccctgatcttaaatcaaaacgtcagatcaatgaactatgaactaaagtatttttcttaagcctattgagtgatttattttttaaaaaatgtttaaatgcatatgcttttctttcagcacaaacaacagcaaaaacttttgtaataactaacttacctttgcatgtatgaagaactgagtcatttatttccctaacttactcctctttcaagtaacaggtggcagatcataaaatgaattctttattgtatctacacactccacattctttactgtgtcctactactgtatcttggctccctgctgtattaaacaccatcttaagcacttgttcctgcaggactccttcttgacattttgtctcccccttcaaagtcactcaaagagtgggacttcatcaaaagaaatgaattagtctctatcacaccgaatactaagatttatttcctctgatggtacatagatttctctctcactaagagggtcactctcatagaggaatgtcttgtcagttttatacttgctgaggctagactgacaataaaaatgagctgggcagttaaattagcatttgttactatattggcctataaaggatcaggttgatgataatacctctaaaaatatgcaataataaaacaatagttatgaaagaaacttgaaaggtttgcaaggtttctcctatccctgttaaaattatcatttattatctctttgtcagtgttagtaaggtaacccatgacagaataatttgagtgatagttcatcatgcagaggatatgatcaagatattacctaatggttttatcctgaaaaaggtgtatacttttagggcactgttaacaatgcgagtgaaaccaagatggtgcaagttccctttgcagatggcgtgggcacacttgatttttattatgagtgaatgtaatctttctgtattttaccagagttacagcaattacctgaaaagtttcctaacattttaataatgttagggatttcgttttggttttagttgtcctcaagagacaacaggttcacagtaatttccatgatgttgggtgtggctaagctggggattggttctgttccccctgctcccgtgtagagaaaagctatatttatactgcattctttctcaactttcaggtaaaacaaactatgatttaaaaaaagaaaaaagaaaagacaggtacttttacttcaaagagtgctttgctacatttttatttaaaccaaaaatcaaataaaataaggaggggggctgggtatactttaaacaaaaccagtcctgaaatgctgttattctcaaagtacattccaaaaaaaaaaaaaaaaaaaaaacttattagaaatttcccgttgtgtgttcccatttttaaagttatgtgagttaaatgtgggattattaagggtgttccctcaattttttaattatgtgttaagccgtggtggttcatgttggaccaggttattttttctatagacaaattagattaccgcgttattatttattacgtctatccgaaaacacacgtgttgttgcccagtatttagaaaaccattcagagcacagaaagccagctgtgttttgatttacccgtgttttttgtggaaccccttcaagtgtttaaccctttccccttattgtttttaattttttctctttggggcggtgaaccaccttttttgtgtttaagacaccatgggctttttttataaatttttctctcttgggcgaaacaacattttcgcttattaaagctttttctttcccacacaattaccttttattatcccttgaaattacaggcaggtattattccttaaaaaggtttttttcaaaaacatttacttttcattggactaacacttattgtttgaggggggacgcgctttttcaaaacatctccctataagaagtttaaatgtgttcttaaggccaatctctataattacctggggaaccaggggtctcaaacctttcacgtgaaactttaaatcctttatggcgccaatcattaatttttgggcacccctaagttttcttctaaatacaatataggccattatctttaacgagcttccatcccctcttttttggaccaatttgaagaaaaactccagaatagtattgcgccttcagaaggctaatttgccccggttcacacaggggtcctgtaggtgacaacc

SEQ ID NO: 17463 - DNA, 4658 bp, Homo sapiens
  misc_feature (8)..(8): n is a, c, g, or t
  misc_feature (11)..(11): n is a, c, g, or t
  misc_feature (30)..(30): n is a, c, g, or t
tttgacgnatnataatacgcgcgattgggnaccgggccccttttgaccccgcgtccgggcgggcgcggccaacgtgggccgggtggtgaatagctggtaccgctaccgcccgctggtggccgagctggtggtgcagaacgcctgcggccacctgggcctcaagagcgaggagatctgctggacgaactcggagagcttcgccgcctggtgccgctttggcaagcgggagttcaaggcgggaggggaggtgccggcaggcacgcagcccccgcagcagcagtactatctcaaggtgcacctgggagagaacaaggtccacaccgccaggtttcacagcctggaagacctcatccgcgagaagcgccgtatcgacgccagcggccgcctgcgagtgctccaggagctcgccgacctcgtggacgacaaggagtagccgcctaggggctgccggcccctctgcctcccccgcacctcgctcccttcccttccccgcacccggacttcgcagtcagcggttctcaacctctgccccgccccgccacgcgcgtccgccgccggtggcccgggcccgggctgcacccccgcatccccaagccagcggcaggaagtctcaggaactgccccagggccgaaagggcgccgctgcgagcgcctggctgacagccacagcggtggtgacggtgctgggagaccccgcgtgcgctttccccttgagatgtaaaccgggaacggggaaggggctgaggggagaaaggacatggccttccccgcgagtccatggccagtgactgtggcccgactcgaaaacaaccctcttctcaaaagggaccatcaccgccccgagcgtgcgcacacagaccggtcggaggcgagaactggtctctacagggcacagttcagctcctctgtggatgcgtccccagatcgcaggatttccaagaaatcgagcctgtcccttgtgcacttgggaataattccccaagacagcacttcgggattccgggttatcctgaggctgcccgggacttttccagctctccagccccaggtctcctgacattgtgttccaggctgcgggctaagccagacagtgttgcctccggttctttccaccgtgggaagcgaacgccacccccacccgcctttgcctgcgagtctccctcgctggcagaagggaagccggcccggtcccgggaggaagatggcgctgcgaattcggtgaggacagccggccccgcccccgacaaggagctcgctcgttcacctggtgtctgggaacttgaatgtgtgaagggcgcttattgttctgaacccttgattgctccctcctcgggctgcatttcaaaaatagtcatatttttaaaggagttggaggagagggagggggaggacatggcaccattccagaaaccagcattgttacaacaccatagccagtatatttagtttggcttttcctaacatagaaatcttcaaagctggggaagtggaaataaagttttaaaaatgagagagcagttttccaactatgtcaacaaagcctatcgtgttgatgtttttattgaccattttagcaacaggctaataaaatttcaaattgaaatttttattttcatggctttaatccatgatagtttaaatactgggggccattaagagtggatgtagctaagagcttagctaacattgccttttcactctatttttctcagatattgtaagcattctgtttttcaatattgtagttaattttttggctttcaacagcagccctagtaatggtggagttgttaattaatgtgtatattgtactgaatttctgtcagttaaggggttcactgctttggtggaaattggtggaaattgctagcaggttccacgatgtttatttttttctccatgttgtatatcattaccatttcacatacgcgtttctatttttcttcctctcctcctgatctccttaaaaatgaatctagagttggtggctttttccccctcctctttggccagttccacagttcagttcttcctgaaaacagggatgatgaacttgtaggatcaggacaaatgtgtgtttttcaaaaacttaaggctgggtgtgaaacaccttctgtggacaaggatttgtaaacttctctcctccctccagctgcggccccagcctaactgatagttacttgattcagtgtgctagacacttaaatagcatctatgtctctttcaagggaatttgtcaaataatgctgtttagctaattgttgcaagcaattgcatattaacagctgtgattttgttggacagcaagtattatggccaaagccagtttcttggcatttcaaaaataatgcaataaaaactagttgaggttagctgaggctggaaatgcctttttcatggtaaatgattcacttctatatttttctttctttttctttttttttctttggttttcatcctggattcatcccctgatcttaaatcaaaacgtcagatcaatgaactatgaactaaagtatttttcttaagcctattgagtgatttattttttaaaaaatgtttaaatgcatatgcttttctttcagcacaaacaacagcaaaaacttttgtaataactaacttacctttgcatgtatgaagaactgagtcatttatttccctaacttactcctctttcaagtaacaggtggcagatcataaaatgaattctttattgtatctacacactccacattctttactgtgtcctactactgtatcttggctccctgctgtattaaacaccatcttaagcacttgttcctgcaggactccttcttgacattttgtctcccccttcaaagtcactcaaagagtgggacttcatcaaaagaaatgaattagtctctatcacaccgaatactaagatttatttcctctgatggtacatagatttctctctcactaagagggtcactctcatagaggaatgtcttgtcagttttatacttgctgaggctagactgacaataaaaatgagctgggcagttaaattagcatttgttactatattggcctataaaggatcaggttgatgataatacctctaaaaatatgcaataataaaacaatagttatgaaagaaacttgaaaggtttgcaaggtttctcctatccctgttaaaattatcatttattatctctttgtcagtgttagtaaggtaacccatgacagaataatttgagtgatagttcatcatgcagaggatatgatcaagatattacctaatggttttatcctgaaaaaggtgtatacttttagggcactgttaacaatgcgagtgaaaccaagatggtgcaagttccctttgcagatggcgtgggcacacttgatttttattatgagtgaatgtaatctttctgtattttaccagagttacagcaattacctgaaaagtttcctaacattttaataatgttagggatttcgttttggttttagttgtcctcaagagacaacaggttcacagtaatttccatgatgttgggtgtggctaagctggggattggttctgttccccctgctcccgtgtagagaaaagctatatttatactgcattctttctcaactttcaggtaaaacaaactatgatttaaaaaaagaaaaaagaaaagacaggtacttttacttcaaagagtgctttgctacatttttatttaaaccaaaaatcaaataaaataaggaggggggctgggtatactttaaacaaaaccagtcctgaaatgctgttattctcaaagtacattccaaaaaaaaaaaaaaaaaaaaaacttattagaaatttcccgttgtgtgttcccatttttaaagttatgtgagttaaatgtgggattattaagggtgttccctcaattttttaattatgtgttaagccgtggtggttcatgttggaccaggttattttttctatagacaaattagattaccgcgttattatttattacgtctatccgaaaacacacgtgttgttgcccagtatttagaaaaccattcagagcacagaaagccagctgtgttttgatttacccgtgttttttgtggaaccccttcaagtgtttaaccctttccccttattgtttttaattttttctctttggggcggtgaaccaccttttttgtgtttaagacaccatgggctttttttataaatttttctctcttgggcgaaacaacattttcgcttattaaagctttttctttcccacacaattaccttttattatcccttgaaattacaggcaggtattattccttaaaaaggtttttttcaaaaacatttacttttcattggactaacacttattgtttgaggggggacgcgctttttcaaaacatctccctataagaagtttaaatgtgttcttaaggccaatctctataattacctggggaaccaggggtctcaaacctttcacgtgaaactttaaatcctttatggcgccaatcattaatttttgggcacccctaagttttcttctaaatacaatataggccattatctttaacgagcttccatcccctcttttttggaccaatttgaagaaaaactccagaatagtattgcgccttcagaaggctaatttgccccggttcacacaggggtcctgtaggtgacaacc

SEQ ID NO: 17464 - DNA, 2323 bp, Homo sapiens
tgctccggctacttagagtcgtcggcgcggcggtgggaaagcagagccgagccgggactgtccagtgggagcaggcgccccggccagcgcagacctggaggcgcacgggcgccgcaccgcacgattcggctcggggtagagcggagccgcagccccacgcgcagcccaggacccactcgccaccgccgcttcctcagcacccatggggaccaggagactttaaaggagtttggggtttcgggagcagggaaatcacggatccccgctcctggccctcgcctcgccacctcattgatgggcaaccaactggaccgcatcacccacctcaactacagcgagttgcccacaggggacccgtcggggattgaaaaggacgaactgcgggtcggggttgcctacttcttctcggatgatgaggaagacctggacgaacgcgggcagcccgacaagtttggcgtgaaggcccccccgggttgcaccccctgcccggagagccccagccgccaccaccaccacctgctgcaccagctggtcctcaacgagactcagttttccgcctttcggggccaggaatgcatcttttccaaagtgagcggtggccctcagggcgccgacctaagcgtctacgcggtcaccgcgctgccagcgctctgcgaacccggcgacctgctggagctgctgtggctgcagcccgcgccggagccgcccgcgcccgccccgcactgggccgtctacgtgggcggcgggcagatcatccacctgcaccaaggcgagatccgccaggacagcctgtatgaggcgggcgcggccaacgtgggccgggtggtgaatagctggtaccgctaccgcccgctggtggccgagctggtggtgcagaacgcctgcggccacctgggcctcaagagcgaggagatctgctggacgaactcggagagcttcgccgcctggtgccgctttggcaagcgggagttcaaggcgggaggggaggtgccggcaggcacgcagcccccgcagcagcagtactatctcaaggtgcacctgggagagaacaaggtccacaccgccaggtttcacagcctggaagacctcatccgcgagaagcgccgtatcgacgccagcggccgcctgcgagtgctccaggagctcgccgacctcgtggacgacaaggagtagccgcctaggggctgccggcccctctgcctcccccgcacctcgctcccttcccttccccgcacccggacttcgcagtcagcggttctcaacctctgccccgccccgccacgcgcgtccgccgccggtggcccgggcccgggctgcacccccgcatccccaagccagcggcaggaagtctcaggaactgccccagggccgaaagggcgccgctgcgagcgcctggctgacagccacagcggtggtgacggtgctgggagaccccgcgtgcgctttccccttgagatgtaaaccgggaacggggaaggggctgaggggagaaaggacatggccttccccgcgagtccatggccagtgactgtggcccgactcgaaaacaaccctcttctcaaaagggaccatcaccgccccgagcgtgcgcacacagaccggtcggaggcgagaactggtctctacagggcacagttcagctcctctgtggatgcgtccccagatcgcaggatttccaagaaatcgagcctgtcccttgtgcacttgggaataattccccaagacagcacttcgggattccgggttatcctgaggctgcccgggacttttccagctctccagccccaggtctcctgacattgtgttccaggctgcgggctaagccagacagtgttgcctccggttctttccaccgtgggaagcgaacgccacccccacccgcctttgcctgcgagtctccctcgctggcagaagggaagccggcccggtcccgggaggaagatggcgctgcgaattcggtgaggacagccggccccgcccccgacaaggagctcgctcgttcacctggtgtctgggaacttgaatgtgtgaagggcgcttattgttctgaacccttgattgctccctcctcgggctgcatttcaaaaatagtcatatttttaaaggagttggaggagagggagggggaggacatggcaccattccagaaaccagcattgttacaacaccatagccagtatatttagtttggcttttcctaacatagaaatcttcaaagctggggaagtggaaataaagttttaaaaatgagagagcagtttcaacattgtcacaagcattcggtgagttatgacattagcacgctataattcaatgattatca

SEQ ID NO: 17465 - DNA, 2590 bp, Homo sapiens
aaatcatagtttgttttacctgaaagttgaggaagaatgcagtataaatatagcttttctctacacgggagcagggggaacagaaccaatccccagcctaactgatagttacttgattcagtgtgctagacacttaaatagcatctatgtctctttcaagggaatttgtcaaataatgctgtttagctaattgttgcaagcaattgcatattaacagctgtgattttgttggacagcaagtattatggccaaagccagtttcttggcatttcaaaaataatgcaataaaaactagttgaggttagctgaggctggaaatgcctttttcatggtaaatgattcacttctatatttttctttctttttctttttttttctttggttttcatcctggattcatcccctgatcttaaatcaaaacgtcagatcaatgaactatgaactaaagtatttttcttaagcctattgagtgatttattttttaaaaaatgtttaaatgcatatgcttttctttcagcacaaacaacagcaaaaacttttgtaataactaacttacctttgcatgtatgaagaactgagtcatttatttccctaacttactcctctttcaagtaacaggtggcagatcataaaatgaattctttattgtatctacacactccacattctttactgtgtcctactactgtatcttggctccctgctgtattaaacaccatcttaagcacttgttcctgcaggactccttcttgacattttgtctcccccttcaaagtcactcaaagagtgggacttcatcaaaagaaatgaattagtctctatcacaccgaatactaagatttatttcctctgatggtacatagatttctctctcactaagagggtcactctcatagaggaatgtcttgtcagttttatacttgctgaggctagactgacaataaaaatgagctgggcagttaaattagcatttgttactatattggcctataaaggatcaggttgatgataatacctctaaaaatatgcaataataaaacaatagttatgaaagaaacttgaaaggtttgcaaggtttctcctatccctgttaaaattatcatttattatctctttgtcagtgttagtaaggtaacccatgacagaataatttgagtgatagttcatcatgcagaggatatgatcaagatattacctaatggttttatcctgaaaaaggtgtatacttttagggcactgttaacaatgcgagtgaaaccaagatggtgcaagttccctttgcagatggcgtgggcacacttgatttttattatgagtgaatgtaatctttctgtattttaccagagttacagcaattacctgaaaagtttcctaacattttaataatgttagggatttcgttttggttttagttgtcctcaagagacaacaggttcacagtaatttccatgatgttgggtgtggctaagctggggattggttctgttccccctgctcccgtgtagagaaaagctatatttatactgcattctttctcaactttcaggtaaaacaaactatgatttaaaaaaagaaaaaagaaaagacaggtacttttacttcaaagagtgctttgctacatttttatttaaaccaaaaatcaaataaaataaggaggggggctgggtatactttaaacaaaaccagtcctgaaatgctgttattctcaaagtacattccaaaaaaaaaaaaaaaaaaaaaacttattagaaatttcccgttgtgtgttcccatttttaaagttatgtgagttaaatgtgggattattaagggtgttccctcaattttttaattatgtgttaagccgtggtggttcatgttggaccaggttattttttctatagacaaattagattaccgcgttattatttattacgtctatccgaaaacacacgtgttgttgcccagtatttagaaaaccattcagagcacagaaagccagctgtgttttgatttacccgtgttttttgtggaaccccttcaagtgtttaaccctttccccttattgtttttaattttttctctttggggcggtgaaccaccttttttgtgtttaagacaccatgggctttttttataaatttttctctcttgggcgaaacaacattttcgcttattaaagctttttctttcccacacaattaccttttattatcccttgaaattacaggcaggtattattccttaaaaaggtttttttcaaaaacatttacttttcattggactaacacttattgtttgaggggggacgcgctttttcaaaacatctccctataagaagtttaaatgtgttcttaaggccaatctctataattacctggggaaccaggggtctcaaacctttcacgtgaaactttaaatcctttatggcgccaatcattaatttttgggcacccctaagttttcttctaaatacaatataggccattatctttaacgagcttccatcccctcttttttggaccaatttgaagaaaaactccagaatagtattgcgccttcagaaggctaatttgccccggttcacacaggggtcctgtaggtgacaacc

SEQ ID NO: 17466 - DNA, 2655 bp, Homo sapiens
gttggaaccgtgcgacctttatacaggaaacagtatacggtatgattgggtagaacgatcaggacaaatgtgtgtttttcaaaaacttaaggctgggtgtgaaacaccttctgtggacaaggatttgtaaacttctctcctccctccagctgcggccccagcctaactgatagttacttgattcagtgtgctagacacttaaatagcatctatgtctctttcaagggaatttgtcaaataatgctgtttagctaattgttgcaagcaattgcatattaacagctgtgattttgttggacagcaagtattatggccaaagccagtttcttggcatttcaaaaataatgcaataaaaactagttgaggttagctgaggctggaaatgcctttttcatggtaaatgattcacttctatatttttctttctttttctttttttttctttggttttcatcctggattcatcccctgatcttaaatcaaaacgtcagatcaatgaactatgaactaaagtatttttcttaagcctattgagtgatttattttttaaaaaatgtttaaatgcatatgcttttctttcagcacaaacaacagcaaaaacttttgtaataactaacttacctttgcatgtatgaagaactgagtcatttatttccctaacttactcctctttcaagtaacaggtggcagatcataaaatgaattctttattgtatctacacactccacattctttactgtgtcctactactgtatcttggctccctgctgtattaaacaccatcttaagcacttgttcctgcaggactccttcttgacattttgtctcccccttcaaagtcactcaaagagtgggacttcatcaaaagaaatgaattagtctctatcacaccgaatactaagatttatttcctctgatggtacatagatttctctctcactaagagggtcactctcatagaggaatgtcttgtcagttttatacttgctgaggctagactgacaataaaaatgagctgggcagttaaattagcatttgttactatattggcctataaaggatcaggttgatgataatacctctaaaaatatgcaataataaaacaatagttatgaaagaaacttgaaaggtttgcaaggtttctcctatccctgttaaaattatcatttattatctctttgtcagtgttagtaaggtaacccatgacagaataatttgagtgatagttcatcatgcagaggatatgatcaagatattacctaatggttttatcctgaaaaaggtgtatacttttagggcactgttaacaatgcgagtgaaaccaagatggtgcaagttccctttgcagatggcgtgggcacacttgatttttattatgagtgaatgtaatctttctgtattttaccagagttacagcaattacctgaaaagtttcctaacattttaataatgttagggatttcgttttggttttagttgtcctcaagagacaacaggttcacagtaatttccatgatgttgggtgtggctaagctggggattggttctgttccccctgctcccgtgtagagaaaagctatatttatactgcattctttctcaactttcaggtaaaacaaactatgatttaaaaaaagaaaaaagaaaagacaggtacttttacttcaaagagtgctttgctacatttttatttaaaccaaaaatcaaataaaataaggaggggggctgggtatactttaaacaaaaccagtcctgaaatgctgttattctcaaagtacattccaaaaaaaaaaaaaaaaaaaaaacttattagaaatttcccgttgtgtgttcccatttttaaagttatgtgagttaaatgtgggattattaagggtgttccctcaattttttaattatgtgttaagccgtggtggttcatgttggaccaggttattttttctatagacaaattagattaccgcgttattatttattacgtctatccgaaaacacacgtgttgttgcccagtatttagaaaaccattcagagcacagaaagccagctgtgttttgatttacccgtgttttttgtggaaccccttcaagtgtttaaccctttccccttattgtttttaattttttctctttggggcggtgaaccaccttttttgtgtttaagacaccatgggctttttttataaatttttctctcttgggcgaaacaacattttcgcttattaaagctttttctttcccacacaattaccttttattatcccttgaaattacaggcaggtattattccttaaaaaggtttttttcaaaaacatttacttttcattggactaacacttattgtttgaggggggacgcgctttttcaaaacatctccctataagaagtttaaatgtgttcttaaggccaatctctataattacctggggaaccaggggtctcaaacctttcacgtgaaactttaaatcctttatggcgccaatcattaatttttgggcacccctaagttttcttctaaatacaatataggccattatctttaacgagcttccatcccctcttttttggaccaatttgaagaaaaactccagaatagtattgcgccttcagaaggctaatttgccccggttcacacaggggtcctgtaggtgacaacc

SEQ ID NO: 17467 - DNA, 495 bp, Homo sapiens
ttctgggagttggaccgagttcccggaaggggtcggaggctgtgtggtggcgtctgctctcgcctgacctgtggcggcttctccgcccctcgtacccctggggaggcacggaggactcggctggaaagggtgactccggtgagggcacgtaagctagccggcaggtcccaggggcactgcacgtcttggggagggacaccgaaaggggcagcccggactctgacggtgtctctgcctctctgtgcctccgcagatccccgctcctggccctcgcctcgccacctcattgatgggcaaccaactggaccgcatcacccacctcaactacagcgagttgcccacaggggacccgtcggggattgaaaaggacgaactgcgggtcggggttgcctacttcttctcggatgatgaggaagacctggacgaacgcgggcagcccgacaagtttggcgtgaaggcccccccgggttgcaccccctgcccggagagccccag

SEQ ID NO: 17468 - DNA, 388 bp, Homo sapiens
tttttttccgggggagtttgaatatttgtttcttttcacactggccttaaagaggatatattagaagttgaagtaggaagggagccagagaggccgatggcgcaaaggtacgacgatctaccccattacgggggcatggatggagtaggcatcccctccacgatgtatggggacccgcatgcagccaggtccatgcagccggtccaccacctgaaccacgggcctcctctgcactcgcatcagtacccgcacacagctcataccaacgccatggcccccagcatgggctcctctgtcaatgacgctttaaagagagataaagatgccatttatgggtaggtacaatgggcagcaggttaagtagttgagactcaacgcttccctcttt

SEQ ID NO: 17469 - DNA, 422 bp, Homo sapiens
tttttttccgggggagtttgaatatttgtttcttttcacactggccttaaagaggatatattagaagttgaagtaggaagggagccagagaggccgatggcgcaaagggtacgtattaaaaaacaattgtggaactcaaatgtgagattaaattgaaacgtggccgaaagacactgctaaaaagtttcctttttttctctctctcttttaaaaaatgaggctcctaaagccgtggcctaagcgagaggatttattcaatgcatttgtagacttatgtatgttacttggagttgttaattaaaggaatctatttatctatagattcctaaccagcagctatataaataaaaatgcaagctcaaacaatcatctgggtttttttttaaaaaagctagatacctaaagctgtaatttgaacattc

SEQ ID NO: 17470 - DNA, 2832 bp, Homo sapiens
tttttttccgggggagtttgaatatttgtttcttttcacactggccttaaagaggatatattagaagttgaagtaggaagggagccagagaggccgatggcgcaaaggtacgacgatctaccccattacgggggcatggatggagtaggcatcccctccacgatgtatggggacccgcatgcagccaggtccatgcagccggtccaccacctgaaccacgggcctcctctgcactcgcatcagtacccgcacacagctcataccaacgccatggcccccagcatgggctcctctgtcaatgacgctttaaagagagataaagatgccatttatggacaccccctcttccctctcttagcactgatttttgagaaatgtgaattagctacttgtaccccccgcgagccgggggtggcgggcggggacgtctgctcgtcagagtcattcaatgaagatatagccgtgttcgccaaacagattcgcgcagaaaaacctctattttcttctaatccagaactggataacttgatgattcaagccatacaagtattaaggtttcatctattggaattagagaaggtacacgaattatgtgacaatttctgccaccggtatattagctgtttgaaagggaaaatgcctatcgatttggtgatagacgatagagaaggaggatcaaaatcagacagtgaagatataacaagatcagcaaatctaactgaccagccctcttggaacagagatcatgatgacacggcatctactcgttcaggaggaaccccaggcccttccagcggtggccacacgtcacacagtggggacaacagcagtgagcaaggtgatggcttggacaacagtgtagcttcccccagcacaggtgacgatgatgaccctgataaggacaaaaagcgtcacaaaaagcgtggcatctttcccaaagtagccacaaatatcatgagggcgtggctgttccagcatctaacacacccttacccttctgaagaacagaaaaagcagttggcacaagacacgggactcaccatccttcaagtgaacaattggtttattaatgcccggagaagaatagtgcagcccatgatagaccagtccaaccgagcagtaagtcaaggaacaccttataatcctgatggacagcccatgggaggtttcgtaatggacggtcagcaacatatgggaattagagcaccaggacctatgagtggaatgggcatgaatatgggcatggaggggcagtggcactacatgtaaccttcatctagttaaccaatcgcaaagcaagggggaaggctgcaaagtatgccaggggagtatgtagcccggggtggtccaatgggtgtgagtatgggacagccaagttatacccaaccccagatgcccccccatcctgctcagctgcgtcatgggccccccatgcatacgtacattcctggacaccctcaccacccaacagtgatgatgcatggaggaccgccccaccctggaatgccaatgtcagcatcaagccccacagttcttaatacaggagacccaacaatgagtggacaagtcatggacattcatgctcagtagcttaagggaatatgcattgtctgcaatggtgactgatttcaaatcatgttttttctgcaatgactgtggagttccattcttggcatctactctggaccaaggagcatccctaattcttcatagggacctttaaaaagcaggaaataccaactgaagtcaatttgggggacatgctaaataactatataagacattaagagaacaaagagtgaaatattgtaaatgctattatactgttatccatattacgttgtttcttatagattttttaaaaaaaatgtgaaatttttccacactatgtgtgttgtttccatagctcttcacttcctccagaagcctccttacattaaaaagccttacagttatcctgcaagggacaggaaggtctgatttgcaggatttttagagcattaaaataactatcaggcagaagaatctttcttctcgcctaggatttcagccatgcgcgcgctctctctctttctctctcttttcctctctctccctctttctagcctggggcttgaatttgcatgtctaattcatttactcaccatatttgaattggcctgaacagatgtaaatcgggaaggatgggaaaaactgcagtcatcaacaatgattaatcagctgttgcaggcagtgtcttaaggagactggtaggaggaggcatggaaaccaaaaggccgtgtgtttagaagcctaattgtcacatcaagcatcattgtccccatgcaacaaccaccaccttatacatcacttcctgttttaagcagctctaaaacatagactgaagatttatttttaatatgttgactttatttctgagcaaagcatcggtcatgtgtgtattttttcatagtcccaccttggagcatttatgtagacattgtaaataaattttgtgcaaaaaggactggaaaaatgaactgtattattgcaatttttttttgtaaaagtagcagtttggtatgagttggcatgcatacaagatttactaagtgggataagctaattatactttttgttgtggataaacaaatgcttgttgatagcctttttctatcaagaaaccaaggagctaattattaataacaatcattgcacactgagtcttagcgtttctgatggaaacagtttggattgtataataacgccaagcccagttgtagtcgtttgagtgcagtaatgaaatctgaatctaaaataaaaacaagattatttttgtcatgctgactccac

SEQ ID NO: 17471 - DNA, 3068 bp, Homo sapiens
gagacatgcccgtttcaccttctaccctcgggagaatgcttctctttctctctttctttcttctttccttcttgccaaaggagcctgaatttctaaactagttgatagggacacaagttagggcaagatcattcatcccagacgagtctcgctgagaattctgtattttttacttaaagctttaattttaaaataagaaaaactcagctttatagatgcaaggccaccgaattccgggtggaaggacccagctgtattgaccttatataagctcggtgccttgccgttctcccatttgcccgcctggcctcctgaaccttctttctctcctgtttgtcatgcagtacgacgatctaccccattacgggggcatggatggagtaggcatcccctccacgatgtatggggacccgcatgcagccaggtccatgcagccggtccaccacctgaaccacgggcctcctctgcactcgcatcagtacccgcacacagctcataccaacgccatggcccccagcatgggctcctctgtcaatgacgctttaaagagagataaagatgccatttatggacaccccctcttccctctcttagcactgatttttgagaaatgtgaattagctacttgtaccccccgcgagccgggggtggcgggcggggacgtctgctcgtcagagtcattcaatgaagatatagccgtgttcgccaaacagattcgcgcagaaaaacctctattttcttctaatccagaactggataacttgatgattcaagccatacaagtattaaggtttcatctattggaattagagaaggtacacgaattatgtgacaatttctgccaccggtatattagctgtttgaaagggaaaatgcctatcgatttggtgatagacgatagagaaggaggatcaaaatcagacagtgaagatataacaagatcagcaaatctaactgaccagccctcttggaacagagatcatgatgacacggcatctactcgttcaggaggaaccccaggcccttccagcggtggccacacgtcacacagtggggacaacagcagtgagcaaggtgatggcttggacaacagtgtagcttcccccagcacaggtgacgatgatgaccctgataaggacaaaaagcgtcacaaaaagcgtggcatctttcccaaagtagccacaaatatcatgagggcgtggctgttccagcatctaacacacccttacccttctgaagaacagaaaaagcagttggcacaagacacgggactcaccatccttcaagtgaacaattggtttattaatgcccggagaagaatagtgcagcccatgatagaccagtccaaccgagcagtaagtcaaggaacaccttataatcctgatggacagcccatgggaggtttcgtaatggacggtcagcaacatatgggaattagagcaccaggacctatgagtggaatgggcatgaatatgggcatggaggggcagtggcactacatgtaaccttcatctagttaaccaatcgcaaagcaagggggaaggctgcaaagtatgccaggggagtatgtagcccggggtggtccaatgggtgtgagtatgggacagccaagttatacccaaccccagatgcccccccatcctgctcagctgcgtcatgggccccccatgcatacgtacattcctggacaccctcaccacccaacagtgatgatgcatggaggaccgccccaccctggaatgccaatgtcagcatcaagccccacagttcttaatacaggagacccaacaatgagtggacaagtcatggacattcatgctcagtagcttaagggaatatgcattgtctgcaatggtgactgatttcaaatcatgttttttctgcaatgactgtggagttccattcttggcatctactctggaccaaggagcatccctaattcttcatagggacctttaaaaagcaggaaataccaactgaagtcaatttgggggacatgctaaataactatataagacattaagagaacaaagagtgaaatattgtaaatgctattatactgttatccatattacgttgtttcttatagattttttaaaaaaaatgtgaaatttttccacactatgtgtgttgtttccatagctcttcacttcctccagaagcctccttacattaaaaagccttacagttatcctgcaagggacaggaaggtctgatttgcaggatttttagagcattaaaataactatcaggcagaagaatctttcttctcgcctaggatttcagccatgcgcgcgctctctctctttctctctcttttcctctctctccctctttctagcctggggcttgaatttgcatgtctaattcatttactcaccatatttgaattggcctgaacagatgtaaatcgggaaggatgggaaaaactgcagtcatcaacaatgattaatcagctgttgcaggcagtgtcttaaggagactggtaggaggaggcatggaaaccaaaaggccgtgtgtttagaagcctaattgtcacatcaagcatcattgtccccatgcaacaaccaccaccttatacatcacttcctgttttaagcagctctaaaacatagactgaagatttatttttaatatgttgactttatttctgagcaaagcatcggtcatgtgtgtattttttcatagtcccaccttggagcatttatgtagacattgtaaataaattttgtgcaaaaaggactggaaaaatgaactgtattattgcaatttttttttgtaaaagtagcagtttggtatgagttggcatgcatacaagatttactaagtgggataagctaattatactttttgttgtggataaacaaatgcttgttgatagcctttttctatcaagaaaccaaggagctaattattaataacaatcattgcacactgagtcttagcgtttctgatggaaacagtttggattgtataataacgccaagcccagttgtagtcgtttgagtgcagtaatgaaatctgaatctaaaataaaaacaagattatttttgtcatgctgactccac

SEQ ID NO: 17472 - DNA, 2435 bp, Homo sapiens
cagcgcggggatttatctcccggcctgtcagcatgtgtgcttaaactttgcggacttcctagccctctaagtcccatcacgagggcagccaccggacaagagcccccaaacaaccagtttgcctgaaaggtatgattcaagccatacaagtattaaggtttcatctattggaattagagaaggtacacgaattatgtgacaatttctgccaccggtatattagctgtttgaaagggaaaatgcctatcgatttggtgatagacgatagagaaggaggatcaaaatcagacagtgaagatataacaagatcagcaaatctaactgaccagccctcttggaacagagatcatgatgacacggcatctactcgttcaggaggaaccccaggcccttccagcggtggccacacgtcacacagtggggacaacagcagtgagcaaggtgatggcttggacaacagtgtagcttcccccagcacaggtgacgatgatgaccctgataaggacaaaaagcgtcacaaaaagcgtggcatctttcccaaagtagccacaaatatcatgagggcgtggctgttccagcatctaacacacccttacccttctgaagaacagaaaaagcagttggcacaagacacgggactcaccatccttcaagtgaacaattggtttattaatgcccggagaagaatagtgcagcccatgatagaccagtccaaccgagcagtaagtcaaggaacaccttataatcctgatggacagcccatgggaggtttcgtaatggacggtcagcaacatatgggaattagagcaccaggacctatgagtggaatgggcatgaatatgggcatggaggggcagtggcactacatgtaaccttcatctagttaaccaatcgcaaagcaagggggaaggctgcaaagtatgccaggggagtatgtagcccggggtggtccaatgggtgtgagtatgggacagccaagttatacccaaccccagatgcccccccatcctgctcagctgcgtcatgggccccccatgcatacgtacattcctggacaccctcaccacccaacagtgatgatgcatggaggaccgccccaccctggaatgccaatgtcagcatcaagccccacagttcttaatacaggagacccaacaatgagtggacaagtcatggacattcatgctcagtagcttaagggaatatgcattgtctgcaatggtgactgatttcaaatcatgttttttctgcaatgactgtggagttccattcttggcatctactctggaccaaggagcatccctaattcttcatagggacctttaaaaagcaggaaataccaactgaagtcaatttgggggacatgctaaataactatataagacattaagagaacaaagagtgaaatattgtaaatgctattatactgttatccatattacgttgtttcttatagattttttaaaaaaaatgtgaaatttttccacactatgtgtgttgtttccatagctcttcacttcctccagaagcctccttacattaaaaagccttacagttatcctgcaagggacaggaaggtctgatttgcaggatttttagagcattaaaataactatcaggcagaagaatctttcttctcgcctaggatttcagccatgcgcgcgctctctctctttctctctcttttcctctctctccctctttctagcctggggcttgaatttgcatgtctaattcatttactcaccatatttgaattggcctgaacagatgtaaatcgggaaggatgggaaaaactgcagtcatcaacaatgattaatcagctgttgcaggcagtgtcttaaggagactggtaggaggaggcatggaaaccaaaaggccgtgtgtttagaagcctaattgtcacatcaagcatcattgtccccatgcaacaaccaccaccttatacatcacttcctgttttaagcagctctaaaacatagactgaagatttatttttaatatgttgactttatttctgagcaaagcatcggtcatgtgtgtattttttcatagtcccaccttggagcatttatgtagacattgtaaataaattttgtgcaaaaaggactggaaaaatgaactgtattattgcaatttttttttgtaaaagtagcagtttggtatgagttggcatgcatacaagatttactaagtgggataagctaattatactttttgttgtggataaacaaatgcttgttgatagcctttttctatcaagaaaccaaggagctaattattaataacaatcattgcacactgagtcttagcgtttctgatggaaacagtttggattgtataataacgccaagcccagttgtagtcgtttgagtgcagtaatgaaatctgaatctaaaataaaaacaagattatttttgtcatgctgactccac

SEQ ID NO: 17473 - DNA, 1668 bp, Homo sapiens
atgaatcaaaagaatgctttacaaaaccatgttcccttaatcacagtgttctctggcttttataggattgtcatagccaggaccacactattgctttttcataacattttctttttgtttctttcttttgaatttcttacagggctgcaaagtatgccaggggagtatgtagcccggggtggtccaatgggtgtgagtatgggacagccaagttatacccaaccccagatgcccccccatcctgctcagctgcgtcatgggccccccatgcatacgtacattcctggacaccctcaccacccaacagtgatgatgcatggaggaccgccccaccctggaatgccaatgtcagcatcaagccccacagttcttaatacaggagacccaacaatgagtggacaagtcatggacattcatgctcagtagcttaagggaatatgcattgtctgcaatggtgactgatttcaaatcatgttttttctgcaatgactgtggagttccattcttggcatctactctggaccaaggagcatccctaattcttcatagggacctttaaaaagcaggaaataccaactgaagtcaatttgggggacatgctaaataactatataagacattaagagaacaaagagtgaaatattgtaaatgctattatactgttatccatattacgttgtttcttatagattttttaaaaaaaatgtgaaatttttccacactatgtgtgttgtttccatagctcttcacttcctccagaagcctccttacattaaaaagccttacagttatcctgcaagggacaggaaggtctgatttgcaggatttttagagcattaaaataactatcaggcagaagaatctttcttctcgcctaggatttcagccatgcgcgcgctctctctctttctctctcttttcctctctctccctctttctagcctggggcttgaatttgcatgtctaattcatttactcaccatatttgaattggcctgaacagatgtaaatcgggaaggatgggaaaaactgcagtcatcaacaatgattaatcagctgttgcaggcagtgtcttaaggagactggtaggaggaggcatggaaaccaaaaggccgtgtgtttagaagcctaattgtcacatcaagcatcattgtccccatgcaacaaccaccaccttatacatcacttcctgttttaagcagctctaaaacatagactgaagatttatttttaatatgttgactttatttctgagcaaagcatcggtcatgtgtgtattttttcatagtcccaccttggagcatttatgtagacattgtaaataaattttgtgcaaaaaggactggaaaaatgaactgtattattgcaatttttttttgtaaaagtagcagtttggtatgagttggcatgcatacaagatttactaagtgggataagctaattatactttttgttgtggataaacaaatgcttgttgatagcctttttctatcaagaaaccaaggagctaattattaataacaatcattgcacactgagtcttagcgtttctgatggaaacagtttggattgtataataacgccaagcccagttgtagtcgtttgagtgcagtaatgaaatctgaatctaaaataaaaacaagattatttttgtcatgctgactccac

SEQ ID NO: 17474 - DNA, 2511 bp, Homo sapiens
tttttttccgggggagtttgaatatttgtttcttttcacactggccttaaagaggatatattagaagttgaagtaggaagggagccagagaggccgatggcgcaaaggtacgacgatctaccccattacgggggcatggatggagtaggcatcccctccacgatgtatggggacccgcatgcagccaggtccatgcagccggtccaccacctgaaccacgggcctcctctgcactcgcatcagtacccgcacacagctcataccaacgccatggcccccagcatgggctcctctgtcaatgacgctttaaagagagataaagatgccatttatggacaccccctcttccctctcttagcactgatttttgagaaatgtgaattagctacttgtaccccccgcgagccgggggtggcgggcggggacgtctgctcgtcagagtcattcaatgaagatatagccgtgttcgccaaacagattcgcgcagaaaaacctctattttcttctaatccagaactggataacttgatgattcaagccatacaagtattaaggtttcatctattggaattagagaaggtacacgaattatgtgacaatttctgccaccggtatattagctgtttgaaagggaaaatgcctatcgatttggtgatagacgatagagaaggaggatcaaaatcagacagtgaagatataacaagatcagcaaatctaactgaccagccctcttggaacagagatcatgatgacacggcatctactcgttcaggaggaaccccaggcccttccagcggtggccacacgtcacacagtggggacaacagcagtgagcaaggtgatggcttggacaacagtgtagcttcccccagcacaggtgacgatgatgaccctgataaggacaaaaagcgtcacaaaaagcgtggcatctttcccaaagtagccacaaatatcatgagggcgtggctgttccagcatctaacacacccttacccttctgaagaacagaaaaagcagttggcacaagacacgggactcaccatccttcaagtgaacaattggtttattaatgcccggagaagaatagtgcagcccatgatagaccagtccaaccgagcagtaagtcaaggaacaccttataatcctgatggacagcccatgggaggtttcgtaatggacggtcagcaacatatgggaattagagcaccaggacctatgagtggaatgggcatgaatatgggcatggaggggcagtggcactacatgtaaccttcatctagttaaccaatcgcaaagcaagggggaaggctgcaaagtatgccaggggagtatgtagcccggggtggtccaatgggtgtgagtatgggacagccaagttatacccaaccccagatgcccccccatcctgctcagctgcgtcatgggccccccatgcatacgtacattcctggacaccctcaccacccaacagtgatgatgcatggaggaccgccccaccctggaatgccaatgtcagcatcaagccccacagttcttaatacaggagacccaacaatgagtggacaagtcatggacattcatgctcagtagcttaagggaatatgcattgtctgcaatggtgactgatttcaaatcatgttttttctgcaatgactgtggagttccattcttggcatctactctggaccaaggagcatccctaattcttcatagggacctttaaaaagcaggaaataccaactgaagtcaatttgggggacatgctaaataactatataagacattaagagaacaaagagtgaaatattgtaaatgctattatactgttatccatattacgttgtttcttatagattttttaaaaaaaatgtgaaatttttccacactatgtgtgttgtttccatagctcttcacttcctccagaagcctccttacattaaaaagccttacagttatcctgcaagggacaggaaggtctgatttgcaggatttttagagcattaaaataactatcaggcagaagaatctttcttctcgcctaggatttcagccatgcgcgcgctctctctctttctctctcttttcctctctctccctctttctagcctggggcttgaatttgcatgtctaattcatttactcaccatatttgaattggcctgaacagatgtaaatcgggaaggatgggaaaaactgcagtcatcaacaatgattaatcagctgttgcaggcagtgtcttaaggagactggtaggaggaggcatggaaaccaaaaggccgtgtgtttagaagcctaattgtcacatcaagcatcattgtccccatgcaacaaccaccaccttatacatcacttcctgttttaagcagctctaaaacatagactgaagatttatttttaatatgttgactttatttctgagcaaagcatcggtcatgtgtgtattttttcatagtcccaccttggagcatttatgtagacattgtaaataaattttgtgcaaaaaggactgga

SEQ ID NO: 17475 - DNA, 864 bp, Homo sapiens
gaatccacctctccgcctgtgcaacacacactttacacacgcacggggactgcaagcgggcagcatcgatcgtggctcctttaagacaaactcagacagacattttttttaaccctccttctctaatctctttctagcctggggcttgaatttgcatgtctaattcatttactcaccatatttgaattggcctgaacagatgtaaatcgggaaggatgggaaaaactgcagtcatcaacaatgattaatcagctgttgcaggcagtgtcttaaggagactggtaggaggaggcatggaaaccaaaaggccgtgtgtttagaagcctaattgtcacatcaagcatcattgtccccatgcaacaaccaccaccttatacatcacttcctgttttaagcagctctaaaacatagactgaagatttatttttaatatgttgactttatttctgagcaaagcatcggtcatgtgtgtattttttcatagtcccaccttggagcatttatgtagacattgtaaataaattttgtgcaaaaaggactggaaaaatgaactgtattattgcaatttttttttgtaaaagtagcagtttggtatgagttggcatgcatacaagatttactaagtgggataagctaattatactttttgttgtggataaacaaatgcttgttgatagcctttttctatcaagaaaccaaggagctaattattaataacaatcattgcacactgagtcttagcgtttctgatggaaacagtttggattgtataataacgccaagcccagttgtagtcgtttgagtgcagtaatgaaatctgaatctaaaataaaaacaagattatttttgtcatgctgactccac

SEQ ID NO: 17476 - DNA, 2346 bp, Homo sapiens
tttttttccgggggagtttgaatatttgtttcttttcacactggccttaaagaggatatattagaagttgaagtaggaagggagccagagaggccgatggcgcaaaggtacgacgatctaccccattacgggggcatggatggagtaggcatcccctccacgatgtatggggacccgcatgcagccaggtccatgcagccggtccaccacctgaaccacgggcctcctctgcactcgcatcagtacccgcacacagctcataccaacgccatggcccccagcatgggctcctctgtcaatgacgctttaaagagagataaagatgccatttatggacaccccctcttccctctcttagcactgatttttgagaaatgtgaattagctacttgtaccccccgcgagccgggggtggcgggcggggacgtctgctcgtcagagtcattcaatgaagatatagccgtgttcgccaaacagattcgcgcagaaaaacctctattttcttctaatccagaactggataacttgatgattcaagccatacaagtattaaggtttcatctattggaattagagaaggtacacgaattatgtgacaatttctgccaccggtatattagctgtttgaaagggaaaatgcctatcgatttggtgatagacgatagagaaggaggatcaaaatcagacagtgaagatataacaagatcagcaaatctaactgaccagccctcttggaacagagatcatgatgacacggcatctactcgttcaggaggaaccccaggcccttccagcggtggccacacgtcacacagtggggacaacagcagtgagcaaggtgatggcttggacaacagtgtagcttcccccagcacaggtgacgatgatgaccctgataaggacaaaaagcgtcacaaaaagcgtggcatctttcccaaagtagccacaaatatcatgagggcgtggctgttccagcatctaacacacccttacccttctgaagaacagaaaaagcagttggcacaagacacgggactcaccatccttcaagtgaacaattggtttattaatgcccggagaagaatagtgcagcccatgatagaccagtccaaccgagcagtaagtcaaggaacaccttataatcctgatggacagcccatgggaggtttcgtaatggacggtcagcaacatatgggaattagagcaccaggacctatgagtggaatgggcatgaatatgggcatggaggggcagtggcactacatgtaaccttcatctagttaaccaatcgcaaagcaagggggaaggctgcaaagtatgccaggggagtatgtagcccggggtggtccaatgggtgtgagtatgggacagccaagttatacccaaccccagatgcccccccatcctgctcagctgcgtcatgggccccccatgcatacgtacattcctggacaccctcaccacccaacagtgatgatgcatggaggaccgccccaccctggaatgccaatgtcagcatcaagccccacagttcttaatacaggagacccaacaatgagtggacaagtcatggacattcatgctcagtagcttaagggaatatgcattgtctgcaatggtgactgatttcaaatcatgttttttctgcaatgactgtggagttccattcttggcatctactctggaccaaggagcatccctaattcttcatagggacctttaaaaagcaggaaataccaactgaagtcaatttgggggacatgctaaataactatataagacattaagagaacaaagagtgaaatattgtaaatgctattatactgttatccatattacgttgtttcttatagattttttaaaaaaaatgtgaaatttttccacactatgtgtgttgtttccatagctcttcacttcctccagaagcctccttacattaaaaagccttacagttatcctgcaagggacaggaaggtctgatttgcaggatttttagagcattaaaataactatcaggcagaagaatctttcttctcgcctaggatttcagccatgcgcgcgctctctctctttctctctcttttcctctctctccctctttctagcctggggcttgaatttgcatgtctaattcatttactcaccatatttgaattggcctgaacagatgtaaatcgggaaggatgggaaaaactgcagtcatcaacaatgattaatcagctgttgcaggcagtgtcttaaggagactggtaggaggaggcatggaaaccaaaaggccgtgtgtttaaaacaggaagtgatgtataatggtggttgttgcatggggacaatgatgcttgctagttc

SEQ ID NO: 17477 - DNA, 2103 bp, Homo sapiens
tttttttccgggggagtttgaatatttgtttcttttcacactggccttaaagaggatatattagaagttgaagtaggaagggagccagagaggccgatggcgcaaaggtacgacgatctaccccattacgggggcatggatggagtaggcatcccctccacgatgtatggggacccgcatgcagccaggtccatgcagccggtccaccacctgaaccacgggcctcctctgcactcgcatcagtacccgcacacagctcataccaacgccatggcccccagcatgggctcctctgtcaatgacgctttaaagagagataaagatgccatttatggacaccccctcttccctctcttagcactgatttttgagaaatgtgaattagctacttgtaccccccgcgagccgggggtggcgggcggggacgtctgctcgtcagagtcattcaatgaagatatagccgtgttcgccaaacagattcgcgcagaaaaacctctattttcttctaatccagaactggataacttgatgattcaagccatacaagtattaaggtttcatctattggaattagagaaggtacacgaattatgtgacaatttctgccaccggtatattagctgtttgaaagggaaaatgcctatcgatttggtgatagacgatagagaaggaggatcaaaatcagacagtgaagatataacaagatcagcaaatctaactgaccagccctcttggaacagagatcatgatgacacggcatctactcgttcaggaggaaccccaggcccttccagcggtggccacacgtcacacagtggggacaacagcagtgagcaaggtgatggcttggacaacagtgtagcttcccccagcacaggtgacgatgatgaccctgataaggacaaaaagcgtcacaaaaagcgtggcatctttcccaaagtagccacaaatatcatgagggcgtggctgttccagcatctaacacacccttacccttctgaagaacagaaaaagcagttggcacaagacacgggactcaccatccttcaagtgaacaattggtttattaatgcccggagaagaatagtgcagcccatgatagaccagtccaaccgagcagtaagtcaaggaacaccttataatcctgatggacagcccatgggaggtttcgtaatggacggtcagcaacatatgggaattagagcaccaggacctatgagtggaatgggcatgaatatgggcatggaggggcagtggcactacatgtaaccttcatctagttaaccaatcgcaaagcaagggggaaggctgcaaagtatgccaggggagtatgtagcccggggtggtccaatgggtgtgagtatgggacagccaagttatacccaaccccagatgcccccccatcctgctcagctgcgtcatgggccccccatgcatacgtacattcctggacaccctcaccacccaacagtgatgatgcatggaggaccgccccaccctggaatgccaatgtcagcatcaagccccacagttcttaatacaggagacccaacaatgagtggacaagtcatggacattcatgctcagtagcttaagggaatatgcattgtctgcaatggtgactgatttcaaatcatgttttttctgcaatgactgtggagttccattcttggcatctactctggaccaaggagcatccctaattcttcatagggacctttaaaaagcaggaaataccaactgaagtcaatttgggggacatgctaaataactatataagacattaagagaacaaagagtgaaatattgtaaatgctattatactgttatccatattacgttgtttcttatagatttactaagtgggataagctaattatactttttgttgtggataaacaaatgcttgttgatagcctttttctatcaagaaaccaaggagctaattattaataacaatcattgcacactgagtcttagcgtttctgatggaaacagtttggattgtataataacgccaagcccagttgtagtcgtttgagtgcagtaatgaaatctgaatctaaaataaaaacaagattatttttgtcatgctgactccac

SEQ ID NO: 17478 - DNA, 1461 bp, Homo sapiens
  misc_feature (1267)..(1267): n is a, c, g, or t
  misc_feature (1289)..(1289): n is a, c, g, or t
  misc_feature (1299)..(1299): n is a, c, g, or t
  misc_feature (1358)..(1358): n is a, c, g, or t
  misc_feature (1365)..(1365): n is a, c, g, or t
  misc_feature (1416)..(1416): n is a, c, g, or t
  misc_feature (1423)..(1423): n is a, c, g, or t
tttttttccgggggagtttgaatatttgtttcttttcacactggccttaaagaggatatattagaagttgaagtaggaagggagccagagaggccgatggcgcaaaggtacgacgatctaccccattacgggggcatggatggagtaggcatcccctccacgatgtatggggacccgcatgcagccaggtccatgcagccggtccaccacctgaaccacgggcctcctctgcactcgcatcagtacccgcacacagctcataccaacgccatggcccccagcatgggctcctctgtcaatgacgctttaaagagagataaagatgccatttatggacaccccctcttccctctcttagcactgatttttgagaaatgtgaattagctacttgtaccccccgcgagccgggggtggcgggcggggacgtctgctcgtcagagtcattcaatgaagatatagccgtgttcgccaaacagattcgcgcagaaaaacctctattttcttctaatccagaactggataacttgatgattcaagccatacaagtattaaggtttcatctattggaattagagaaggtacacgaattatgtgacaatttctgccaccggtatattagctgtttgaaagggaaaatgcctatcgatttggtgatagacgatagagaaggaggatcaaaatcagacagtgaagatataacaagatcagcaaatctaactgaccagccctcttggaacagagatcatgatgacacggcatctactcgttcaggaggaaccccaggcccttccagcggtggccacacgtcacacagtggggacaacagcagtgagcaaggtgatggcttggacaacagtgtagcttcccccagcacaggtgacgatgatgaccctgataaggacaaaaagcgtcacaaaaagcgtggcatctttcccaaagtagccacaaatatcatgagggcgtggctgttccagcatctaacacacccttacccttctgaagaacagaaaaagcagttggcacaagacacgggactcaccatccttcaagtgaacaattggtttattaatgcccggagaagaatagtgcagcccatgatagaccagtccaaccgagcagtaagtcaaggaacaccttataatcctgatggacagcccatgggaggtttcgtaatggacggtcagcaacatatgggaattagagcaccaggacctatgagtggaatgggcatgaatatgggcatggaggggcagtggcactaccaantttgggtttttaaaaccctttncaatccttantttaacccaattccgccaaaagcaaggggggaaggctgcaaagttattgccagggggantatgtancccggggttggtccaattggggtgttgaagttattggggaacagccccaantttattncccccaaccccccaaaattgccccccccatcctggctc

SEQ ID NO: 17479 - DNA, 1690 bp, Homo sapiens
tttttttccgggggagtttgaatatttgtttcttttcacactggccttaaagaggatatattagaagttgaagtaggaagggagccagagaggccgatggcgcaaaggtacgacgatctaccccattacgggggcatggatggagtaggcatcccctccacgatgtatggggacccgcatgcagccaggtccatgcagccggtccaccacctgaaccacgggcctcctctgcactcgcatcagtacccgcacacagctcataccaacgccatggcccccagcatgggctcctctgtcaatgacgctttaaagagagataaagatgccatttatggacaccccctcttccctctcttagcactgatttttgagaaatgtgaattagctacttgtaccccccgcgagccgggggtggcgggcggggacgtctgctcgtcagagtcattcaatgaagatatagccgtgttcgccaaacagattcgcgcagaaaaacctctattttcttctaatccagaactggataacttgatgattcaagccatacaagtattaaggtttcatctattggaattagagaaggtacacgaattatgtgacaatttctgccaccggtatattagctgtttgaaagggaaaatgcctatcgatttggtgatagacgatagagaaggaggatcaaaatcagacagtgaagatataacaagatcagcaaatctaactgaccagccctcttggaacagagatcatgatgacacggcatctactcgttcaggaggaaccccaggcccttccagcggtggccacacgtcacacagtggggacaacagcagtgagcaaggtgatggcttggacaacagtgtagcttcccccagcacaggtgacgatgatgaccctgataaggacaaaaagcgtcacaaaaagcgtggcatctttcccaaagtagccacaaatatcatgagggcgtggctgttccagcatctaacacacccttacccttctgaagaacagaaaaagcagttggcacaagacacgggactcaccatccttcaagtgaacaattggtttattaatgcccggagaagaatagtgcagcccatgatagaccagtccaaccgagcagtaagtcaaggaacaccttataatcctgatggacagcccatgggaggtttcgtaatggacggtcagcaacatatgggaattagagcaccaggacctatgagtggaatgggcatgaatatgggcatggaggggcagtggcactacatgtaaccttcatctagttaaccaatcgcaaagcaagggggaagtaagtacaaatggggtctttgttttcactttgtcctaggaatatttttcctcttgcattttcttatgttctccttgcccatagcttcatgcttgttcattcctttccattaaactcctggtttcttgcttccatcattttctttttggttgtgatcaagcttttaagcttataaatactgtgtatgatgtacatttatcctgtgtgttgctattgtacagtactgaccacatgacaaaacaagaaacagtcaggaggtgggggagtgggttgtcatagcaacagactgatttgcaaaatgtaagcagtctgcagcagtgcaaggagagggaagagcatgtccccaaagtgtcataaatctgtctaaccgcagttgatgcatga

SEQ ID NO: 17480 - DNA, 519 bp, Homo sapiens
ccaacagaacctggaaaggcccaggaactaaggccccaggggaatctcaggtggaagtggaggtgtaaggtgggactgaaaatagaattgttagaaaattcatgagcagcaagtcttccagaacccagtctccacctctgagtaattaggccactaccttcctctgctgcaacagaagatgaaaggtttgcacagccaatatgatgctgggaatacttgtgaaaacacacacacatacacatccctctaacccctacttagctcccaaatagccatgcctatactccctgggaagagaatgtaagaaatgtctttggagaaactaaatggccagaaagaaaagatgtacaggtactaacatttgaagtgccatgaaaaaagcttgctgcctaactaccctaaagataagcctgtctataccaaggagtggagaaattcacaaatatgaaggaaacctaaacaaacagaaagaaaggacgttagaagaaacagggataataaggagtggaagaaaatgta

SEQ ID NO: 17481 - DNA, 147 bp, Homo sapiens
gatcttccaccataaccaacaaaaacattattttctcaaagttagaaacaaccctgtgtggccaaaatatatgaatcccaacttcattctcactctggttgtaagaaatgctggaataattaattactcatttggaaaaaattaaag

SEQ ID NO: 17482 - DNA, 489 bp, Homo sapiens
accactggaatcccacagactggggtggacagctattcttatgaaaagtgtggctccatttctggactaaacaggcgtactggcgctgaagataaggatcccaaactccaagtcaggcctatctgcaagcaaagtctcagcctcgctcacctcttcccttcttccatcagtcattagccctgtgtgagaaagcaggggtgcattgttaccatatgacatggcaaaaagggattacctgctaatgccatttggtttagtgatgccttgttacataaactactctggaggagttcaaatatccctcaggcgaacgcttccatccccaggttggtaacactatagctgagtattgttttatttgccatttttcaaaagagggagaaacatacccaagccattatccagcctaccaataatacatttcaagaaaacaaccgcaactcccaatcctttcttctgagggcaggatgttgtagggctattgttcct

SEQ ID NO: 17483 - DNA, 321 bp, Homo sapiens
tatacatgtgtttatgtgcacgtatacatgtgtttatgtatacatatatattaaaactatatatatacagttttattgtttccttttatccatgaggattttgagatattaaaataattatattaattgaataccaatcattctctaagcattttatatatatcagctctttacgtaaatcctcattttgcttgtaagaaatctgaagctcatggtagttaagaacatggaactacttagtggctgaactggtattcaagtctaggcagtctgattctaagatgggaattcttgactactctgctatagcacctttcataa

SEQ ID NO: 17484 - DNA, 174 bp, Homo sapiens
attgactggatgagccctacaatattttggaaaataatctgcttttctcagaaattactgattttcatgttaatctcatctaacaatactttcagagcaacatctatactggtatttgaatatataactcttttatcttttaaaatatcaaataatacagttatatatatatac

SEQ ID NO: 17485 - DNA, 304 bp, Homo sapiens
catttgctaggacaccgtccctctgccgcataggactctgtcagcccgtggaaatgggtgccactttgcaagcgggcaagatgcttctcagcccactccagaatgcctgtatctgctgaccctggaagtgctgtctccatcaggcccaaatccagaagtccaatctgccccaagaaggccctcgcttctctctggagttcaagagaaccttctgggtattccagatacctctgaccaaccaagggtgagagcaacccccacagagtggtgtcacattaaatatggcacttagagaaatctcagc

SEQ ID NO: 17486 - DNA, 1963 bp, Homo sapiens
cttttctcgcctgcttttttagttttgagatttgttttttttttcaatttttttcctccctatttttaaattttttctattctttctgtggttatccttgatgttttccatatgtgtttaacttataaagtctaaagttaaacaatattttagcccccttcttaaagaatgcaggaagcttagaaaccttcaactctagtcattcctctcctgatcacatactgttgttttcaaatatgttagtttgttcctttttataaacctcacaattttacatcattgtcagtgttattttatatagacagtgtttgtttggacttacatgcatacattcttgtatcacacatcatcctttgggatcattttctttcattatgaatatagtgtttaagtgagtttttttttttttttagtacaggtctcttgatgttaaattcttccagtctttcttatatgtaaatgtctttattttatcctcattcttaaaagatagtttgttacaggtatttttactcaacacttagaatatatggttccattctcttttggctttgagatgtctgttgctattaagaagtcgactatcagactaattgctggttttgtgtgtgtgtgtagtagtagtagtagtagtggtagtagtggtagtagtagtagtggaatgtgcagggggtcctgcagttttactctaacatgtttacatatgtatttttttttaattctactttgggaatgtcatgcttcgtggctcagtgaattcatgcttttcataatttctgggaaattctcaaccattatctcttcaaatattgcctttcattttttctagtttttctttcttggaatacagttagtcatattttggacctcctcattctatcttccgtatctcataacatctctgagattttctatctccttgtctttctgcacttcattctggataatttctttaggtatatctttcagcttactgattctcttttcaactatgtttaatctgctctaatctgcccattgagttttttatttcaaaagttatatttttcatttgtacaaacctcatatattttacttgctaatctgcctagtcatccctaatagtctcttattgcttggtcatcttagtgattacatctgttattacttctttaaaacattttatataatttttgttcaaccagtagtcactgtttgcatgagtatgacattgtaaatattgttcacatcaaaactacatagtatattctgattacatatccttcgttgtataccctttcgttttccttggagctaataattgtgtattttgttttcttttgcttagtgttctagtacctatactattcttctctgaaattctttatacaatccaaatcagatcatgtccttccactattcagaattctcccatggctcccacctccctcaacaaaagccaaagccctcaccatggcccaaagtccctacataatctggttccctttacctctcttaccttgtctcctatcactctcaatatcactcactcttctccagctacactggcctccttgctgttccccaagtgtgctagatacccttccttttcagggcctttgtacttgttcttctcactgcctgaaacacccttcctcctaaataatctgatgagttgccctagtacttccagtgtgctcaaatgtcacctccctagagaagtgtttcctgatcaacatatctaaaatcgccccatcacatgcattttatatccctttatcctattttatgtatgtttttctacaaagcactgatcaccacctggtatattttatatttatttattgtggttagtgttcgtctctcttcagtagactgtaagctccataaagcagggacttctgttttgttcactgctgtatccccagtgccaaaaacaacagtgcatagtagatactcaataaatatttgtggaataaactga

SEQ ID NO: 17487 - DNA, 277 bp, Homo sapiens
caacttgtagtgtaggtctaaatgaccgtagagaggtacagattgttagggcctcataagttcattggaagaaacagttaggagctagaataggcagacaggcttataggaagttgataaagggcatcagcaccagtgtaggagtcagatgggtggaaaggtgaagaaaggacatcccaggcaggagcataaagaatgcaaaagtgttgggaaaagatggtagttatgggacatttgtgaagacatcaaaacagtaccacaaacaaagccctgaatt

SEQ ID NO: 17488 - DNA, 726 bp, Homo sapiens
ttattttaacctcggctaatggaaactttctctaacttcctgtgtaggtcagcaatttaaagttggattatccatagaaatcatatttcattgtaggttcatcctagaggttctaaactaggaaaggaatggactgggggggtctcaggtgagggtgtgtgaggacccctgctgctgcttctctggaggttaaggggatttattacactcagtcctaaatgtttcaagtgcagaaagaactgtgtaagtcctaaatgttagcggtggaggacatcttaggcatgaaatactctttcttattgccaataaagaaattaaagcttttggttgtttcctttctttgcgttcagagagtagtctgtctgtgggaactgtttggagaatcttgttttccacattgtgatctctgattaaatcttattcaccatagatacgatttatatatcacaaatttcctttccttcacataagagatgcttgtctaggcagagtatgcagaagtctcatactaacctcccacggatgtcagccctccctccagggcgctcactctcagtgctctctcttcacctctgactagtttatcacacttatcatgtgtctcctggcatttggttgagtagaattctatctcccttattagctaagtgtctctgctgaggagtcattgctcacttgtgtgtcctactcacaggtaaggtgtattaaggtgtattaccagtaagt

SEQ ID NO: 17489 - DNA, 420 bp, Homo sapiens
ctgaaaacccggcagcacagagcctactgacccccccggacaagaacagtgtcaggggacagtggagcagtccaggctggaggagacagagatgaaaagagaatggaagtcaacatgtctgtgattcttttgagaagttttgctttgaagacagcagcagagaaatggagagtaactgtatttattttattcacagataagtcttgacttgtgaaaggtaaagcattatttgggaaatgaaatcacatgctatacctgctagatttgtttttggcacagtaactgggtgtccttaattaagtcgttatttattaagtcagttcctcaaattctatcttcaggtttgcatttaaaatggtgctaaattaaaatactatattcattttaattaacaaagtttgtaaaactgaaacaaatgtt

SEQ ID NO: 17490 - DNA, 841 bp, Homo sapiens
ttccctctggaaatcccttgttacaggtccttagttttagtttgccacattatgacacgatgggaataatgcacagcagtgatcctcagttggtttgggttttcaatacataattgatccatggttgtggcatgcattgtagcatgtccaactagaatacctattctttcaattactttcattactttcaatggcaaaaccacaattacttttgcactaacctgatagctttgctacaagtcagttgttcagttttctttttttgttgctgtttgtttttatttttgcaaacactttagatactgcatagtggatggattagtttgtggttcctgggatcttctgtgtattctgttgaagctcaataatcacattactgcggacctccaaaattttacaaaggactgcacagtgagtattcagccgataaactaaaccacagcttaatactgtgagatgaaagaaagcacaccaattaaaagtaaacactgtttaaacctaacctcaatgaatttctaaagtgtcatacatttattatattctctacttgtaaaatattttgttgtgtgtattgccaagtatttcaggattttatgggtataatgtattctattaatttaactggaaaacttgtagttattcaacaaacaaactaaaagtgttggcagagatgtaattttaaagcacaatcccactcattcgttcagtattacagctgctccttgtttgtttaataatagaactgatgagtagttaatttgagaggaaagctggtgcaggtgtagtgctatttggatgtcatggaggacacatgtgacatctgcagctagctatatggtaa

SEQ ID NO: 17491 - DNA, 720 bp, Homo sapiens
tacttatatatgtttatatttatatatatacacacacacacacacacatacatttaaaaaagagagagagatgaatagtggtctatgttatgccaggctggtcttggtctcaaactcctggcttcaagcagtcttccaacctcagcctcccaaagtgttgagactatagaagtgagctactgtacccagccagagtttatttttaaaaagaaaacttatatcaagataattaacaaataggcatatttgtattatatttgattgccctcttctgtatgctttctgctgtcccagaaagaatgtttctcacataaaagatgatgctttatcctcaacatagattaaatagtcaaagaaaactatggttcagggtagttttaaacctcatagcacaatgaataataatgaataataaaatgtcattacattctcatcttaaaaattataggctgggcgtagtgctcacgcctgtaatcccacactttgggaagccaagttgggaggatcacctgagcccagaagttcaagaccagcctgggcaacacggcaaaaccccatctctacaaaagatacaaaaattagctgggtgtggtggtgcacaactataattgcagctacttaggaggctgaggtggggggatctcttgaggctgtgaggtcgaggcttcagtgagccgtgactgcaccactgcactcctgcttgggctcgtgccgaattct

SEQ ID NO: 17492 - DNA, 418 bp, Homo sapiens
tcccatttctttccaggcacacctcatatcttctgtctttcttcattctgggatttgggggttagggagatgaaaaggagtaaagaattggaagaaatgtcggtctcagaataaagattatagaaggttaacttttaaaaatctacatggatagacttcgtgaccagctgagaccgcagttgaattgtggtcctctaaactactgaatattcctgatgtattgctggtaagaaaatcccagcagaccccattgtatcagatcaacccctgatgtagtgaagaaggaaaagggcttccttagtcttgcattaattgtgagagataattgatagttttagagcaataaatgttggtttcaagccattaaatccatattcgggaaaagctgatttttctaaataagttgctttctaggaac

SEQ ID NO: 17493 - DNA, 724 bp, Homo sapiens
agtgtgggaaataaaggtcccagcccagctctctgttcaggtgggatttattgagcatctactgtatgtctggccttggagtagaaagagaccagcgaagggtttgtgaggcctgaggcccagccttctcactgctgtgcaccctgggcaagccacaccatctgtggacacaaccttctcacgcagggctgtagtcacatcacagtaagaggacgtttgttactcggtggttgagagtgcaggtctagagccccccaactaaaccctggggatagggcaagggccgctttcagtggtcattgtgaagctgtgtacaaccccctcacacccatgcttctgaggctctgagtgcagagactgagtgccgagtgggaggaggttctttccccctcattacaaaagtcatgttcatcttttagtatttggaaatgagtctgacaaagaaaataaaattcagctgacatctaactgcccagaactagcacttggtctcatgtgggaacattctgcccaggtgctgtgcatttggggagtgtctggccccaggaagggccactctgtgctaagcctgtcctgggctcctggacgccacctgcccggccgcctgcccagcagcccattgtctggcatgtgggggcgcggagcagccgttgttctgcacacatctgatcccgtcttttccacatcagatcatttgtaaccgtcaccaggcaatcgggcccgt

SEQ ID NO: 17494 - DNA, 556 bp, Homo sapiens
tctagtgaaaaactgaatatcccatgataaaaactagatacaagctatctgtgaaaatgctttgcaatgtgtggatttgtctcacaaagttaaacctgtgtttgattcaacgggttggaaacactttttttgtagaatctatgaagaaacatttctgagaccattgaagcctatagtaaaaaattgaatatcctgtgatataaatgagaaacaagttatctacgaaaatgtatattaatctcactgaatgcaacctgtgttttacttcaccaggttaaagatgctctgttggtaaaatctgtgaagggacatttctgagcacattgaggtctatagtgaaaaaacgaatatcctgctataaaaactagaaacaagctatgtgtgaaaatgctttgcaatgtgtggattcacctcacagatttaaacctttgttttgtttcaacaggttggaaacactctttttgtagttggacgaagggacatttttgagtcccttgaggcctatagtaatgaacagaatatcctgcaataaaaattagaaagaagttatctggga

SEQ ID NO: 17495 - DNA, 572 bp, Homo sapiens
caccagaggagttctgaggccaatgctcagacctgtaacagtaaatgacgttatccactcaggctgttagttcggcctctgaaagcgggttttgcaaaacccattgttaattctcaggctctgttgggggtggtcagaaatctaatttgtgagtatcctgtgcattggataagggaatgttttccttgtgtttctcctctgcagactcggattgtctttccttgatgttaactgtcttaggactggctgcttcagagggctgggtatttggtggctgtttgcaggcttataaacagcctttttattttacctttgccgtagactgaggtgcagccctttagcttggcttttcagatgcctgctgtccttgaagcactttcattttacctagcgcctttttggtatggatgcaaagctggtttctaatagactgagaagagaagggggaccgggcttcctccttgccttcccccaggctgctccctgggaacatttttgtgtttgcacagacacctgtccgtctgcagtttgtgccacggggctgcacgattcctaaccttctacccacctaa

SEQ ID NO: 17496 - DNA, 374 bp, Homo sapiens
ctacaagcaatttgcatgtataagattacattacaaatacattattataagcttacattacattgtatacattatacatataatgtataaatattttttgtataagaagcaatctaacaattacttacacaattttaatgctttcataagattcttgtactaaatttggagaaatggagaaatctgaatattttatctatctcagtcagagtttaaaaaatgaatggtacagtgacctaatactttgagctcaaattaaattcaaggtttgctataaaattttttgcattttagcccagaggacatttaaccactttcaattaactacacatattttctcttctatagtacatactatgataatgatattacag

SEQ ID NO: 17497 - DNA, 362 bp, Homo sapiens
gtccactctgaccagcccacagcacagcgcccaccctgcagctccagatgaggcctcactctgtcacccaggttggggtggagtggcacagtcacagctcactataacctcaagctcctgtgctcaagtgatcctgccacctcagcctcctaagtagctggaactacagatgtgcactgccatgccaggcttgtctaacattttaatgtgttgcttcttccagttaactagagtttttggagatttctgtcttcattcatgagggataatagtctgcacatttattttcttgtgatgcttttgtctgatttgttatctgggtaaaactggccccaaaaatgaattgaggttttcctgcttct

SEQ ID NO: 17498 - DNA, 173 bp, Homo sapiens
gagacagggtctggctctgttgcccaggtgggagtgaagtggcacggtcacagctcactgtaacctccatctcctgggctcaagggatccttccttttttttccctccctcatcaacattataatgaaatgatattgaatgaatcaacattattcaagaacctgctgtatttg

SEQ ID NO: 17499 - DNA, 261 bp, Homo sapiens
gtgggttgcaggctgtggatgcatcaggcgactccaaggccattagtgacatggacaggaagagttgtggtgctggtaggaacaaaattctgattgtaatgggtccaaaagaggatggaaggggaaggattggaagcaaagcagattgataactctttttagttttgctacagaaaggtgaagtagtatagtagttcatagggaaaatgggaataagattttttttttactggttagaaataaaacgaaagtataataata

SEQ ID NO: 17500 - DNA, 423 bp, Homo sapiens
acaagtgaagcagttcatacatatgctacagtttaatcctctcactttaaaatcaatagtggaggattttatgtctgggacaggtaataatccctgcacacttggacattaactggagatgtaggcattaaatatgtgcattttacctaggacaaatcaaataatgaagttaatttcatatgtaatgaagttgtgggtgtcgagctgaatttcattcagttgggaataaacctttgtcctctactgattcttttttgtgtcttgtaagtagcagttatcaaagaataatgctgtgaatattgtcctagtttccttaaatagcactcttgaaaactgtgaaccaagaagtgaaataggaaatgttaattctacagaaacactgaaaggttaaatgaaaatataaaattagaattctcttgagat

SEQ ID NO: 17501 - DNA, 499 bp, Homo sapiens
agatcgaggtcgtggtgagccgtgatcgcgccactgtactccagcctgggttacagagcgagacctcatctcaaaaaataaattaaaaagtgcacaattcagtggctttaatatatttatagagttgtacatctatcatgatgaccgatttcagaacattttcattaccccaaaaagaaaattcacaacttttagcaatcaacttccaggcagggcatggtggctcatgcccgtaatcctagcactttgggagactgaggcaggcagatcacctgagcgcaggagttcgagaccactgggcaacatggcgaaaccccatctccactataaaatacaaaaattagccgggcgtagtggcaggcgtctgtaatcccagctactcaggagtctgaggcaggagaattgcttgaacctgggaggcggaggttgcagtaagctgagatcgcgccactacactctagcctgggcgataagagtgagacttcctctcaaaaaaaaa

SEQ ID NO: 17502 - DNA, 329 bp, Homo sapiens
tcagaaatagtctttggctttgattttgattatgattcagtaaaaaatggaaactggggtttggcttagtatagtactctgcaagtcaaagtccattctggctaactgcaggaatctcaaccgaatacactgttggccccggctggtgtcactgaagttccctgaatcatgtagctagtggtcttcaggcagcagttcatccactcaccccagagcctccatgcaggaggccctgaagcaagaattggggcttcaccgtgtgacgacatcacttgctgctgctctctgctggggcacgcccgggggcgggtggggaagcggggatgggc

SEQ ID NO: 17503 - DNA, 490 bp, Homo sapiens
tgaactgccccacaaatcacacctatgtgggggtgtaacacacatacttctaactcagctgcttttaggagctatgcaactaaatgagattgcttttgcagttagggaggcgactactgaaactgtatgaatgaaaaaaactactttctgcataatgagataattttggagacagttgataaaaaccgtaaatccggccgggcacggtggctcatgcctgtaatccaggcactttggggggccgaggcgggtggatcgcgaggtcagaagttcaagaccagcctggccaacatggtgaaacaccgtctctacttaaaatacaaaaataaataaaattacccgggcttggtagcacgcgcctgcaatcctagctactccggaggctgaggcaggagaattgcttgatccaggaagtggaggttgcagtgaagcaagattgcaccactgcactccagcctgggcaacagagcaagactccatctcagaaaaa

SEQ ID NO: 17504 - DNA, 384 bp, Homo sapiens
ttccaaccattggaaggagagggcttccagaaggaggcatcattggttctaagctttgaaccctgagtctgtctattatgttgtctagagacatgcagataatagtgcctgtaacgctgcactctggcgagggtgtccaccgagggctgattccaccagacagtctgtcccagctctctctgtgctcctgtgtgccagcactgggtaggttctcaggttgcccagggcccaacatcctcattgcagaagcagatattccagcgggctcaacagaagcaactatgcacacgagaatgctccttgagagtggcataagggctgttactattattatttatttaatataatataacaataaattccttcacctgcttctttctcatc

SEQ ID NO: 17505 - DNA, 245 bp, Homo sapiens
tggctaagtcactggctttatagcagcaagcaccacagtgcacataaaagaaagaactgttcccagacattacctacagtaaaatcctctctgagttcttttccggaaagaaagaaagaagcaacaaaaaggattaacctagttgcataaagagcagtaaaggactctggcaatgcagttcgcgctcgtaggttcgcatcaccagtgaacagaaggcttgctttaccgctccctcaggagcacgt

SEQ ID NO: 17506 - DNA, 1316 bp, Homo sapiens
taggtctgtatagaatacgactgaaagattttgactgttgatttcctttgaagagattctcctgttctcctcttcagaggaaagagagaggagagagggagagaggagagaaaagagagaagagagggtgacttttcattatatgccttttgtaatatttaatctcctcccttttctcacccccttgagcatgtattgcttttcaacaattaaaaagattaaaaagctcttaaatagataagaatttcttagagcaactagtaagtacactaactgccaattgttttgaaatgtagacattctgaaaaatcaaaatgattgtgccgaatgtattttaaaaggctaaaatattatagcatttcaaagtacatactcatatttataaggacttcctcactaggaagattcctgggttctacagaataaaattcttggctacttgtcttatagctctgaacagacttattttcccagagagtatgtttattatgtaatagcgagttgcctgaccccccaaaaagcttgttctatcatattaaaataaggcaaaatgattactttcagattaagaaattgggactctagatcttgttatatagtgagttctttaaaaaactgaggtcttggttctgaataatagtggtttacataatttatttagaatgtcattggggttatctctgacctatttttataaaataatctcatctttaaaataggagtaaaatgctcatttgcataagccagtaataataatttagtatttttccaagtatttatagtcaatgtgtttgccatgaacttttttaagggatgtttttaattttagaagtgctttaaaaagcaatatggcatctggctctgtagaagtagaaaacatggtaacttcaatgtgatatatttgcttttttcccctcttaggtctttggggtaaaaaaaatccaaagtttactcaattttatttctacatatattacctacaaattatagaggtgagacctgcttgctgcctgttcatacctgtcagtgatactaatacctcccgtctgtacagtgtttcatagtttccaaagggttctcgcatggttcctcacttgagcctggtgaggaaatacctgtaaacatgggtagaagttttagtcccttgtaaaactctggtataatatcaaaaccaggaaattgttcacagattctaaggattggggaaaagagaaaaataaacaaattgctcaggagtagaatttgcaaaaaaaaacgaaacaaaaccaaaaaactctggaaataaggcacgtttagccttacagagcgagaccctg

SEQ ID NO: 17507 - DNA, 453 bp, Homo sapiens
caaaataaatccaaagaaggggtaaaaagggaataaatcaatgatgtagaaaatagacacccaacaaagaggatcaataaaataaaagttgattctttgaagagacctattaaagatacacaagaagtgtctgataagatttttccagaaaaagaaacaccccaaataaatacgagatcagagccagatgtggggctcacgcctgtaatcccaacactttgggaggctaaggcaggtgtatcgcttgagcttaggagcttgagatcagcctgagcaaccctaaccctacaaaaaatacaaaaattagctgagtgtggtggcacatgcctgtgatcccagctactcaggaagctgaggtggaagaattcatagagcccaggaaagtcgaggctgcagtgagccatgatcatgccattgtactccagcctgactgatagagtaagaccctgtctc

SEQ ID NO: 17508 - DNA, 479 bp, Homo sapiens
tcttttcttttcttttttttttttgtgcgcctaggtaggaaaaaaatcactggctaagttcatcaagagaacctaagaataaagacaatattttagataaaaatgggatccttaatttctgtaaaactgagttccttctggcttatacattaggactgtataccaagtcttacagaaatggcaaaacattactaaagatacttagagtggaacattccaaatgaacaacaatgccaatgcatttaaacaacaatgccaagtacatttataaatgagggctctcagtaaagtctctttgactaaaaacagttttggcactattggatgtcaactgctattctttttggaataatctgccttgcactctttgttgactgctgtgggtgacaggatgaggcatgtacagaattgtggtgaatggggagctttttccttctccctacaaataaagaaacttgatagctgatgggactgtgggg

SEQ ID NO: 17509 - DNA, 451 bp, Homo sapiens
aaatggctgacaaggtgcaattatcctcactgattcaaatctgtgaagcacctgctatgtgccaggtggcattgcttgacccttgctctcagtaaataagcaaaggaacacgatgacaggtgtggttttccaccttcttagaccacacaatccagtatcttttatttatttatgtatttgagatggagtgtcactcttgttgcccaggctggagtgcaatggggcgatcttggctcaccgcaacctccgcctcctgggttcaagcgattctcctgcctcagcctcctgagtagctgtgattataggcgcccgccaccacacccggctaatttttgtatttttagtagagacgaggtttcaccatgttggccaggctggtctcgaactcctgaaatcaggtgatctgcccactcggcctcccaaagtgctgggattacaggtgtgagccacc

SEQ ID NO: 17510 - DNA, 1844 bp, Homo sapiens
ctcttttcaaagtaattggggatgcagtgcttagaactgggctggcattgtaagccaactgtgcagtcatctgctgaatcaggctaagggtaggtcctggaagatactccttccaaaccttataatcagaggtgactgcacagttggcttacaagagcctcttttcaaagtaattggggatgcagtgcttagaactgggctggcattgtaatttttttaggaatctgctcccatttacaagacgttccatcataaaaatcaaatcataaaatcaaatccaagtatgttcatttggtatattcattttccacttcttactaggggtggtgggggaggagaagctggtacaggagaaatgtcttttatttcccctctataacaatggtataattccaaatcttatagaccatcacacagttctgttagttgattgttttccgtggattctaccctgccaggagacacaataaataactttttgaaacttcattcttcagtcctgggagtttttacaaataaaaggacacacatgttgagacaaattacatgcttgaaaatctgtcactaacatcaatttcatgttaaaaagtactaagcaactattacagtggcatttcttttgttgttggggaaaataatgtgaatagctatgctaattcagagataattttcaaatttcgtgactaaataaaaaagctaagagtagttcactaggtaatgtttgggagggagttgttggttttgttgatttattatatcttgactggtatgattgaaatgaattaaatgttagacgtgcttaacattttatatgctatatatcatcataatagcaaagtgcacagatcacattattgagtgcctttggattttaaaaataaagattgctattcagatgaataccatttcattattgcctgcactactctgtcaaattaaaaaatataatagctatctttattctcgttttaaagcatgataatcatcaaaatgttgaagtttatcacagttctacattaaaaataagtcatttttgtagatgagttatccaatacagcaaaggccatcaaagagaaagccaatactttcatggagagctcagagccttaatagatcccagcagcaatgcttcaaccattcccaactccatgttccttgctagatgctcctcaccccaaactcctgcaaatttcaagaatttctgtgtatgtgtgtgttaagggaggagttttaaagtatctctgtattcaacaagatacgtcagcttgtaagcagcagaaacctacttaaactagcttacatgagaaaataacattataaagacataggagtgtttctacaccaagagctggaggtattgtttggtttcatgaaggattaaaatctgtaattcaaaagtagactcaggcagctgcacatcaatctgtgtctttctctctggtactgtggactctatcctgtctgacttgctttgttcctgggcatcattcttgctctggaaaacacactttccctgctcatttttttattttaatgcttaggttcaatctgctcatttttccctacagcagaagacagcttactgtgttccagcaaacaacagagcctgaccagcctctctgaatatggggcccccttctcactcacaagtattcttaacctggggtccatgtggggtttgtgaatttggataggattttaaaattacattttcatttccactaatctctaaccgaaattcagtcttttcttcaactgtgaatgtaggcagcaagccacagtggaacttgccgaacctataaatttgtcactgtgattgatgttataatgttacacctagatct

SEQ ID NO: 17511 - DNA, 479 bp, Homo sapiens
gtttggggttgttaaacttttgtttaggttacttgcatctatgttctttagtgaggttgtcttttaattgtctcatactgtccacagtaggttttagtatatggattaaactattttcataaagtgagttggaaactattcctgctttttattcttttatttctccttagaatgttcaatagaacttgtcagaaatgggctgggtgcagtggctaacacctgtaatcccagcactttgggaggccgaggcaggcagatcacgaggtcaagaaatcaagaccatcctggccaacatggtgaaaccccatctctactaaaaatacaaaaattagctgggtgtggtggtgcactcctgtagtcccagctattcaggaggctgaggcaggagaatctcttgaacgcgggaggtggaggttgcagtgagccgagatggcaccactgcactcctgcctggtgacagagcgagactccatctcaaa

SEQ ID NO: 17512 - DNA, 453 bp, Homo sapiens
gcttcccatgaaagaacccctctaatcttcagaacaaccctgtgagaactggctgaagtttactttttggttctccagagacctagcttcttccaatgtggtctatttaatctcctgtcatgtgggaaattatattcaaaatctccatgatcctctgtccatagtaagttatgcatgtagtgagaagtacatgccacaaggtcttgagattatatctgcaatgtgttgctgctggctgttgatcaagataggctgggagaagatcattttcaggtgtgaaaaactgtcacctttatcaaataattcttcttgcatatttcccaagacgttgtagcctgtctaaacttgggaggttaattttgtagcattcattatgaccgaaaatgtagttcacacaatcatgatgctctctttattaggtgttactgttaaacaatattaaaatacacacaa

SEQ ID NO: 17513 - DNA, 569 bp, Homo sapiens
aagcaaatgtagacaacttttgattgcctaactctcagtgaaacttaaccatcatagaggtattctccctattataacaaagttagattccaaaagcttgtaagtaagctgtgtataacttggacatatgttttcctatagcaccatttctgcatgtaagactgtgtttcgaacctcagcttggagcttggacaatcaagaagaggtgtctttgctggcctcagctatgagaatcctatctaggtaccgccatctctagctatctgtagcaccaaccctctgctactactgctgccttctcccgtgggatgaatgtggtgaattgtgcattcatatttcaggaatgattaacattcaaggttggagatattccagaatcacaatttgattttataagatgctttgcagaaatatcttagataatctaaggattcctaatggcttatacaaaagaactaaagtgagtgtgactatccagcttcttctatttcttcctactctttcacttcttttgttcccttcatgattctgctgcatgccaggaatggactcacatgacttctcaaact

SEQ ID NO: 17514 - DNA, 663 bp, Homo sapiens
tcagctctagcatctttttagctctttattttcatgtacacctaaataagattctatcttggagagtttgtctatttttgtgtatgttgtttgtttttagcaactctgttaatcttaaaccccctaaagcatctgcttattttttcagttttttcaaaatcagttatccatgtatatgatctaagaaccaaccagctccacatagcttcccagcttccctttcccatttctgcttccttagaagtaactaccttcaactctttttagtttattcttttggtatttacctccatattgccaagtaacatgtcatttttgctattggtaatttcttactactagatactatctcctgacttccctctagggaagatgagcttgcattccctcccctgcccactctatttatgtatatatttcttacctccacttcccatgatcatacacatgctattcagattttacccaagtaatacctaattatattttcttgtctgtatattttgttttctctggagttagtaatttaaaaaatatgcttgatggacaagtgcagtgacttatgcctgtagtcccagcactttggtaggccaaggtgggaggatagcttgaggccagaagtttgagaccagcctggacaagatagtaagaccctgtctctac

SEQ ID NO: 17515 - DNA, 560 bp, Homo sapiens
acaacgaacagacaagaatgcctacttccaccacttctattcaatgtagtattgaaagttctagctagagcaattaggcaaaacaagtaaataaaggtcatccaaatttgaaaacagaaacaaattgaatacgctttacggtttctacacaaggttagcatttactccctcactacttccaaaaggaatttgagatgacttaaaataaaatgcagattctaaaaacacaagaattagacaagaaggaaaaggaaagtgaattagaagccctaaataggccaagtgcagtggctcacgtctgtaatctcagcactttgggaggataatgcggacgggtgacttgaggtcaggagttctagatcaacctgggtgacatagcaagaccacttctctacaaaaaagaatttttttttttaattagcccagtgtggtggtgagtgcctgtagtcctagtcaggagaatgaggtaggggttgatcccaggaggtggaggctgcagcgagctgtgatggtatcactgcattctaacctgggtgacgatgagatcccccatctctatt

SEQ ID NO: 17516 - DNA, 390 bp, Homo sapiens
gtatttgatctgttctgcatggtgtttggccctcctctttgcaagttttgcaatttcactgtccaacaagcagtatctggtaggagttttaataagactcttcacccttctttgtgctcaagaaaatattgtcagcactcttccattccctcagaaacaggatcccacccactctgacatagctgttccacacaagaaaccaaacatgtaaaccctaaacaaagagagtttgatgccaagggttactttttctctttattctgtaatatatttatacacttttgctcaatatcaaactatttgaagtcattataaataaatccagaaatatgtgctttatagcctcaatatgagcaaataccaggccagaactgaccaaatgcacaaaca

SEQ ID NO: 17517 - DNA, 359 bp, Homo sapiens
ttcagcactacagtagcagagttgagtagctgtggcagacactgtatggcctgaaaggcttaaaatatttactgtcttgccctttacaggaaaagtttactgacccctgaattgaatgagccacattcttcactttaaaaactgtgaaagattttacagctggatattactcttcccaagcctttctggttaggatttgtctttcaaagtgatcaaagaatgttggagatacaaataatctgagaagattcatctagtctggaatgtcttccattccacagataaaagccccagagacggatcacgaggtcaggagatcgagaccatcccggctaaaacggtgaaaccccgtctctact

SEQ ID NO: 17518 - DNA, 390 bp, Homo sapiens
agaacaatagaaactactcagtctgaacaacggagaaaatagagtgagaaaatgaatagagccccagggacctgagagatggtaacaagagatctaacattcctgtcactggagtcccagaagaagaaaaaaagaaggcagggctgaaaaagtacaccaagaaataatgactgagaacttcccaagtttgtcaagagacaaaacatagtgattcataaacatagtgattcaaaaagatgaggaaggccgggtacagtggttcacgcctgtaatctcagcactttgggagacagaggaaggcagactgcttgaggccaggagttcaagaccagaccgggaaatatggtaaaaccccatctctaaaaaaaaccaaaccaaaaaaacaaaaac

SEQ ID NO: 17519 - DNA, 357 bp, Homo sapiens
tgggatattaggggtttaatcacaattaaagatgaaaaatgttaggagggaagtaaagcagaaagcccaaatcagacagtgaatcagggattaagtgggcccaggagaaaggaggaagggaaggagctggaggggcgggagaacaggagacagaacaggacagagacagctgcccgggaggatgggagaacagaaagagggaggaaacgccgagcactgacctgggggaggggagtaaagagaagtgaagggggattggaagggaactggagaatgagagaagcacccgcgaggtagaggcacccgggaggtagagggcggggaggcacccgcgaggtagaggcacccgcgaggtag

SEQ ID NO: 17520 - DNA, 449 bp, Homo sapiens
tgggatattaggggtttaatcacaattaaagatgaaaaatgttaggagggaagtaaagcagaaagcccaaatcagacagtgaatcagggattaagtgggcccaggagaaaggaggaagggaaggagctggaggggcgggagaacaggagacagaacaggacagagacagctgcccgggaggatgggagaacagaaagagggaggaaacgccgagcactgacctgggggaggggagtaaagagaagtgaagggggattggaagggaactggagaatgagagaagcaacaggcggggtgcgtgtaggagggcgggagagccaatgacaagacagaaaaggcagagaaagcaaagcaagaccagactcctcatccggtaacactgtgtcaggtcattgccctcccaccccgcccccaaccccataactgaaaacaagtaggaacctggataa

SEQ ID NO: 17521 - DNA, 180 bp, Homo sapiens
gggagatgcagttgggtagagaggttgaagggaaaatgagaccaggtgcaggtcagctgatccattctgctgggtgactcagttccagcgcggtcctagtgagggcctgggtggcatttggagtctcactgacctggtcttctgtctactatttctttgcaaacctgtaaggactaaaga

SEQ ID NO: 17522 - DNA, 2316 bp, Homo sapiens
  misc_feature (96)..(96): n is a, c, g, or t
  misc_feature (99)..(99): n is a, c, g, or t
  misc_feature (127)..(127): n is a, c, g, or t
  misc_feature (149)..(149): n is a, c, g, or t
  misc_feature (151)..(151): n is a, c, g, or t
  misc_feature (208)..(208): n is a, c, g, or t
  misc_feature (549)..(549): n is a, c, g, or t
  misc_feature (573)..(573): n is a, c, g, or t
  misc_feature (578)..(578): n is a, c, g, or t
  misc_feature (638)..(638): n is a, c, g, or t
  misc_feature (691)..(691): n is a, c, g, or t
  misc_feature (1254)..(1254): n is a, c, g, or t
attttattttattattattactttttttgagattgagtcttgctgtgtagcccaggctggagtgcagtggcacgacttggctcactgcaatctccnccncctgggttcaagcgattctcctacctcngcctcctgagtagctgggatcncnggcgtgtgccaccacacccagctattttttttttttttgtagtgttagtagagacangatttcaccatgttggccaggctggtcttgaactcctgacctcaggtgatccacctgcctcggcctcccagagagctgggatttagaagcgtgagccaccactcccggccaatatatttgtatttgtaagttcacatcattcaaaaatctttatatctggtttctacctatttgagacaatatcctatgaattggtttttaaattaaaagaacatcatattggggagaagattgctctgtaatgtttgttcaagaaagcagcaaactaggctgagtgcggcagctcacccttgcaatctcagcactctgggaggctgaggctggcggatcacttaaggccnggaattcgagaccaacctggccancatgntgaaaccctgtccctactaaaaatacaaagattagccggatgtggtggcatgcacctgtngtcccagatagtcaggaggctgaggtgggagaattgctggaacctgggaggcngaggttgcagtgagccgagattgcactactgcactccagcaagtgcaatgagaccctgcctcaaaaataaataaataaagcagcaaactgattttttaagcaaaaaaaaagaaagaaagaaagaaagaaaaaggctgccagtatcatgtgaaatttagagccctacttctaaaataccgttgctgcataagatttttaggaattcagatgcatcactaaatattttttttttaagtggtgcaagtatgaaaggaaagggctctgagccaggcgcagtggctcacacctgtaatccaagcacttagggaggctggggtggacagatcacttgaggtcaggagttcaagaccagcctggccaatgtggtgaaatcccatctctactaaaaatacaaaaattagccaggcgtggtggtgcacacctgtaatcccagctacacaggaagctgaggcaggagaatagcttaaacctgggaggcagaggttgcagtgagccgagatcccgccactgcactcctgagtggcagagtaagactccgtctaaaaaaaaaaaagggctgtagnctggcctggtggctcatgcctgtaatcccagcagtttgggaggccgaagcggggcagatcgagaccagcctggccaacatggcgaaacctcatgcctaccaaaaatacaaaaaattagccagacgtggtggtgggcgcctgtaatcccagctactcgggaggttgaggcaggaaaatcgcttgaacccagaaggtggaggttgcagtgagccaagatcgtaccattgcattccagcctgggcaacagcgagactccatctaaaaaaaaaaaaaaaaaagccgagcgtgatgtcatgtgcccataaccccaactactcaggaggctgagacacgagaataacttgaacccaggagatggagattgcagtaagctgagatcacgccgctgcactccagcctgggagacagaggaagactgtttcaaaaaaaattaaagagctgataccttttgcagtgggaaattcttaaagttttaagccaagtgcctatttttaactgatcatagtgtgatgtccacagaggcacaatgtatattagtactttcttccatatttggtacataatgaatgcctttggtactcattttctgaatggtttgctctagtaggaaagaaaaaaaaaaaaagcaagaggcagctttgcctgcactactgaggctgtaccaccagaaagcttcattcccatggttcctctgtatggcatccaagaagttgcagagtcccttgtgtagttcagagagcaggggtgtttctcaggatttcagagtcatcagctgctttgaaggtgtgcttccttcacctgtgttttaacgccctgccccaggggtggtccctgtctcccttgggtacagtgccctgtggcaccttgggtgctctagttccaggtttgcctcgcttcccctctgagggtgttctggagaagcagtgctttttaaattgacgggtcccatcctctgccagttctagactttatttcaagaatcaccagtgcaactatatatacatcttcaggttgctgtttttatttttaataattattaaatacattttctcaaaaaaatta

SEQ ID NO: 17523 - DNA, 1593 bp, Homo sapiens
  misc_feature (531)..(531): n is a, c, g, or t
cagtgtggtatggatttactgggtaatgcatggtgtgtcatctcctgatagaccttaaccatgtgtcttctggtgacctccctatgtcatttgaagccccttccttttcacctttgattctagaagactgcttttgaaaaaatgggcacattttaaaacatttttaggaattcagatgcatcactaaatattttttttttaagtggtgcaagtatgaaaggaaagggctctgagccaggcgcagtggctcacacctgtaatccaagcacttagggaggctggggtggacagatcacttgaggtcaggagttcaagaccagcctggccaatgtggtgaaatcccatctctactaaaaatacaaaaattagccaggcgtggtggtgcacacctgtaatcccagctacacaggaagctgaggcaggagaatagcttaaacctgggaggcagaggttgcagtgagccgagatcccgccactgcactcctgagtggcagagtaagactccgtctaaaaaaaaaaaagggctgtagnctggcctggtggctcatgcctgtaatcccagcagtttgggaggccgaagcggggcagatcgagaccagcctggccaacatggcgaaacctcatgcctaccaaaaatacaaaaaattagccagacgtggtggtgggcgcctgtaatcccagctactcgggaggttgaggcaggaaaatcgcttgaacccagaaggtggaggttgcagtgagccaagatcgtaccattgcattccagcctgggcaacagcgagactccatctaaaaaaaaaaaaaaaaaagccgagcgtgatgtcatgtgcccataaccccaactactcaggaggctgagacacgagaataacttgaacccaggagatggagattgcagtaagctgagatcacgccgctgcactccagcctgggagacagaggaagactgtttcaaaaaaaattaaagagctgataccttttgcagtgggaaattcttaaagttttaagccaagtgcctatttttaactgatcatagtgtgatgtccacagaggcacaatgtatattagtactttcttccatatttggtacataatgaatgcctttggtactcattttctgaatggtttgctctagtaggaaagaaaaaaaaaaaaagcaagaggcagctttgcctgcactactgaggctgtaccaccagaaagcttcattcccatggttcctctgtatggcatccaagaagttgcagagtcccttgtgtagttcagagagcaggggtgtttctcaggatttcagagtcatcagctgctttgaaggtgtgcttccttcacctgtgttttaacgccctgccccaggggtggtccctgtctcccttgggtacagtgccctgtggcaccttgggtgctctagttccaggtttgcctcgcttcccctctgagggtgttctggagaagcagtgctttttaaattgacgggtcccatcctctgccagttctagactttatttcaagaatcaccagtgcaactatatatacatcttcaggttgctgtttttatttttaataattattaaatacattttctcaaaaaaatta

SEQ ID NO: 17524 - DNA, 358 bp, Homo sapiens
gttttcaacagtagtgtatgagaacttagattgtccacatccttgtcaatacttcttgactgactttgattatagccatcctgctggatatgaaggggtttgatttgcatttccctgatgactaatgatatcaggcatatgtatttattattcatttgtatgtcttcacttgatcttagccaaaaagcagagaagcaatacatttgtatatcttctttggagaaatgtctactcagatcccttgcccattttaaaattgggttatcattttattatgagttgcgaaagttcttcatatggtatagttcttcatatacaaggtatccaaactatacaaaggtatatgattaggaaatag

SEQ ID NO: 17525 - DNA, 399 bp, Homo sapiens
ttcagttgggcctactttatctgtagtctggacattaatttaatttaattgtattaaagattagagggcaatagtcatttttattagagctgttttagttaaggtcatgttttgtagagagaaatccaaatgtagataatgttttactctgaacattaatattgttaaaggctctccagtgaattctcctagaatcgttgttcagagggaaatagacctgctgtattttatgtggtgccatattgacctttaggttctaatcaatagctagctataattagagagagagaaaaaatgattaatttggtatctgaaatctcatgtagcaggcttggaagacacttggaagtaacaaaagtcacactgtaaattagtataacttttttcataagacttcat

SEQ ID NO: 17526 - DNA, 621 bp, Homo sapiens
cttagatgctgggaaataaaatatgaataagacatggtctttgcccccagtaaatagctcactatacaaaggtttccttgtcatttaatttataaattaggagagccactctttatgtatttattttgcttctgtgtaatttgagttttgttttctcaggattgcctcactgaagcaagtcctaaatcaaatacagtctttgtcatgggagtcaaagtttcacaaacaaacacgcatagtttgctagattaaaagtcccaataacgctattctagggctttacccatcaactgaatgtgggtccccacaggcataggatccatgcctgtttcagtctgccaacagcgtggctccaggaaggaagcctgactgctgcagaacaagaaatgcattatgactttatcttttttctaaaccattagctgaaattactaaattattaacccagccatataaatgaattataaacatagcatatgtgcatttgattaatctgtttttcatgtcaagtgttatacagacctggggtacaaactcatggggatacttaagtaacacacagatgaagtataaagggtgtaaaccaagggagaggcaggaagtgtggcaaaatggtgattg

SEQ ID NO: 17527 - DNA, 320 bp, Homo sapiens
agaaagggaagtctgctctcactggacactggaactgtttgtctctgtctctgctgtactttccctgcctctacctcacttagtaaagaaatcatctttgcttgataactaaaacaaccaataaggctgagaaaggggaaaacccacatctggatttaaatacaaggtaagaaatatttttctctttagaatatcccactcactttgggaaagtgatttcatgtgatgtattattcaagactctcatcagcaaatattttctgaatgtatactatgttctaggtattgggccagctgctggggattaaactttgaacaaa

SEQ ID NO: 17528 - DNA, 415 bp, Homo sapiens
atataaataacagctcgtaatacacactgttccacatctcgctttttcatctagcaatgatctagctttttcatctaaaatgatcttcaagatcattttatttcagttcatacagaacattctaattctttttataattgtatacaattccattcattgcatatagcataatatgactgctatggtctgaatgttaatgttcccaccaaaaattcatatgttgaaacataattaccaatgtgatgacattaggaggtagattagatcatcagagtgaagtcctcatgaatgggattaatgaccttaaagaggctcaagagctgccttgcttcttccaccatgtgaggacacagcaagaagacgcagtataagtacaagggccttttacctgccagcactttgatcttggacttcc

SEQ ID NO: 17529 - DNA, 526 bp, Homo sapiens
ggcatggatggtgatccttctgtccagtctacgctggccatgctggccctgaggcctggaactggggagcacgagcaggatgacatctccagtgtctgtctgggtcacctgttagcggatgagaagtccagccttactgcctgttctccacctgcatttaggcttcatccctggaatgtcaccttctgtcttctggaaaacgtctaggctctgctgccatacagaacccttctgcttccttaaggagacggtccactgtccccttgtcttctctcctctaagcaagaggggcccctgcccgttgccctttcctggatggagcatgagttttgatgtcaggcaggtctgggtttgaagcctcgtttgtcttgccttcagaataacctctctaagcctcagttttatagcccgaaaatgggggtgattataactcctgaagggaagttttgggattggctgatacataagatacttagcacagtgcctggcacacagtaagcgatcaataaatggtagcatttatagc

SEQ ID NO: 17530 - DNA, 361 bp, Homo sapiens
cgcgacccgcagcccacccctgcaccagtggacactgcgggatggcctggcctcggctctgcattttcacttctcttagctctcatctcctccaccacagagacagctctgtctgagtatctttctgatactgttctttatcccccaggactggcccagcccagggcggtgcgtacagcagacacttaatgtaacacagtagcagcttttaatttctcaggccaatgagatacagacagtcactggtatggtagtttttcagtcaagcatcaagggaagaacttattagtttgaattacaaacaacagaagtagaaaactccacaaggaaaaatctcagctggtgaagaagctcaggagct

SEQ ID NO: 17531 - DNA, 511 bp, Homo sapiens
agaatctcagaccccaccccagaccaactgaaggagaatctgcattttaacaggctttccagactccaggtgagagcacattacaggtggagaggcacaaggtggaaccttgccgattgagagagaattaagtgttctttcccctccttcctctgagccagatcacaatgacttggatatggaaaaaaaaaattagggtgataatttttccctttgaccctgctcccccaagcccccaactgaaaaatgggtgtggtccattcatcttggaagcattatgattgccattattatttagttatttttcttttacattactagtgtgtcactatgtaatacatgacctgtaatcatggttataatcacagttaattatacatcatgaggccgggcgcaatgactcatgcctgaaatcccagcactttgggaggccaaggcaggtggattgcttgaggtcaggagttggagaccagcctgggcaacatggtgaaactctgtctctactaaaaat

SEQ ID NO: 17532 - DNA, 4061 bp, Homo sapiens
aagaaagaggggcagaggagggaaggcgactgcagtccgaaaggagcttttggaagctaggaccctaagcgtcaggacgtggcattggtcgagagaaagcctgggctggcaagagctgccgccggtgctgggagagcatttatttgggagaaaaagaggggagagagcagagggagggggaggaagagagttcaaaccgaagtggatggaaggggactggggtttctgccgcgcagggagccgtgagccagggcgatggcgctaagggcggcgcggagcagctgcgctcccgagaacgcgtctcctcgcagaggactagcagacatcgggaaggtctgcgccaacgggaaccaacttgtggctccaaaatgtacccaacgcagctggaaatgagatcaaagctgcagttgcatttgagaaggatgagaagagccagcgattagggaattttttttttacccgttttcttcctttttctttttttcttctttttctttttttctttcttttttcgtgtgtgttttttttaatttgcctaccaccctgtctgtcccctcacttcgccctccccatttgaaataaaagccccagtctcaacttccatcacctcggcgctcccggagccactaccggctgatggaggagaaggggacccgggggctggcaggggccaccggcgagggaccgcatcctgcgtctcccccgtgatcccggccccgaccgcggagttctgcaacacctggaggatctggaccgggtgctgggggtgggggcggggacagaggaaggaaaggcaccccgagccttaaaaagaaaaaaaaaaagtagcggggggaggaatgggtttcttcttgacagctgacggagccttgaaattttcctccactacctccgcccccgcccccgcccccgccccccgcactccatttaacgtgagattatgaaattgcagaggcggtggagggaaggagacaggatataaccggagtttggaggggagaggggaaggtggctggccgggtggctgaaatcaaaaattcaattgcgcactgggttgtgatgagaaatctaatcagatctttggcgaaggggccggccggaaggatggagagtgggggggaagttgctccccaaattcttcgaaggggaggctggggagaggaattgaccatgtaaaaggagacttttttttttggtggtggtggctgttgggtgccttgcaaaaatgaaggatgcaggacgcagctttctcctggaaccgaacgcaatggataaactgattgtgcaagagagaaggaagaacgaagctttttcttgtgagccctggatcttaacacaaatgtgtatatgtgcacacagggagcattcaagaatgaaataaaccagagttagacccgcgggggttggtgtgttctgacataaataaataatcttaaagcagctgttcccctccccccccccaaaaaaaaggatgattggaaatgaagaaccgaggattcacaaagaaaaaagtatgttcatttttctctataaaggagaaagtgagccaaggagatatttttggaatgaaaagtttggggcttttttagtaaagtaaagaactggtgtggtggtgttttcttttctttttgaatttcccacaagaggagaggaaattaataatacatctgcaaagaaatttcagagaagaaaagttgaccgcggcagattgaggcattgattgggggagagaaaccagcagagcacagttggatttgtgcctatgttgactaaaattgacggataattgcagttggatttttcttcatcaacctccttttttttaaatttttattccttttggtatcaagatcatgcgtttctcttgttcttaaccacctgatttccatctggatgttgctgtgatcagtctgaaatacaactgtttgaattccagaaggaccaacaccagataaattatgaatgttgaacaagatgaccttacatccacagcagataatgataggtcctaggtttaacagggccctatttgaccccctgcttgtggtgctgctggctcttcaacttcttgtggtggctggtctggtgcgggctcagacctgcccttctgtgtgctcctgcagcaaccagttcagcaaggtgatttgtgttcggaaaaacctgcgtgaggttccggatggcatctccaccaacacacggctgctgaacctccatgagaaccaaatccagatcatcaaagtgaacagcttcaagcacttgagacacttggaaatcctacagttgagtaggaaccatatcagaaccattgaaattggggctttcaatggtctggcgaacctcaacactctggaactctttgacaatcgtcttactaccatcccgaatggagcttttgtatacttgtctaaactgaaggagctctggttgcgaaacaaccccattgaaagcatcccttcttatgcttttaacagaattccttctttgcgccgactagacttaggggaattgaaaagactttcatacatctcagaaggtgcctttgaaggtctgtccaacttgaggtatttgaaccttgccatgtgcaaccttcgggaaatccctaacctcacaccgctcataaaactagatgagctggatctttctgggaatcatttatctgccatcaggcctggctctttccagggtttgatgcaccttcaaaaactgtggatgatacagtcccagattcaagtgattgaacggaatgcctttgacaaccttcagtcactagtggagatcaacctggcacacaataatctaacattactgcctcatgacctcttcactcccttgcatcatctagagcggatacatttacatcacaacccttggaactgtaactgtgacatactgtggctcagctggtggataaaagacatggccccctcgaacacagcttgttgtgcccggtgtaacactcctcccaatctaaaggggaggtacattggagagctcgaccagaattacttcacatgctatgctccggtgattgtggagccccctgcagacctcaatgtcactgaaggcatggcagctgagctgaaatgtcgggcctccacatccctgacatctgtatcttggattactccaaatggaacagtcatgacacatggggcgtacaaagtgcggatagctgtgctcagtgatggtacgttaaatttcacaaatgtaactgtgcaagatacaggcatgtacacatgtatggtgagtaattccgttgggaatactactgcttcagccaccctgaatgttactgcagcaaccactactcctttctcttacttttcaaccgtcacagtagagactatggaaccgtctcaggatgaggcacggaccacagataacaatgtgggtcccactccagtggtcgactgggagaccaccaatgtgaccacctctctcacaccacagagcacaaggtcgacagagaaaaccttcaccatcccagtgactgatataaacagtgggatcccaggaattgatgaggtcatgaagactaccaaaatcatcattgggtgttttgtggccatcacactcatggctgcagtgatgctggtcattttctacaagatgaggaagcagcaccatcggcaaaaccatcacgccccaacaaggactgttgaaattattaatgtggatgatgagattacgggagacacacccatggaaagccacctgcccatgcctgctatcgagcatgagcacctaaatcactataactcatacaaatctcccttcaaccacacaacaacagttaacacaataaattcaatacacagttcagtgcatgaaccgttattgatccgaatgaactctaaagacaatgtacaagagactcaaatctaaaacatttacagagttacaaaaaacaaacaatcaaaaaaaaagacagtttattaaaaatgacacaaatgactgggctaaatctactgtttcaaaaaagtgtctttacaaaaaaacaaaaaagaaaagaaatttatttattaaaaattctattgtgatctaaagcagacaaaattatg

SEQ ID NO: 17533 - DNA, 769 bp, Homo sapiens
agcgggtcaccacctcccgcaagtgccagagccgagcggactgcgcggaggctgcggagccggcggccgcgggagctgaccctgcggggtcccggggggggagggggagccgcgaagcccccactgaggccgccgctgccgggcctcccctcccccccgggcgggcgccatgcgggggagcccgggcgacgcggagcggcggcagcgctggggtcgcctgttcgaggagctggacagtaacaaggatggccgcgtggacgtgcacgagttgcgccaggggctggccaggctgggcgggggcaacccagaccccggcgcccaacagggtatctcctctgagggtgatgctgacccagatggcgggctcgacctggaggaattttcccgctatctgcaggagcgggaacagcgtctgctgctcatgtttcacagtcttgaccggaaccaggatggtcacattgatgtctctgagatccaacagagtttccgagctctgggcatttccatctcgctggagcaggctgagaaaattttgcacagcatggaccgagacggcacaatgaccattgactggcaagaatggcgcgaccacttcctgttgcattcgctggaaaatgtggaggacgtgctgtatttctggaagcattccacggtgaggtgggggtggctttccccagctgaaggctgtgccctcttccccaggggggccttgctccgatctccccagggcttggatgggctggaccaggactttccagaaggagaaggc

SEQ ID NO: 17534 - DNA, 3233 bp, Homo sapiens
agcgggtcaccacctcccgcaagtgccagagccgagcggactgcgcggaggctgcggagccggcggccgcgggagctgaccctgcggggtcccggggggggagggggagccgcgaagcccccactgaggccgccgctgccgggcctcccctcccccccgggcgggcgccatgcgggggagcccgggcgacgcggagcggcggcagcgctggggtcgcctgttcgaggagctggacagtaacaaggatggccgcgtggacgtgcacgagttgcgccaggggctggccaggctgggcgggggcaacccagaccccggcgcccaacagggtatctcctctgagggtgatgctgacccagatggcgggctcgacctggaggaattttcccgctatctgcaggagcgggaacagcgtctgctgctcatgtttcacagtcttgaccggaaccaggatggtcacattgatgtctctgagatccaacagagtttccgagctctgggcatttccatctcgctggagcaggctgagaaaattttgcacagcatggaccgagacggcacaatgaccattgactggcaagaatggcgcgaccacttcctgttgcattcgctggaaaatgtggaggacgtgctgtatttctggaagcattccacggtcctggacattggcgagtgcctgacagtgccggacgagttctcaaagcaagagaagctgacgggcatgtggtggaaacagctggtggccggcgcagtggcaggtgccgtgtcacggacaggcacggcccctctggaccgcctcaaggtcttcatgcaggtccatgcctcaaagaccaaccggctgaacatccttggggggcttcgaagcatggtccttgagggaggcatccgctccctgtggcgcggcaatggtattaatgtactcaagattgcccccgagtcagctatcaagttcatggcctatgaacagatcaagagggccatcctggggcagcaggagacactgcatgtgcaggagcgcttcgtggctggctccctggctggtgccacagcccaaaccatcatttaccctatggaggtgctgaagacgcggctgaccttgcgccggacgggccagtataaggggctgctggactgcgccaggcgtatcctggagagggaggggccccgtgccttctaccgcggctacctccccaacgtgctgggcatcatcccctatgcgggcatcgacctggccgtctacgagactctgaagaactggtggcttcagcagtacagccacgactcggcagacccaggcatcctcgtgctcctggcctgcggtaccatatccagcacctgcggccagatagccagttacccgctggccctggtccggacccgcatgcaggcacaagcctccatcgagggtggcccccagctgtccatgctgggtctgctacgtcacatcctgtcccaggagggcatgcggggcctctaccgggggatcgcccccaacttcatgaaggttattccagctgtgagcatctcctatgtggtctacgagaacatgaagcaggccttgggggtcacgtccaggtgagggacccggagcccgtccccccaatccctcaccccccacacctcagccactggagactgatgatccaaccacaggatccctactctttggccacgagatcccagtacccagatcctggatcctagactcctatgccccaaccattgggtcatgggatcccagcatccagatcctggatcctagactcctatgccccaaccactgggtcatgcgatccccacccttcagccactagatcccagatccccctgtaaccataactgtggatcccttacttcagcaactcaagtctgctaccctaaccacaagattcaagattatccacaccccagcccttaatccccatcccccaaatcactggatcctgcagccccacatcctaaggtggatcccacgcttccctgtgccccctactggatcctggacctctacgtcttaaccactggatcccacacaaatcagtgaatggatcccaacaccccaaccacaggagcacggattccctgtacctcaacacccagaccctgcctccctcaggcaccagatccagtgtcctagtgaaacgctggatcctagatccccaaccccagatccccatgcctcgagccctggatctccaagctcagctgctggattctggatgtcaacaaacctcaccactggatcctgacaaccacaatgcctggatcctggggcccccatcactggatcccagatcccctcactccacccactggattcctgcattggtttttggttttttgtttttttttaacctcgacactgggtctcagatccttctgctgactgccagatccctgcatttcaagcactacgccttccacccccgggtcccaaatgttcaggccccaagtctagatcctggcagcccagtcacagagtatcccacacacactggtgcccagagccggcttctcatgacatgaaattgcatggtcgagggagtctgtggggaaggaagcccaggtcctggctgcaacctgcacggatgctggattccccctcaccccacctctgcatggccaccccctcccagccctgtggggaaactgttccctggaaccactccactccctgcatccccacacttcacagcatcttccatccccctcccaccttctaggcgaatagtccccagagctgtgttcctccaaggggtccgaggaatcactcactcctggaggctggcaaggagacagtctgaggccagggacacatgaagggatgtccccaccccagcactatcagggcctccccaggcttccagagttgaaagccaggagaaaatcggcaaagaccacccttccctaaacccaagcacccaatgatgcaaaaaacaaaaacaaaaaaaaaccaccaaatccccaaattcattccagatctatttttctaccagagagaggagcaaagtcctcctcccctgcgcccttacattctgcacttcatagttggattctgagcttaggatcatctggagaccccatggagggacttggaaaggggaactgggatttggggaggggctggaggacttccgcacgcttccacctccttcgacctccactgcgccccacctccctgcctgtgtgtgttatttcaaaggaaaagaacaaaaggaataaattttctaagctct

SEQ ID NO: 17535 - DNA, 3438 bp, Homo sapiens
agcgggtcaccacctcccgcaagtgccagagccgagcggactgcgcggaggctgcggagccggcggccgcgggagctgaccctgcggggtcccggggggggagggggagccgcgaagcccccactgaggccgccgctgccgggcctcccctcccccccgggcgggcgccatgcgggggagcccgggcgacgcggagcggcggcagcgctggggtcgcctgttcgaggagctggacagtaacaaggatggccgcgtggacgtgcacgagttgcgccaggggctggccaggctgggcgggggcaacccagaccccggcgcccaacagggtatctcctctgagggtgatgctgacccagatggcgggctcgacctggaggaattttcccgctatctgcaggagcgggaacagcgtctgctgctcatgtttcacagtcttgaccggaaccaggatggtcacattgatgtctctgagatccaacagagtttccgagctctgggcatttccatctcgctggagcaggctgagaaaattttgcacagcatggaccgagacggcacaatgaccattgactggcaagaatggcgcgaccacttcctgttgcattcgctggaaaatgtggaggacgtgctgtatttctggaagcattccacggtcctggacattggcgagtgcctgacagtgccggacgagttctcaaagcaagagaagctgacgggcatgtggtggaaacagctggtggccggcgcagtggcaggtgccgtgtcacggacaggcacggcccctctggaccgcctcaaggtcttcatgcaggtccatgcctcaaagaccaaccggctgaacatccttggggggcttcgaagcatggtccttgagggaggcatccgctccctgtggcgcggcaatggtattaatgtactcaagattgcccccgagtcagctatcaagttcatggcctatgaacagatcaagagggccatcctggggcagcaggagacactgcatgtgcaggagcgcttcgtggctggctccctggctggtgccacagcccaaaccatcatttaccctatggaggtgctgaagacgcggctgaccttgcgccggacgggccagtataaggggctgctggactgcgccaggcgtatcctggagagggaggggccccgtgccttctaccgcggctacctccccaacgtgctgggcatcatcccctatgcgggcatcgacctggccgtctacgagactctgaagaactggtggcttcagcagtacagccacgactcggcagacccaggcatcctcgtgctcctggcctgcggtaccatatccagcacctgcggccagatagccagttacccgctggccctggtccggacccgcatgcaggcacaagcctccatcgagggtggcccccagctgtccatgctgggtctgctacgtcacatcctgtcccaggagggcatgcggggcctctaccgggggatcgcccccaacttcatgaaggttattccagctgtgagcatctcctatgtggtctacgagaacatgaagcaggccttgggggtcacgtccaggtgagggacccggagcccgtccccccaatccctcaccccccacacctcagccactggagactgatgatccaaccacaggatccctactctttggccacgagatcccagtacccagatcctggatcctagactcctatgccccaaccattgggtcatgggatcccagcatccagatcctggatcctagactcctatgccccaaccactgggtcatgcgatccccacccttcagccactagatcccagatccccctgtaaccataactgtggatcccttacttcagcaactcaagtctgctaccctaaccacaagattcaagattatccacaccccagcccttaatccccatcccccaaatcactggatcctgcagccccacatcctaaggtggatcccacgcttccctgtgccccctactggatcctggacctctacgtcttaaccactggatcccacacaaatcagtgaatggatcccaacaccccaaccacaggagcacggattccctgtacctcaacacccagaccctgcctccctcaggcaccagatccagtgtcctagtgaaacgctggatcctagatccccaaccccagatccccatgcctcgagccctggatctccaagctcagctgctggattctggatgtcaacaaacctcaccactggatcctgacaaccacaatgcctggatcctggggcccccatcactggatcccagatcccctcactccacccactggattcctgcattggtttttggttttttgtttttttttaacctcgacactgggtctcagatccttctgctgactgccagatccctgcatttcaagcactacgccttccacccccaggcactggatcccagattcccaagccttcacccaccagattctggctcctaaaacaagtgcgggggccccagtggcacagcaagtggatcctggcaactgcagctgctggattccagattctgggtccccaatccctctgcccagtccctcaatgttgaaacctcatctcttgaaggcagatcctgatattccaaggcactgaatcccaagccctgaatccccggtttctgatctgaatcttccaggcgccgggtcccaaatgttcaggccccaagtctagatcctggcagcccagtcacagagtatcccacacacactggtgcccagagccggcttctcatgacatgaaattgcatggtcgagggagtctgtggggaaggaagcccaggtcctggctgcaacctgcacggatgctggattccccctcaccccacctctgcatggccaccccctcccagccctgtggggaaactgttccctggaaccactccactccctgcatccccacacttcacagcatttcctccaaggggtccgaggaatcactcactcctggaggctggcaaggagacagtctgaggccagggacacatgaagggatgtccccaccccagcactatcagggcctccccaggcttccagagttgaaagccaggagaaaatcggcaaagaccacccttccctaaacccaagcacccaatgatgcaaaaaacaaaaacaaaaaaaaaccaccaaatccccaaattcattccagatctatttttctaccagagagaggagcaaagtcctcctcccctgcgcccttacattctgcacttcatagttggattctgagcttaggatcatctggagaccccatggagggacttggaaaggggaactgggatttggggaggggctggaggacttccgcacgcttccacctccttcgacctccactgcgccccacctccctgcctgtgtgtgttatttcaaaggaaaagaacaaaaggaataaattttctaagctct

SEQ ID NO: 17536 - DNA, 3616 bp, Homo sapiens
agcgggtcaccacctcccgcaagtgccagagccgagcggactgcgcggaggctgcggagccggcggccgcgggagctgaccctgcggggtcccggggggggagggggagccgcgaagcccccactgaggccgccgctgccgggcctcccctcccccccgggcgggcgccatgcgggggagcccgggcgacgcggagcggcggcagcgctggggtcgcctgttcgaggagctggacagtaacaaggatggccgcgtggacgtgcacgagttgcgccaggggctggccaggctgggcgggggcaacccagaccccggcgcccaacagggtatctcctctgagggtgatgctgacccagatggcgggctcgacctggaggaattttcccgctatctgcaggagcgggaacagcgtctgctgctcatgtttcacagtcttgaccggaaccaggatggtcacattgatgtctctgagatccaacagagtttccgagctctgggcatttccatctcgctggagcaggctgagaaaattttgcacagcatggaccgagacggcacaatgaccattgactggcaagaatggcgcgaccacttcctgttgcattcgctggaaaatgtggaggacgtgctgtatttctggaagcattccacggtcctggacattggcgagtgcctgacagtgccggacgagttctcaaagcaagagaagctgacgggcatgtggtggaaacagctggtggccggcgcagtggcaggtgccgtgtcacggacaggcacggcccctctggaccgcctcaaggtcttcatgcaggtccatgcctcaaagaccaaccggctgaacatccttggggggcttcgaagcatggtccttgagggaggcatccgctccctgtggcgcggcaatggtattaatgtactcaagattgcccccgagtcagctatcaagttcatggcctatgaacagatcaagagggccatcctggggcagcaggagacactgcatgtgcaggagcgcttcgtggctggctccctggctggtgccacagcccaaaccatcatttaccctatggaggtgctgaagacgcggctgaccttgcgccggacgggccagtataaggggctgctggactgcgccaggcgtatcctggagagggaggggccccgtgccttctaccgcggctacctccccaacgtgctgggcatcatcccctatgcgggcatcgacctggccgtctacgagactctgaagaactggtggcttcagcagtacagccacgactcggcagacccaggcatcctcgtgctcctggcctgcggtaccatatccagcacctgcggccagatagccagttacccgctggccctggtccggacccgcatgcaggcacaagcctccatcgagggtggcccccagctgtccatgctgggtctgctacgtcacatcctgtcccaggagggcatgcggggcctctaccgggggatcgcccccaacttcatgaaggttattccagctgtgagcatctcctatgtggtctacgagaacatgaagcaggccttgggggtcacgtccaggtgagggacccggagcccgtccccccaatccctcaccccccacacctcagccactggagactgatgatccaaccacaggatccctactctttggccacgagatcccagtacccagatcctggatcctagactcctatgccccaaccattgggtcatgggatcccagcatccagatcctggatcctagactcctatgccccaaccactgggtcatgcgatccccacccttcagccactagatcccagatccccctgtaaccataactgtggatcccttacttcagcaactcaagtctgctaccctaaccacaagattcaagattatccacaccccagcccttaatccccatcccccaaatcactggatcctgcagccccacatcctaaggtggatcccacgcttccctgtgccccctactggatcctggacctctacgtcttaaccactggatcccacacaaatcagtgaatggatcccaacaccccaaccacaggagcacggattccctgtacctcaacacccagaccctgcctccctcaggcaccagatccagtgtcctagtgaaacgctggatcctagatccccaaccccagatccccatgcctcgagccctggatctccaagctcagctgctggattctggatgtcaacaaacctcaccactggatcctgacaaccacaatgcctggatcctggggcccccatcactggatcccagatcccctcactccacccactggattcctgcattggtttttggttttttgtttttttttaacctcgacactgggtctcagatccttctgctgactgccagatccctgcatttcaagcactacgccttccacccccaggcactggatcccagattcccaagccttcacccaccagattctggctcctaaaacaagtgcgggggccccagtggcacagcaagtggatcctggcaactgcagctgctggattccagattctgggtccccaatccctctgcccagtccctcaatgttgaaacctcatctcttgaaggcagatcctgatattccaaggcactgaatcccaagccctgaatccccggtttctgatctgaatcttccaggcgccgggtcccaaatgttcaggccccaagtctagatcctggcagcccagtcacagagtatcccacacacactggtgcccagagccggcttctcatgacatgaaattgcatggtcgagggagtctgtggggaaggaagcccaggtcctggctgcaacctgcacggatgctggattccccctcaccccacctctgcatggccaccccctcccagccctgtggggaaactgttccctggaaccactccactccctgcatccccacacttcacagcatcttccatccccctcccaccttctaggcgaatagtccccagagctgtgttcctccaaggggtccgaggaatcactcactcctggaggctggcaaggagacagtctgaggccagggacacatgaagggatgtccccaccccagcactatcagggcctccccaggcttccagagtgagtgattcctccaaggggtccgaggaatcactcactcctggaggctggcaaggagacagtctgaggccagggacacatgaagggatgtccccaccccagcactatcagggcctccccaggcttccagagttgaaagccaggagaaaatcggcaaagaccacccttccctaaacccaagcacccaatgatgcaaaaaacaaaaacaaaaaaaaaccaccaaatccccaaattcattccagatctatttttctaccagagagaggagcaaagtcctcctcccctgcgcccttacattctgcacttcatagttggattctgagcttaggatcatctggagaccccatggagggacttggaaaggggaactgggatttggggaggggctggaggacttccgcacgcttccacctccttcgacctccactgcgccccacctccctgcctgtgtgtgttatttcaaaggaaaagaacaaaaggaataaattttctaagctct

SEQ ID NO: 17537 - DNA, 2145 bp, Homo sapiens
agcgggtcaccacctcccgcaagtgccagagccgagcggactgcgcggaggctgcggagccggcggccgcgggagctgaccctgcggggtcccggggggggagggggagccgcgaagcccccactgaggccgccgctgccgggcctcccctcccccccgggcgggcgccatgcgggggagcccgggcgacgcggagcggcggcagcgctggggtcgcctgttcgaggagctggacagtaacaaggatggccgcgtggacgtgcacgagttgcgccaggggctggccaggctgggcgggggcaacccagaccccggcgcccaacagggtatctcctctgagggtgatgctgacccagatggcgggctcgacctggaggaattttcccgctatctgcaggagcgggaacagcgtctgctgctcatgtttcacagtcttgaccggaaccaggatggtcacattgatgtctctgagatccaacagagtttccgagctctgggcatttccatctcgctggagcaggctgagaaaattttgcacagcatggaccgagacggcacaatgaccattgactggcaagaatggcgcgaccacttcctgttgcattcgctggaaaatgtggaggacgtgctgtatttctggaagcattccacggtcctggacattggcgagtgcctgacagtgccggacgagttctcaaagcaagagaagctgacgggcatgtggtggaaacagctggtggccggcgcagtggcaggtgccgtgtcacggacaggcacggcccctctggaccgcctcaaggtcttcatgcaggtccatgcctcaaagaccaaccggctgaacatccttggggggcttcgaagcatggtccttgagggaggcatccgctccctgtggcgcggcaatggtattaatgtactcaagattgcccccgagtcagctatcaagttcatggcctatgaacagatcaagagggccatcctggggcagcaggagacactgcatgtgcaggagcgcttcgtggctggctccctggctggtgccacagcccaaaccatcatttaccctatggaggtgctgaagacgcggctgaccttgcgccggacgggccagtataaggggctgctggactgcgccaggcgtatcctggagagggaggggccccgtgccttctaccgcggctacctccccaacgtgctgggcatcatcccctatgcgggcatcgacctggccgtctacgagactctgaagaactggtggcttcagcagtacagccacgactcggcagacccaggcatcctcgtgctcctggcctgcggtaccatatccagcacctgcggccagatagccagttacccgctggccctggtccggacccgcatgcaggcacaagcctccatcgagggtggcccccagctgtccatgctgggtctgctacgtcacatcctgtcccaggagggcatgcggggcctctaccgggggatcgcccccaacttcatgaaggttattccagctgtgagcatctcctatgtggtctacgagaacatgaagcaggccttgggggtcacgtccaggctggagtacagtggctcgatttcagatcactgcaacctctgccttccaggttcaagcgattctcctgcctcagcctccagagtagctggtattacaggatttcatcatgttgcccaggctcatctcgaactcgtggggtcaaggaattcgccagccttcagcctcccaacgtgctgggattacagccggtggtcatgccatgagcagccttatggagaggaccatgtggtaaggaactcagccaatagccatgtaactgagcttggaagaggatcttgctgtcctggccaacatctcactgcaattctatcagttgaattccctggatagtccaagctttgtggatccctccaccagaacaactggatcccagtacctgaatcctgaatcttagactcttatacttcaaacactgatcacgggaacagccggctcagcagctcctgagttcctaatgctcagaacatggatgagatgataaatgtttgttgtgttaagctgccaacctttggcgggggggtaattcgtcacatggcaacagctggctaatacatatatacctacatgtaaat

SEQ ID NO: 17538 - DNA, 1934 bp, Homo sapiens
agcgggtcaccacctcccgcaagtgccagagccgagcggactgcgcggaggctgcggagccggcggccgcgggagctgaccctgcggggtcccggggggggagggggagccgcgaagcccccactgaggccgccgctgccgggcctcccctcccccccgggcgggcgccatgcgggggagcccgggcgacgcggagcggcggcagcgctggggtcgcctgttcgaggagctggacagtaacaaggatggccgcgtggacgtgcacgagttgcgccaggggctggccaggctgggcgggggcaacccagaccccggcgcccaacagggtatctcctctgagggtgatgctgacccagatggcgggctcgacctggaggaattttcccgctatctgcaggagcgggaacagcgtctgctgctcatgtttcacagtcttgaccggaaccaggatggtcacattgatgtctctgagatccaacagagtttccgagctctgggcatttccatctcgctggagcaggctgagaaaattttgcacagcatggaccgagacggcacaatgaccattgactggcaagaatggcgcgaccacttcctgttgcattcgctggaaaatgtggaggacgtgctgtatttctggaagcattccacggtcctggacattggcgagtgcctgacagtgccggacgagttctcaaagcaagagaagctgacgggcatgtggtggaaacagctggtggccggcgcagtggcaggtgccgtgtcacggacaggcacggcccctctggaccgcctcaaggtcttcatgcaggtccatgcctcaaagaccaaccggctgaacatccttggggggcttcgaagcatggtccttgagggaggcatccgctccctgtggcgcggcaatggtattaatgtactcaagattgcccccgagtcagctatcaagttcatggcctatgaacagatcaagagggccatcctggggcagcaggagacactgcatgtgcaggagcgcttcgtggctggctccctggctggtgccacagcccaaaccatcatttaccctatggaggtgctgaagacgcggctgaccttgcgccggacgggccagtataaggggctgctggactgcgccaggcgtatcctggagagggaggggccccgtgccttctaccgcggctacctccccaacgtgctgggcatcatcccctatgcgggcatcgacctggccgtctacgagactctgaagaactggtggcttcagcagtacagccacgactcggcagacccaggcatcctcgtgctcctggcctgcggtaccatatccagcacctgcggccagatagccagttacccgctggccctggtccggacccgcatgcaggcacaagcctccatcgagggtggcccccagctgtccatgctgggtctgctacgtcacatcctgtcccaggagggcatgcggggcctctaccgggggatcgcccccaacttcatgaaggttattccagctgtgagcatctcctatgtggtctacgagaacatgaagcaggccttgggggtcacgtccaggctggagtacagtggctcgatttcagatcactgcaacctctgccttccaggttcaagcgattctcctgcctcagcctccagagtagctggtattacaggatttcatcatgttgcccaggctcatctcgaactcgtggggtcaaggaattcgccagccttcagccagtagatcccagatcccccgtgtaaccataactgtgagcccgtacttcagcaactcaagtctgctaccctaaccacaagattcaagattatccacaccacagcccataatccccatctacccagatcactggattacacagacacacattactaagatgatacacagcttcctctgctcctactgatccagaccttaa

SEQ ID NO: 17539 - DNA, 1900 bp, Homo sapiens
agcgggtcaccacctcccgcaagtgccagagccgagcggactgcgcggaggctgcggagccggcggccgcgggagctgaccctgcggggtcccggggggggagggggagccgcgaagcccccactgaggccgccgctgccgggcctcccctcccccccgggcgggcgccatgcgggggagcccgggcgacgcggagcggcggcagcgctggggtcgcctgttcgaggagctggacagtaacaaggatggccgcgtggacgtgcacgagttgcgccaggggctggccaggctgggcgggggcaacccagaccccggcgcccaacagggtatctcctctgagggtgatgctgacccagatggcgggctcgacctggaggaattttcccgctatctgcaggagcgggaacagcgtctgctgctcatgtttcacagtcttgaccggaaccaggatggtcacattgatgtctctgagatccaacagagtttccgagctctgggcatttccatctcgctggagcaggctgagaaaattttgcacagcatggaccgagacggcacaatgaccattgactggcaagaatggcgcgaccacttcctgttgcattcgctggaaaatgtggaggacgtgctgtatttctggaagcattccacggtcctggacattggcgagtgcctgacagtgccggacgagttctcaaagcaagagaagctgacgggcatgtggtggaaacagctggtggccggcgcagtggcaggtgccgtgtcacggacaggcacggcccctctggaccgcctcaaggtcttcatgcaggtccatgcctcaaagaccaaccggctgaacatccttggggggcttcgaagcatggtccttgagggaggcatccgctccctgtggcgcggcaatggtattaatgtactcaagattgcccccgagtcagctatcaagttcatggcctatgaacagatcaagagggccatcctggggcagcaggagacactgcatgtgcaggagcgcttcgtggctggctccctggctggtgccacagcccaaaccatcatttaccctatggaggtgctgaagacgcggctgaccttgcgccggacgggccagtataaggggctgctggactgcgccaggcgtatcctggagagggaggggccccgtgccttctaccgcggctacctccccaacgtgctgggcatcatcccctatgcgggcatcgacctggccgtctacgagactctgaagaactggtggcttcagcagtacagccacgactcggcagacccaggcatcctcgtgctcctggcctgcggtaccatatccagcacctgcggccagatagccagttacccgctggccctggtccggacccgcatgcaggcacaagatgcagtttcgctctgtttcccaggctggagtgcaatgacgtgatctcagctcactgcaacctccgcttcccgggttcaagtgatcctcctgcctcagcctccagaatagctgggattacagccggtggtcatgccatgagcagccttatggagaggaccatgtggtaaggaactcagccaatagccatgtaactgagcttggaagaggatcttgctgtcctggccaacatctcactgcaattctatcagttgaattccctggatagtccaagctttgtggatccctccaccagaacaactggatcccagtacctgaatcctgaatcttagactcttatacttcaaacactgatcacgggaacagccggctcagcagctcctgagttcctaatgctcagaacatggatgagatgataaatgtttgttgtgttaagctgccaacctttggcgggggggtaattcgtcacatggcaacagctggctaatacatatatacctacatgtaaat

SEQ ID NO: 17540 - DNA, 1420 bp, Homo sapiens
agcgggtcaccacctcccgcaagtgccagagccgagcggactgcgcggaggctgcggagccggcggccgcgggagctgaccctgcggggtcccggggggggagggggagccgcgaagcccccactgaggccgccgctgccgggcctcccctcccccccgggcgggcgccatgcgggggagcccgggcgacgcggagcggcggcagcgctggggtcgcctgttcgaggagctggacagtaacaaggatggccgcgtggacgtgcacgagttgcgccaggggctggccaggctgggcgggggcaacccagaccccggcgcccaacagggtatctcctctgagggtgatgctgacccagatggcgggctcgacctggaggaattttcccgctatctgcaggagcgggaacagcgtctgctgctcatgtttcacagtcttgaccggaaccaggatggtcacattgatgtctctgagatccaacagagtttccgagctctgggcatttccatctcgctggagcaggctgagaaaattttgcacagcatggaccgagacggcacaatgaccattgactggcaagaatggcgcgaccacttcctgttgcattcgctggaaaatgtggaggacgtgctgtatttctggaagcattccacggtcctggacattggcgagtgcctgacagtgccggacgagttctcaaagcaagagaagctgacgggcatgtggtggaaacagctggtggccggcgcagtggcaggtgccgtgtcacggacaggcacggcccctctggaccgcctcaaggtcttcatgcaggtccatgcctcaaagaccaaccggctgaacatccttggggggcttcgaagcatggtccttgagggaggcatccgctccctgtggcgcggcaatggtattaatgtactcaagattgcccccgagtcagctatcaagttcatggcctatgaacagatcaagagggccatcctggggcagcaggagacactgcatgtgcaggagcgcttcgtggctggctccctggctggtgccacagcccaaaccatcatttaccctatggaggtgctgaagacgcggctgaccttgcgccggacgggccagtataaggggctgctggactgcgccaggcgtatcctggagagggaggggccccgtgccttctaccgcggctacctccccaacgtgctgggcatcatcccctatgcgggcatcgacctggccgtctacgagactctgaagaactggtggcttcagcagtacagccacgactcggcagacccaggcatcctcgtgctcctggcctgcggtaccatatccagcacctgcggccagatagccagttacccgctggtattgatacggaaatgcatgcatgcagggggtggcgagcgcgaacgcgtccgcatggac

SEQ ID NO: 17541 - DNA, 963 bp, Homo sapiens
agcgggtcaccacctcccgcaagtgccagagccgagcggactgcgcggaggctgcggagccggcggccgcgggagctgaccctgcggggtcccggggggggagggggagccgcgaagcccccactgaggccgccgctgccgggcctcccctcccccccgggcgggcgccatgcgggggagcccgggcgacgcggagcggcggcagcgctggggtcgcctgttcgaggagctggacagtaacaaggatggccgcgtggacgtgcacgagttgcgccaggggctggccaggctgggcgggggcaacccagaccccggcgcccaacagggtatctcctctgagggtgatgctgacccagatggcgggctcgacctggaggaattttcccgctatctgcaggagcgggaacagcgtctgctgctcatgtttcacagtcttgaccggaaccaggatggtcacattgatgtctctgagatccaacagagtttccgagctctgggcatttccatctcgctggagcaggctgagaaaattttgcacagcatggaccgagacggcacaatgaccattgactggcaagaatggcgcgaccacttcctgttgcattcgctggaaaatgtggtaaggaactcagccaatagccatgtaactgagcttggaagaggatcttgctgtcctggccaacatctcactgcaattctatcagttgaattccctggatagtccaagctttgtggatccctccaccagaacaactggatcccagtacctgaatcctgaatcttagactcttatacttcaaacactgatcacgggaacagccggctcagcagctcctgagttcctaatgctcagaacatggatgagatgataaatgtttgttgtgttaagctgccaacctttggcgggggggtaattcgtcacatggcaacagctggctaatacatatatacctacatgtaaat

SEQ ID NO: 17542 - DNA, 221 bp, Homo sapiens
gtatttttcttttatgaattatttccccccgtcccctccaccactaccctcccattctccctgaatctgttttgagaattttcttgagaattttagtgtttgtgttttgtgatttttactggagatgtgtcagtgtacaagacggacacggtccccaccctcatagagctcacaggccggagaggaaggaagatgctaaataaatcattctggaattaaaa

SEQ ID NO: 17543 - DNA, 2105 bp, Homo sapiens
agcgggtcaccacctcccgcaagtgccagagccgagcggactgcgcggaggctgcggagccggcggccgcgggagctgaccctgcggggtcccggggggggagggggagccgcgaagcccccactgaggccgccgctgccgggcctcccctcccccccgggcgggcgccatgcgggggagcccgggcgacgcggagcggcggcagcgctggggtcgcctgttcgaggagctggacagtaacaaggatggccgcgtggacgtgcacgagttgcgccaggggctggccaggctgggcgggggcaacccagaccccggcgcccaacagggtatctcctctgagggtgatgctgacccagatggcgggctcgacctggaggaattttcccgctatctgcaggagcgggaacagcgtctgctgctcatgtttcacagtcttgaccggaaccaggatggtcacattgatgtctctgagatccaacagagtttccgagctctgggcatttccatctcgctggagcaggctgagaaaattttgcacagcatggaccgagacggcacaatgaccattgactggcaagaatggcgcgaccacttcctgttgcattcgctggaaaatgtggaggacgtgctgtatttctggaagcattccacgctctcttctgctgggttctctgcctggataaaagattctacggctgaacagaatcgttcaaaaaccacggtcttggccaggcgcagtggctcacacctgaaatcccagcactttgggaggccgaagtgggcggatcacgaggtcctggacattggcgagtgcctgacagtgccggacgagttctcaaagcaagagaagctgacgggcatgtggtggaaacagctggtggccggcgcagtggcaggtgccgtgtcacggacaggcacggcccctctggaccgcctcaaggtcttcatgcaggtccatgcctcaaagaccaaccggctgaacatccttggggggcttcgaagcatggtccttgagggaggcatccgctccctgtggcgcggcaatggtattaatgtactcaagattgcccccgagtcagctatcaagttcatggcctatgaacagatcaagagggccatcctggggcagcaggagacactgcatgtgcaggagcgcttcgtggctggctccctggctggtgccacagcccaaaccatcatttaccctatggaggtgctgaagacgcggctgaccttgcgccggacgggccagtataaggggctgctggactgcgccaggcgtatcctggagagggaggggccccgtgccttctaccgcggctacctccccaacgtgctgggcatcatcccctatgcgggcatcgacctggccgtctacgagactctgaagaactggtggcttcagcagtacagccacgactcggcagacccaggcatcctcgtgctcctggcctgcggtaccatatccagcacctgcggccagatagccagttacccgctggccctggtccggacccgcatgcaggcacaaggctggagtacagtggctcgatttcagatcactgcaacctctgccttccaggttcaagcgattctcctgcctcagcctccagagtagctggtattacaggatttcatcatgttgcccaggctcatctcgaactcgtggggtcaaggaattcgccagccttcagcctcccaacgtgctgggattacagccggtggtcatgccatgagcagccttatggagaggaccatgtggtaaggaactcagccaatagccatgtaactgagcttggaagaggatcttgctgtcctggccaacatctcactgcaattctatcagttgaattccctggatagtccaagctttgtggatccctccaccagaacaactggatcccagtacctgaatcctgaatcttagactcttatacttcaaacactgatcacgggaacagccggctcagcagctcctgagttcctaatgctcagaacatggatgagatgataaatgtttgttgtgttaagctgccaacctttggcgggggggtaattcgtcacatggcaacagctggctaatacatatatacctacatgtaaat

SEQ ID NO: 17544 - DNA, 3658 bp, Homo sapiens
  misc_feature (3551)..(3551): n is a, c, g, or t
  misc_feature (3566)..(3566): n is a, c, g, or t
  misc_feature (3568)..(3568): n is a, c, g, or t
agcgggtcaccacctcccgcaagtgccagagccgagcggactgcgcggaggctgcggagccggcggccgcgggagctgaccctgcggggtcccggggggggagggggagccgcgaagcccccactgaggccgccgctgccgggcctcccctcccccccgggcgggcgccatgcgggggagcccgggcgacgcggagcggcggcagcgctggggtcgcctgttcgaggagctggacagtaacaaggatggccgcgtggacgtgcacgagttgcgccaggggctggccaggctgggcgggggcaacccagaccccggcgcccaacagggtatctcctctgagggtgatgctgacccagatggcgggctcgacctggaggaattttcccgctatctgcaggagcgggaacagcgtctgctgctcatgtttcacagtcttgaccggaaccaggatggtcacattgatgtctctgagatccaacagagtttccgagctctgggcatttccatctcgctggagcaggctgagaaaattttgcacagcatggaccgagacggcacaatgaccattgactggcaagaatggcgcgaccacttcctgttgcattcgctggaaaatgtggaggacgtgctgtatttctggaagcattccacggtcctggacattggcgagtgcctgacagtgccggacgagttctcaaagcaagagaagctgacgggcatgtggtggaaacagctggtggccggcgcagtggcaggtgccgtgtcacggacaggcacggcccctctggaccgcctcaaggtcttcatgcaggtccatgcctcaaagaccaaccggctgaacatccttggggggcttcgaagcatggtccttgagggaggcatccgctccctgtggcgcggcaatggtattaatgtactcaagattgcccccgagtcagctatcaagttcatggcctatgaacagatcaagagggccatcctggggcagcaggagacactgcatgtgcaggagcgcttcgtggctggctccctggctggtgccacagcccaaaccatcatttaccctatggaggtgctgaagacgcggctgaccttgcgccggacgggccagtataaggggctgctggactgcgccaggcgtatcctggagagggaggggccccgtgccttctaccgcggctacctccccaacgtgctgggcatcatcccctatgcgggcatcgacctggccgtctacgagactctgaagaactggtggcttcagcagtacagccacgactcggcagacccaggcatcctcgtgctcctggcctgcggtaccatatccagcacctgcggccagatagccagttacccgctggccctggtccggacccgcatgcaggcacaagcctccatcgagggtggcccccagctgtccatgctgggtctgctacgtcacatcctgtcccaggagggcatgcggggcctctaccgggggatcgcccccaacttcatgaaggttattccagctgtgagcatctcctatgtggtctacgagaacatgaagcaggccttgggggtcacgtccaggtgagggacccggagcccgtccccccaatccctcaccccccacacctcagccactggagactgatgatccaaccacaggatccctactctttggccacgagatcccagtacccagatcctggatcctagactcctatgccccaaccattgggtcatgggatcccagcatccagatcctggatcctagactcctatgccccaaccactgggtcatgcgatccccacccttcagccactagatcccagatccccctgtaaccataactgtggatcccttacttcagcaactcaagtctgctaccctaaccacaagattcaagattatccacaccccagcccttaatccccatcccccaaatcactggatcctgcagccccacatcctaaggtggatcccacgcttccctgtgccccctactggatcctggacctctacgtcttaaccactggatcccacacaaatcagtgaatggatcccaacaccccaaccacaggagcacggattccctgtacctcaacacccagaccctgcctccctcaggcaccagatccagtgtcctagtgaaacgctggatcctagatccccaaccccagatccccatgcctcgagccctggatctccaagctcagctgctggattctggatgtcaacaaacctcaccactggatcctgacaaccacaatgcctggatcctggggcccccatcactggatcccagatcccctcactccacccactggattcctgcattggtttttggttttttgtttttttttaacctcgacactgggtctcagatccttctgctgactgccagatccctgcatttcaagcactacgccttccacccccaggcactggatcccagattcccaagccttcacccaccagattctggctcctaaaacaagtgcgggggccccagtggcacagcaagtggatcctggcaactgcagctgctggattccagattctgggtccccaatccctctgcccagtccctcaatgttgaaacctcatctcttgaaggcagatcctgatattccaaggcactgaatcccaagccctgaatccccggtttctgatctgaatcttccaggcgccgggtcccaaatgttcaggccccaagtctagatcctggcagcccagtcacagagtatcccacacacactggtgcccagagccggcttctcatgacatgaaattgcatggtcgagggagtctgtggggaaggaagcccaggtcctggctgcaacctgcacggatgctggattccccctcaccccacctctgcatggccaccccctcccagccctgtggggaaactgttccctggaaccactccactccctgcatccccacacttcacagcatcttccatccccctcccaccttctaggcgaatagtccccagagctgtgttcctccaaggggtccgaggaatcactcactcctggaggctggcaaggagacagtctgaggccagggacacatgaagggatgtccccaccccagcactatcagggcctccccaggcttccagagttgaaagccaggagaaaatcggcaaagaccacccttccctaaacccaagcacccaatgatgcaaaaaacaaaaacaaaaaaaaaccaccaaatccccaaattcattccagatctatttttctaccagagagaggagcaaagtcctcctcccctgcgcccttacattctgcacttcatagttggattctgagcttaggatcatctggagaccccatggagggacttggaaaggggaactgggatttggggaggggctggaggacttccgcacgcttccacctccttcgacctccactgcgccccacctccctgcctgtgtgtgttatttcaaaggaaaagaacaaaaggaataaattttctaagctctaaaaaaaaagtccaagttcattcagcaaggcaatgctccatcttcagtggccttacaaatattatnataaccactctggtngnatatccttcattatgatattgatggaccaatgaactgcacttcagatatggagatcaaccctttgagaattaagatctcatctttgcaaa

SEQ ID NO: 17545 - DNA, 3485 bp, Homo sapiens
agcgggtcaccacctcccgcaagtgccagagccgagcggactgcgcggaggctgcggagccggcggccgcgggagctgaccctgcggggtcccggggggggagggggagccgcgaagcccccactgaggccgccgctgccgggcctcccctcccccccgggcgggcgccatgcgggggagcccgggcgacgcggagcggcggcagcgctggggtcgcctgttcgaggagctggacagtaacaaggatggccgcgtggacgtgcacgagttgcgccaggggctggccaggctgggcgggggcaacccagaccccggcgcccaacagggtatctcctctgagggtgatgctgacccagatggcgggctcgacctggaggaattttcccgctatctgcaggagcgggaacagcgtctgctgctcatgtttcacagtcttgaccggaaccaggatggtcacattgatgtctctgagatccaacagagtttccgagctctgggcatttccatctcgctggagcaggctgagaaaattttgcacagcatggaccgagacggcacaatgaccattgactggcaagaatggcgcgaccacttcctgttgcattcgctggaaaatgtggaggacgtgctgtatttctggaagcattccacggtcctggacattggcgagtgcctgacagtgccggacgagttctcaaagcaagagaagctgacgggcatgtggtggaaacagctggtggccggcgcagtggcaggtgccgtgtcacggacaggcacggcccctctggaccgcctcaaggtcttcatgcaggtccatgcctcaaagaccaaccggctgaacatccttggggggcttcgaagcatggtccttgagggaggcatccgctccctgtggcgcggcaatggtattaatgtactcaagattgcccccgagtcagctatcaagttcatggcctatgaacagatcaagagggccatcctggggcagcaggagacactgcatgtgcaggagcgcttcgtggctggctccctggctggtgccacagcccaaaccatcatttaccctatggaggtgctgaagacgcggctgaccttgcgccggacgggccagtataaggggctgctggactgcgccaggcgtatcctggagagggaggggccccgtgccttctaccgcggctacctccccaacgtgctgggcatcatcccctatgcgggcatcgacctggccgtctacgagactctgaagaactggtggcttcagcagtacagccacgactcggcagacccaggcatcctcgtgctcctggcctgcggtaccatatccagcacctgcggccagatagccagttacccgctggccctggtccggacccgcatgcaggcacaagcctccatcgagggtggcccccagctgtccatgctgggtctgctacgtcacatcctgtcccaggagggcatgcggggcctctaccgggggatcgcccccaacttcatgaaggttattccagctgtgagcatctcctatgtggtctacgagaacatgaagcaggccttgggggtcacgtccaggtgagggacccggagcccgtccccccaatccctcaccccccacacctcagccactggagactgatgatccaaccacaggatccctactctttggccacgagatcccagtacccagatcctggatcctagactcctatgccccaaccattgggtcatgggatcccagcatccagatcctggatcctagactcctatgccccaaccactgggtcatgcgatccccacccttcagccactagatcccagatccccctgtaaccataactgtggatcccttacttcagcaactcaagtctgctaccctaaccacaagattcaagattatccacaccccagcccttaatccccatcccccaaatcactggatcctgcagccccacatcctaaggtggatcccacgcttccctgtgccccctactggatcctggacctctacgtcttaaccactggatcccacacaaatcagtgaatggatcccaacaccccaaccacaggagcacggattccctgtacctcaacacccagaccctgcctccctcaggcaccagatccagtgtcctagtgaaacgctggatcctagatccccaaccccagatccccatgcctcgagccctggatctccaagctcagctgctggattctggatgtcaacaaacctcaccactggatcctgacaaccacaatgcctggatcctggggcccccatcactggatcccagatcccctcactccacccactggattcctgcattggtttttggttttttgtttttttttaacctcgacactgggtctcagatccttctgctgactgccagatccctgcatttcaagcactacgccttccacccccaggcactggatcccagattcccaagccttcacccaccagattctggctcctaaaacaagtgcgggggccccagtggcacagcaagtggatcctggcaactgcagctgctggattccagattctgggtccccaatccctctgcccagtccctcaatgttgaaacctcatctcttgaaggcagatcctgatattccaaggcactgaatcccaagccctgaatccccggtttctgatctgaatcttccaggcgccgggtcccaaatgttcaggccccaagtctagatcctggcagcccagtcacagagtatcccacacacactggtgcccagagccggcttctcatgacatgaaattgcatggtcgagggagtctgtggggaaggaagcccaggtcctggctgcaacctgcacggatgctggattccccctcaccccacctctgcatggccaccccctcccagccctgtggggaaactgttccctggaaccactccactccctgcatccccacacttcacagcatcttccatccccctcccaccttctaggcgaatagtccccagagctgtgttcctccaaggggtccgaggaatcactcactcctggaggctggcaaggagacagtctgaggccagggacacatgaagggatgtccccaccccagcactatcagggcctccccaggcttccagagttgaaagccaggagaaaatcggcaaagaccacccttccctaaacccaagcacccaatgatgcaaaaaacaaaaacaaaaaaaaaccaccaaatccccaaattcattccagatctatttttctaccagagagaggagcaaagtcctcctcccctgcgcccttacattctgcacttcatagttggattctgagcttaggatcatctggagaccccatggagggacttggaaaggggaactgggatttggggaggggctggaggacttccgcacgcttccacctccttcgacctccactgcgccccacctccctgcctgtgtgtgttatttcaaaggaaaagaacaaaaggaataaattttctaagctct

SEQ ID NO: 17546 - DNA, 3427 bp, Homo sapiens
agcgggtcaccacctcccgcaagtgccagagccgagcggactgcgcggaggctgcggagccggcggccgcgggagctgaccctgcggggtcccggggggggagggggagccgcgaagcccccactgaggccgccgctgccgggcctcccctcccccccgggcgggcgccatgcgggggagcccgggcgacgcggagcggcggcagcgctggggtcgcctgttcgaggagctggacagtaacaaggatggccgcgtggacgtgcacgagttgcgccaggggctggccaggctgggcgggggcaacccagaccccggcgcccaacagggtatctcctctgagggtgatgctgacccagatggcgggctcgacctggaggaattttcccgctatctgcaggagcgggaacagcgtctgctgctcatgtttcacagtcttgaccggaaccaggatggtcacattgatgtctctgagatccaacagagtttccgagctctgggcatttccatctcgctggagcaggctgagaaaattttgcacagcatggaccgagacggcacaatgaccattgactggcaagaatggcgcgaccacttcctgttgcattcgctggaaaatgtggaggacgtgctgtatttctggaagcattccacggtcctggacattggcgagtgcctgacagtgccggacgagttctcaaagcaagagaagctgacgggcatgtggtggaaacagctggtggccggcgcagtggcaggtgccgtgtcacggacaggcacggcccctctggaccgcctcaaggtcttcatgcaggtccatgcctcaaagaccaaccggctgaacatccttggggggcttcgaagcatggtccttgagggaggcatccgctccctgtggcgcggcaatggtattaatgtactcaagattgcccccgagtcagctatcaagttcatggcctatgaacagatcaagagggccatcctggggcagcaggagacactgcatgtgcaggagcgcttcgtggctggctccctggctggtgccacagcccaaaccatcatttaccctatggaggtgctgaagacgcggctgaccttgcgccggacgggccagtataaggggctgctggactgcgccaggcgtatcctggagagggaggggccccgtgccttctaccgcggctacctccccaacgtgctgggcatcatcccctatgcgggcatcgacctggccgtctacgagactctgaagaactggtggcttcagcagtacagccacgactcggcagacccaggcatcctcgtgctcctggcctgcggtaccatatccagcacctgcggccagatagccagttacccgctggccctggtccggacccgcatgcaggcacaagcctccatcgagggtggcccccagctgtccatgctgggtctgctacgtcacatcctgtcccaggagggcatgcggggcctctaccgggggatcgcccccaacttcatgaaggttattccagctgtgagcatctcctatgtggtctacgagaacatgaagcaggccttgggggtcacgtccaggtgagggacccggagcccgtccccccaatccctcaccccccacacctcagccactggagactgatgatccaaccacaggatccctactctttggccacgagatcccagtacccagatcctggatcctagactcctatgccccaaccactgggtcatgcgatccccacccttcagccactagatcccagatccccctgtaaccataactgtggatcccttacttcagcaactcaagtctgctaccctaaccacaagattcaagattatccacaccccagcccttaatccccatcccccaaatcactggatcctgcagccccacatcctaaggtggatcccacgcttccctgtgccccctactggatcctggacctctacgtcttaaccactggatcccacacaaatcagtgaatggatcccaacaccccaaccacaggagcacggattccctgtacctcaacacccagaccctgcctccctcaggcaccagatccagtgtcctagtgaaacgctggatcctagatccccaaccccagatccccatgcctcgagccctggatctccaagctcagctgctggattctggatgtcaacaaacctcaccactggatcctgacaaccacaatgcctggatcctggggcccccatcactggatcccagatcccctcactccacccactggattcctgcattggtttttggttttttgtttttttttaacctcgacactgggtctcagatccttctgctgactgccagatccctgcatttcaagcactacgccttccacccccaggcactggatcccagattcccaagccttcacccaccagattctggctcctaaaacaagtgcgggggccccagtggcacagcaagtggatcctggcaactgcagctgctggattccagattctgggtccccaatccctctgcccagtccctcaatgttgaaacctcatctcttgaaggcagatcctgatattccaaggcactgaatcccaagccctgaatccccggtttctgatctgaatcttccaggcgccgggtcccaaatgttcaggccccaagtctagatcctggcagcccagtcacagagtatcccacacacactggtgcccagagccggcttctcatgacatgaaattgcatggtcgagggagtctgtggggaaggaagcccaggtcctggctgcaacctgcacggatgctggattccccctcaccccacctctgcatggccaccccctcccagccctgtggggaaactgttccctggaaccactccactccctgcatccccacacttcacagcatcttccatccccctcccaccttctaggcgaatagtccccagagctgtgttcctccaaggggtccgaggaatcactcactcctggaggctggcaaggagacagtctgaggccagggacacatgaagggatgtccccaccccagcactatcagggcctccccaggcttccagagttgaaagccaggagaaaatcggcaaagaccacccttccctaaacccaagcacccaatgatgcaaaaaacaaaaacaaaaaaaaaccaccaaatccccaaattcattccagatctatttttctaccagagagaggagcaaagtcctcctcccctgcgcccttacattctgcacttcatagttggattctgagcttaggatcatctggagaccccatggagggacttggaaaggggaactgggatttggggaggggctggaggacttccgcacgcttccacctccttcgacctccactgcgccccacctccctgcctgtgtgtgttatttcaaaggaaaagaacaaaaggaataaattttctaagctct

SEQ ID NO: 17547 - DNA, 3381 bp, Homo sapiens
  misc_feature (3274)..(3274): n is a, c, g, or t
  misc_feature (3289)..(3289): n is a, c, g, or t
  misc_feature (3291)..(3291): n is a, c, g, or t
ttcctctcctcccacctcgggggcaacccagaccccggcgcccaacagggtatctcctctgagggtgatgctgacccagatggcgggctcgacctggaggaattttcccgctatctgcaggagcgggaacagcgtctgctgctcatgtttcacagtcttgaccggaaccaggatggtcacattgatgtctctgagatccaacagagtttccgagctctgggcatttccatctcgctggagcaggctgagaaaattttgcacagcatggaccgagacggcacaatgaccattgactggcaagaatggcgcgaccacttcctgttgcattcgctggaaaatgtggaggacgtgctgtatttctggaagcattccacggtcctggacattggcgagtgcctgacagtgccggacgagttctcaaagcaagagaagctgacgggcatgtggtggaaacagctggtggccggcgcagtggcaggtgccgtgtcacggacaggcacggcccctctggaccgcctcaaggtcttcatgcaggtccatgcctcaaagaccaaccggctgaacatccttggggggcttcgaagcatggtccttgagggaggcatccgctccctgtggcgcggcaatggtattaatgtactcaagattgcccccgagtcagctatcaagttcatggcctatgaacagatcaagagggccatcctggggcagcaggagacactgcatgtgcaggagcgcttcgtggctggctccctggctggtgccacagcccaaaccatcatttaccctatggaggtgctgaagacgcggctgaccttgcgccggacgggccagtataaggggctgctggactgcgccaggcgtatcctggagagggaggggccccgtgccttctaccgcggctacctccccaacgtgctgggcatcatcccctatgcgggcatcgacctggccgtctacgagactctgaagaactggtggcttcagcagtacagccacgactcggcagacccaggcatcctcgtgctcctggcctgcggtaccatatccagcacctgcggccagatagccagttacccgctggccctggtccggacccgcatgcaggcacaagcctccatcgagggtggcccccagctgtccatgctgggtctgctacgtcacatcctgtcccaggagggcatgcggggcctctaccgggggatcgcccccaacttcatgaaggttattccagctgtgagcatctcctatgtggtctacgagaacatgaagcaggccttgggggtcacgtccaggtgagggacccggagcccgtccccccaatccctcaccccccacacctcagccactggagactgatgatccaaccacaggatccctactctttggccacgagatcccagtacccagatcctggatcctagactcctatgccccaaccattgggtcatgggatcccagcatccagatcctggatcctagactcctatgccccaaccactgggtcatgcgatccccacccttcagccactagatcccagatccccctgtaaccataactgtggatcccttacttcagcaactcaagtctgctaccctaaccacaagattcaagattatccacaccccagcccttaatccccatcccccaaatcactggatcctgcagccccacatcctaaggtggatcccacgcttccctgtgccccctactggatcctggacctctacgtcttaaccactggatcccacacaaatcagtgaatggatcccaacaccccaaccacaggagcacggattccctgtacctcaacacccagaccctgcctccctcaggcaccagatccagtgtcctagtgaaacgctggatcctagatccccaaccccagatccccatgcctcgagccctggatctccaagctcagctgctggattctggatgtcaacaaacctcaccactggatcctgacaaccacaatgcctggatcctggggcccccatcactggatcccagatcccctcactccacccactggattcctgcattggtttttggttttttgtttttttttaacctcgacactgggtctcagatccttctgctgactgccagatccctgcatttcaagcactacgccttccacccccaggcactggatcccagattcccaagccttcacccaccagattctggctcctaaaacaagtgcgggggccccagtggcacagcaagtggatcctggcaactgcagctgctggattccagattctgggtccccaatccctctgcccagtccctcaatgttgaaacctcatctcttgaaggcagatcctgatattccaaggcactgaatcccaagccctgaatccccggtttctgatctgaatcttccaggcgccgggtcccaaatgttcaggccccaagtctagatcctggcagcccagtcacagagtatcccacacacactggtgcccagagccggcttctcatgacatgaaattgcatggtcgagggagtctgtggggaaggaagcccaggtcctggctgcaacctgcacggatgctggattccccctcaccccacctctgcatggccaccccctcccagccctgtggggaaactgttccctggaaccactccactccctgcatccccacacttcacagcatcttccatccccctcccaccttctaggcgaatagtccccagagctgtgttcctccaaggggtccgaggaatcactcactcctggaggctggcaaggagacagtctgaggccagggacacatgaagggatgtccccaccccagcactatcagggcctccccaggcttccagagttgaaagccaggagaaaatcggcaaagaccacccttccctaaacccaagcacccaatgatgcaaaaaacaaaaacaaaaaaaaaccaccaaatccccaaattcattccagatctatttttctaccagagagaggagcaaagtcctcctcccctgcgcccttacattctgcacttcatagttggattctgagcttaggatcatctggagaccccatggagggacttggaaaggggaactgggatttggggaggggctggaggacttccgcacgcttccacctccttcgacctccactgcgccccacctccctgcctgtgtgtgttatttcaaaggaaaagaacaaaaggaataaattttctaagctctaaaaaaaaagtccaagttcattcagcaaggcaatgctccatcttcagtggccttacaaatattatnataaccactctggtngnatatccttcattatgatattgatggaccaatgaactgcacttcagatatggagatcaaccctttgagaattaagatctcatctttgcaaa

SEQ ID NO: 17548 - DNA, 3799 bp, Homo sapiens
  misc_feature (3692)..(3692): n is a, c, g, or t
  misc_feature (3707)..(3707): n is a, c, g, or t
  misc_feature (3709)..(3709): n is a, c, g, or t
agcgggtcaccacctcccgcaagtgccagagccgagcggactgcgcggaggctgcggagccggcggccgcgggagctgaccctgcggggtcccggggggggagggggagccgcgaagcccccactgaggccgccgctgccgggcctcccctcccccccgggcgggcgccatgcgggggagcccgggcgacgcggagcggcggcagcgctggggtcgcctgttcgaggagctggacagtaacaaggatggccgcgtggacgtgcacgagttgcgccaggggctggccaggctgggcgggggcaacccagaccccggcgcccaacagggtatctcctctgagggtgatgctgacccagatggcgggctcgacctggaggaattttcccgctatctgcaggagcgggaacagcgtctgctgctcatgtttcacagtcttgaccggaaccaggatggtcacattgatgtctctgagatccaacagagtttccgagctctgggcatttccatctcgctggagcaggctgagaaaattttgcacagcatggaccgagacggcacaatgaccattgactggcaagaatggcgcgaccacttcctgttgcattcgctggaaaatgtggaggacgtgctgtatttctggaagcattccacgctctcttctgctgggttctctgcctggataaaagattctacggctgaacagaatcgttcaaaaaccacggtcttggccaggcgcagtggctcacacctgaaatcccagcactttgggaggccgaagtgggcggatcacgaggtcctggacattggcgagtgcctgacagtgccggacgagttctcaaagcaagagaagctgacgggcatgtggtggaaacagctggtggccggcgcagtggcaggtgccgtgtcacggacaggcacggcccctctggaccgcctcaaggtcttcatgcaggtccatgcctcaaagaccaaccggctgaacatccttggggggcttcgaagcatggtccttgagggaggcatccgctccctgtggcgcggcaatggtattaatgtactcaagattgcccccgagtcagctatcaagttcatggcctatgaacagatcaagagggccatcctggggcagcaggagacactgcatgtgcaggagcgcttcgtggctggctccctggctggtgccacagcccaaaccatcatttaccctatggaggtgctgaagacgcggctgaccttgcgccggacgggccagtataaggggctgctggactgcgccaggcgtatcctggagagggaggggccccgtgccttctaccgcggctacctccccaacgtgctgggcatcatcccctatgcgggcatcgacctggccgtctacgagactctgaagaactggtggcttcagcagtacagccacgactcggcagacccaggcatcctcgtgctcctggcctgcggtaccatatccagcacctgcggccagatagccagttacccgctggccctggtccggacccgcatgcaggcacaagcctccatcgagggtggcccccagctgtccatgctgggtctgctacgtcacatcctgtcccaggagggcatgcggggcctctaccgggggatcgcccccaacttcatgaaggttattccagctgtgagcatctcctatgtggtctacgagaacatgaagcaggccttgggggtcacgtccaggtgagggacccggagcccgtccccccaatccctcaccccccacacctcagccactggagactgatgatccaaccacaggatccctactctttggccacgagatcccagtacccagatcctggatcctagactcctatgccccaaccattgggtcatgggatcccagcatccagatcctggatcctagactcctatgccccaaccactgggtcatgcgatccccacccttcagccactagatcccagatccccctgtaaccataactgtggatcccttacttcagcaactcaagtctgctaccctaaccacaagattcaagattatccacaccccagcccttaatccccatcccccaaatcactggatcctgcagccccacatcctaaggtggatcccacgcttccctgtgccccctactggatcctggacctctacgtcttaaccactggatcccacacaaatcagtgaatggatcccaacaccccaaccacaggagcacggattccctgtacctcaacacccagaccctgcctccctcaggcaccagatccagtgtcctagtgaaacgctggatcctagatccccaaccccagatccccatgcctcgagccctggatctccaagctcagctgctggattctggatgtcaacaaacctcaccactggatcctgacaaccacaatgcctggatcctggggcccccatcactggatcccagatcccctcactccacccactggattcctgcattggtttttggttttttgtttttttttaacctcgacactgggtctcagatccttctgctgactgccagatccctgcatttcaagcactacgccttccacccccaggcactggatcccagattcccaagccttcacccaccagattctggctcctaaaacaagtgcgggggccccagtggcacagcaagtggatcctggcaactgcagctgctggattccagattctgggtccccaatccctctgcccagtccctcaatgttgaaacctcatctcttgaaggcagatcctgatattccaaggcactgaatcccaagccctgaatccccggtttctgatctgaatcttccaggcgccgggtcccaaatgttcaggccccaagtctagatcctggcagcccagtcacagagtatcccacacacactggtgcccagagccggcttctcatgacatgaaattgcatggtcgagggagtctgtggggaaggaagcccaggtcctggctgcaacctgcacggatgctggattccccctcaccccacctctgcatggccaccccctcccagccctgtggggaaactgttccctggaaccactccactccctgcatccccacacttcacagcatcttccatccccctcccaccttctaggcgaatagtccccagagctgtgttcctccaaggggtccgaggaatcactcactcctggaggctggcaaggagacagtctgaggccagggacacatgaagggatgtccccaccccagcactatcagggcctccccaggcttccagagttgaaagccaggagaaaatcggcaaagaccacccttccctaaacccaagcacccaatgatgcaaaaaacaaaaacaaaaaaaaaccaccaaatccccaaattcattccagatctatttttctaccagagagaggagcaaagtcctcctcccctgcgcccttacattctgcacttcatagttggattctgagcttaggatcatctggagaccccatggagggacttggaaaggggaactgggatttggggaggggctggaggacttccgcacgcttccacctccttcgacctccactgcgccccacctccctgcctgtgtgtgttatttcaaaggaaaagaacaaaaggaataaattttctaagctctaaaaaaaaagtccaagttcattcagcaaggcaatgctccatcttcagtggccttacaaatattatnataaccactctggtngnatatccttcattatgatattgatggaccaatgaactgcacttcagatatggagatcaaccctttgagaattaagatctcatctttgcaaa

SEQ ID NO: 17549 - DNA, 3111 bp, Homo sapiens
  misc_feature (3004)..(3004): n is a, c, g, or t
  misc_feature (3019)..(3019): n is a, c, g, or t
  misc_feature (3021)..(3021): n is a, c, g, or t
ccgaggtgatctagaggatcccgaagcgcacaatggcgcgaccacttcctgttgcattcgctggaaaatgtggaggacgtgctgtatttctggaagcattccacggtcctggacattggcgagtgcctgacagtgccggacgagttctcaaagcaagagaagctgacgggcatgtggtggaaacagctggtggccggcgcagtggcaggtgccgtgtcacggacaggcacggcccctctggaccgcctcaaggtcttcatgcaggtccatgcctcaaagaccaaccggctgaacatccttggggggcttcgaagcatggtccttgagggaggcatccgctccctgtggcgcggcaatggtattaatgtactcaagattgcccccgagtcagctatcaagttcatggcctatgaacagatcaagagggccatcctggggcagcaggagacactgcatgtgcaggagcgcttcgtggctggctccctggctggtgccacagcccaaaccatcatttaccctatggaggtgctgaagacgcggctgaccttgcgccggacgggccagtataaggggctgctggactgcgccaggcgtatcctggagagggaggggccccgtgccttctaccgcggctacctccccaacgtgctgggcatcatcccctatgcgggcatcgacctggccgtctacgagactctgaagaactggtggcttcagcagtacagccacgactcggcagacccaggcatcctcgtgctcctggcctgcggtaccatatccagcacctgcggccagatagccagttacccgctggccctggtccggacccgcatgcaggcacaagcctccatcgagggtggcccccagctgtccatgctgggtctgctacgtcacatcctgtcccaggagggcatgcggggcctctaccgggggatcgcccccaacttcatgaaggttattccagctgtgagcatctcctatgtggtctacgagaacatgaagcaggccttgggggtcacgtccaggtgagggacccggagcccgtccccccaatccctcaccccccacacctcagccactggagactgatgatccaaccacaggatccctactctttggccacgagatcccagtacccagatcctggatcctagactcctatgccccaaccattgggtcatgggatcccagcatccagatcctggatcctagactcctatgccccaaccactgggtcatgcgatccccacccttcagccactagatcccagatccccctgtaaccataactgtggatcccttacttcagcaactcaagtctgctaccctaaccacaagattcaagattatccacaccccagcccttaatccccatcccccaaatcactggatcctgcagccccacatcctaaggtggatcccacgcttccctgtgccccctactggatcctggacctctacgtcttaaccactggatcccacacaaatcagtgaatggatcccaacaccccaaccacaggagcacggattccctgtacctcaacacccagaccctgcctccctcaggcaccagatccagtgtcctagtgaaacgctggatcctagatccccaaccccagatccccatgcctcgagccctggatctccaagctcagctgctggattctggatgtcaacaaacctcaccactggatcctgacaaccacaatgcctggatcctggggcccccatcactggatcccagatcccctcactccacccactggattcctgcattggtttttggttttttgtttttttttaacctcgacactgggtctcagatccttctgctgactgccagatccctgcatttcaagcactacgccttccacccccaggcactggatcccagattcccaagccttcacccaccagattctggctcctaaaacaagtgcgggggccccagtggcacagcaagtggatcctggcaactgcagctgctggattccagattctgggtccccaatccctctgcccagtccctcaatgttgaaacctcatctcttgaaggcagatcctgatattccaaggcactgaatcccaagccctgaatccccggtttctgatctgaatcttccaggcgccgggtcccaaatgttcaggccccaagtctagatcctggcagcccagtcacagagtatcccacacacactggtgcccagagccggcttctcatgacatgaaattgcatggtcgagggagtctgtggggaaggaagcccaggtcctggctgcaacctgcacggatgctggattccccctcaccccacctctgcatggccaccccctcccagccctgtggggaaactgttccctggaaccactccactccctgcatccccacacttcacagcatcttccatccccctcccaccttctaggcgaatagtccccagagctgtgttcctccaaggggtccgaggaatcactcactcctggaggctggcaaggagacagtctgaggccagggacacatgaagggatgtccccaccccagcactatcagggcctccccaggcttccagagttgaaagccaggagaaaatcggcaaagaccacccttccctaaacccaagcacccaatgatgcaaaaaacaaaaacaaaaaaaaaccaccaaatccccaaattcattccagatctatttttctaccagagagaggagcaaagtcctcctcccctgcgcccttacattctgcacttcatagttggattctgagcttaggatcatctggagaccccatggagggacttggaaaggggaactgggatttggggaggggctggaggacttccgcacgcttccacctccttcgacctccactgcgccccacctccctgcctgtgtgtgttatttcaaaggaaaagaacaaaaggaataaattttctaagctctaaaaaaaaagtccaagttcattcagcaaggcaatgctccatcttcagtggccttacaaatattatnataaccactctggtngnatatccttcattatgatattgatggaccaatgaactgcacttcagatatggagatcaaccctttgagaattaagatctcatctttgcaaa

SEQ ID NO: 17550 - DNA, 3156 bp, Homo sapiens
agcgggtcaccacctcccgcaagtgccagagccgagcggactgcgcggaggctgcggagccggcggccgcgggagctgaccctgcggggtcccggggggggagggggagccgcgaagcccccactgaggccgccgctgccgggcctcccctcccccccgggcgggcgccatgcgggggagcccgggcgacgcggagcggcggcagcgctggggtcgcctgttcgaggagctggacagtaacaaggatggccgcgtggacgtgcacgagttgcgccaggggctggccaggctgggcgggggcaacccagaccccggcgcccaacagggtatctcctctgagggtgatgctgacccagatggcgggctcgacctggaggaattttcccgctatctgcaggagcgggaacagcgtctgctgctcatgtttcacagtcttgaccggaaccaggatggtcacattgatgtctctgagatccaacagagtttccgagctctgggcatttccatctcgctggagcaggctgagaaaattttgcacagcatggaccgagacggcacaatgaccattgactggcaagaatggcgcgaccacttcctgttgcattcgctggaaaatgtggaggacgtgctgtatttctggaagcattccacggtcctggacattggcgagtgcctgacagtgccggacgagttctcaaagcaagagaagctgacgggcatgtggtggaaacagctggtggccggcgcagtggcaggtgccgtgtcacggacaggcacggcccctctggaccgcctcaaggtcttcatgcaggtccatgcctcaaagaccaaccggctgaacatccttggggggcttcgaagcatggtccttgagggaggcatccgctccctgtggcgcggcaatggtattaatgtactcaagattgcccccgagtcagctatcaagttcatggcctatgaacagatcaagagggccatcctggggcagcaggagacactgcatgtgcaggagcgcttcgtggctggctccctggctggtgccacagcccaaaccatcatttaccctatggaggtgctgaagacgcggctgaccttgcgccggacgggccagtataaggggctgctggactgcgccaggcgtatcctggagagggaggggccccgtgccttctaccgcggctacctccccaacgtgctgggcatcatcccctatgcgggcatcgacctggccgtctacgagactctgaagaactggtggcttcagcagtacagccacgactcggcagacccaggcatcctcgtgctcctggcctgcggtaccatatccagcacctgcggccagatagccagttacccgctggccctggtccggacccgcatgcaggcacaagcctccatcgagggtggcccccagctgtccatgctgggtctgctacgtcacatcctgtcccaggagggcatgcggggcctctaccgggggatcgcccccaacttcatgaaggttattccagctgtgagcatctcctatgtggtctacgagaacatgaagcaggccttgggggtcacgtccaggtgagggacccggagcccgtccccccaatccctcaccccccacacctcagccactggagactgatgatccaaccacaggatccctactctttggccacgagatcccagtacccagatcctggatcctagactcctatgccccaaccattgggtcatgggatcccagcatccagatcctggatcctagactcctatgccccaaccactgggtcatgcgatccccacccttcagccactagatcccagatccccctgtaaccataactgtggatcccttacttcagcaactcaagtctgctaccctaaccacaagattcaagattatccacaccccagcccttaatccccatcccccaaatcactggatcctgcagccccacatcctaaggtggatcccacgcttccctgtgccccctactggatcctggacctctacgtcttaaccactggatcccacacaaatcagtgaatggatcccaacaccccaaccacaggagcacggattccctgtacctcaacacccagaccctgcctccctcaggcaccagatccagtgtcctagtgaaacgctggatcctagatccccaaccccagatccccatgcctcgagccctggatctccaagctcagctgctggattctggatgtcaacaaacctcaccactggatcctgacaaccacaatgcctggatcctggggcccccatcactggatcccagatcccctcactccacccactggattcctgcattggtttttggttttttgtttttttttaacctcgacactgggtctcagatccttctgctgactgccagatccctgcatttcaagcactacgccttccacccccaggcactggatcccagattcccaagccttcacccaccagattctggctcctaaaacaagtgcgggggccccagtggcacagcaagtggatcctggcaactgcagctgctggattccagattctgggtccccaatccctctgcccagtccctcaatgttgaaacctcatctcttgaaggcagatcctgatattccaaggcactgaatcccaacttctaggcgaatagtccccagagctgtgttcctccaaggggtccgaggaatcactcactcctggaggctggcaaggagacagtctgaggccagggacacatgaagggatgtccccaccccagcactatcagggcctccccaggcttccagagttgaaagccaggagaaaatcggcaaagaccacccttccctaaacccaagcacccaatgatgcaaaaaacaaaaacaaaaaaaaaccaccaaatccccaaattcattccagatctatttttctaccagagagaggagcaaagtcctcctcccctgcgcccttacattctgcacttcatagttggattctgagcttaggatcatctggagaccccatggagggacttggaaaggggaactgggatttggggaggggctggaggacttccgcacgcttccacctccttcgacctccactgcgccccacctccctgcctgtgtgtgttatttcaaaggaaaagaacaaaaggaataaattttctaagctct

SEQ ID NO: 17551 - DNA, 1213 bp, Homo sapiens
agcgggtcaccacctcccgcaagtgccagagccgagcggactgcgcggaggctgcggagccggcggccgcgggagctgaccctgcggggtcccggggggggagggggagccgcgaagcccccactgaggccgccgctgccgggcctcccctcccccccgggcgggcgccatgcgggggagcccgggcgacgcggagcggcggcagcgctggggtcgcctgttcgaggagctggacagtaacaaggatggccgcgtggacgtgcacgagttgcgccaggggctggccaggctgggcgggggcaacccagaccccggcgcccaacagggtatctcctctgagggtgatgctgacccagatggcgggctcgacctggaggaattttcccgctatctgcaggagcgggaacagcgtctgctgctcatgtttcacagtcttgaccggaaccaggatggtcacattgatgtctctgagatccaacagaagccggcttctcatgacatgaaattgcatggtcgagggagtctgtggggaaggaagcccaggtcctggctgcaacctgcacggatgctggattccccctcaccccacctctgcatggccaccccctcccagccctgtggggaaactgttccctggaaccactccactccctgcatccccacacttcacagcatcttccatccccctcccaccttctaggcgaatagtccccagagctgtgttcctccaaggggtccgaggaatcactcactcctggaggctggcaaggagacagtctgaggccagggacacatgaagggatgtccccaccccagcactatcagggcctccccaggcttccagagttgaaagccaggagaaaatcggcaaagaccacccttccctaaacccaagcacccaatgatgcaaaaaacaaaaacaaaaaaaaaccaccaaatccccaaattcattccagatctatttttctaccagagagaggagcaaagtcctcctcccctgcgcccttacattctgcacttcatagttggattctgagcttaggatcatctggagaccccatggagggacttggaaaggggaactgggatttggggaggggctggaggacttccgcacgcttccacctccttcgacctccactgcgccccacctccctgcctgtgtgtgttatttcaaaggaaaagaacaaaaggaataaattttctaagctct

SEQ ID NO: 17552 - DNA, 1778 bp, Homo sapiens
agcgggtcaccacctcccgcaagtgccagagccgagcggactgcgcggaggctgcggagccggcggccgcgggagctgaccctgcggggtcccggggggggagggggagccgcgaagcccccactgaggccgccgctgccgggcctcccctcccccccgggcgggcgccatgcgggggagcccgggcgacgcggagcggcggcagcgctggggtcgcctgttcgaggagctggacagtaacaaggatggccgcgtggacgtgcacgagttgcgccaggggctggccaggctgggcgggggcaacccagaccccggcgcccaacagggtatctcctctgagggtgatgctgacccagatggcgggctcgacctggaggaattttcccgctatctgcaggagcgggaacagcgtctgctgctcatgtttcacagtcttgaccggaaccaggatggtcacattgatgtctctgagatccaacagagtttccgagctctgggcatttccatctcgctggagcaggctgagaaaattttgcacagcatggaccgagacggcacaatgaccattgactggcaagaatggcgcgaccacttcctgttgcattcgctggaaaatgtggaggacgtgctgtatttctggaagcattccacggtcctggacattggcgagtgcctgacagtgccggacgagttctcaaagcaagagaagctgacgggcatgtggtggaaacagctggtggccggcgcagtggcaggtgccgtgtcacggacaggcacggcccctctggaccgcctcaaggtcttcatgcaggtccatgcctcaaagaccaaccggctgaacatccttggggggcttcgaagcatggtccttgagggaggcatccgctccctgtggcgcggcaatggtattaatgtactcaagattgcccccgagtcagctatcaagttcatggcctatgaacagatcaagagggccatcctggggcagcaggagacactgcatgtgcaggagcgcttcgtggctggctccctggctggtgccacagcccaaaccatcatttaccctatggaggtgctgaagacgcggctgaccttgcgccggacgggccagtataaggggctgctggactgcgccaggcgtatcctggagagggaggggccccgtgccttctaccgcggctacctccccaacgtgctgggcatcatcccctatgcgggcatcgacctggccgtctacgagactctgaagaactggtggcttcagcagtacagccacgactcggcagacccaggcatcctcgtgctcctggcctgcggtaccatatccagcacctgcggccagatagccagttacccgctggccctggtccggacccgcatgcaggcacaagccggtggtcatgccatgagcagccttatggagaggaccatgtggtaaggaactcagccaatagccatgtaactgagcttggaagaggatcttgctgtcctggccaacatctcactgcaattctatcagttgaattccctggatagtccaagctttgtggatccctccaccagaacaactggatcccagtacctgaatcctgaatcttagactcttatacttcaaacactgatcacgggaacagccggctcagcagctcctgagttcctaatgctcagaacatggatgagatgataaatgtttgttgtgttaagctgccaacctttggcgggggggtaattcgtcacatggcaacagctggctaatacatatatacctacatgtaaat

SEQ ID NO: 17553 - DNA, 1489 bp, Homo sapiens
agcgggtcaccacctcccgcaagtgccagagccgagcggactgcgcggaggctgcggagccggcggccgcgggagctgaccctgcggggtcccggggggggagggggagccgcgaagcccccactgaggccgccgctgccgggcctcccctcccccccgggcgggcgccatgcgggggagcccgggcgacgcggagcggcggcagcgctggggtcgcctgttcgaggagctggacagtaacaaggatggccgcgtggacgtgcacgagttgcgccaggggctggccaggctgggcgggggcaacccagaccccggcgcccaacagggtatctcctctgagggtgatgctgacccagatggcgggctcgacctggaggaattttcccgctatctgcaggagcgggaacagcgtctgctgctcatgtttcacagtcttgaccggaaccaggatggtcacattgatgtctctgagatccaacagagtttccgagctctgggcatttccatctcgctggagcaggctgagaaaattttgcacagcatggaccgagacggcacaatgaccattgactggcaagaatggcgcgaccacttcctgttgcattcgctggaaaatgtggaggacgtgctgtatttctggaagcattccacggtcctggacattggcgagtgcctgacagtgccggacgagttctcaaagcaagagaagctgacgggcatgtggtggaaacagctggtggccggcgcagtggcaggtgccgtgtcacggacaggcacggcccctctggaccgcctcaaggtcttcatgcaggtccatgcctcaaagaccaaccggctgaacatccttggggggcttcgaagcatggtccttgagggaggcatccgctccctgtggcgcggcaatggtattaatgtactcaagattgcccccgagtcagctatcaagttcatggcctatgaacagatcaagagggccatcctggggcagcaggagacactgcatgtgcaggagcgcttcgtggctggctccctggctggtgccacagcccaaaccatcatttaccctatggaggtgctgaagacgcggctgaccttgcgccggacgggccagtataaggggctgctggactgcgccaggcgtatcctggagagggaggggccccgtgccttctaccgcggctacctccccaacgtgctgggcatcatcccctatgcgggcatcgacctggccgtctacgagactctgaagaactggtggcttcagcagtacagccacgactcggcagacccaggcatcctcgtgctcctggcctgcggtaccatatccagcacctgcggccagatagccagttacccgctggccctggtccggacccgcatgcaggcacaagatgtgtcagtgtacaagacggacacggtccccaccctcatagagctcacaggccggagaggaaggaagatgctaaataaatcattctggaattaaaaa

SEQ ID NO: 17554 - DNA, 2232 bp, Homo sapiens
gcgcccgggccgccggccgggcccgggcctgggggcggggcgggaagacggcggccgggagtgttttcagttccgcctccaatcgcccattcccctcttcccctcccagccccctccatcccatcggaagaggaaggaacaaaaggtcccggaccccccggatctgacggggcgggacctggcgccaccttgcaggttcgatacaagaggctgttttcctagcgtggcttgctgcctttggtaagaacatgtcgtccatcttgccattcacgccgccagttgtgaagagactgctgggatggaagaagtcagctggtgggtctggaggagcaggcggaggagagcagaatgggcaggaagaaaagtggtgtgagaaagcagtgaaaagtctggtgaagaagctaaagaaaacaggacgattagatgagcttgagaaagccatcaccactcaaaactgtaatactaaatgtgttaccataccaagcacttgctctgaaatttggggactgagtacaccaaatacgatagatcagtgggatacaacaggcctttacagcttctctgaacaaaccaggtctcttgatggtcgtctccaggtatcccatcgaaaaggattgccacatgttatatattgccgattatggcgctggcctgatcttcacagtcatcatgaactcaaggcaattgaaaactgcgaatatgcttttaatcttaaaaaggatgaagtatgtgtaaacccttaccactatcagagagttgagacaccagttttgcctccagtattagtgccccgacacaccgagatcctaacagaacttccgcctctggatgactatactcactccattccagaaaacactaacttcccagcaggaattgagccacagagtaattatattccagaaacgccacctcctggatatatcagtgaagatggagaaacaagtgaccaacagttgaatcaaagtatggacacaggctctccagcagaactatctcctactactctttcccctgttaatcatagcttggatttacagccagttacttactcagaacctgcattttggtgttcgatagcatattatgaattaaatcagagggttggagaaaccttccatgcatcacagccctcactcactgtagatggctttacagacccatcaaattcagagaggttctgcttaggtttactctccaatgttaaccgaaatgccacggtagaaatgacaagaaggcatataggaagaggagtgcgcttatactacataggtggggaagtttttgctgagtgcctaagtgatagtgcaatctttgtgcagagccccaattgtaatcagagatatggctggcaccctgcaacagtgtgtaaaattccaccaggctgtaatctgaagatcttcaacaaccaggaatttgctgctcttctggctcagtctgttaatcagggttttgaagccgtctatcagctaactagaatgtgcaccataagaatgagttttgtgaaagggtggggagcagaataccgaaggcagacggtaacaagtactccttgctggattgaacttcatctgaatggacctctacagtggttggacaaagtattaactcagatgggatccccttcagtgcgttgctcaagcatgtcataaagcttcaccaatcaagtcccatgaaaagacttaatgtaacaactcttctgtcatagcattgtgtgtggtccctatggactgtttactatccaaaagttcaagagagaaaacagcacttgaggtctcatcaattaaagcaccttgtggaatctgtttcctatatttgaatattagatgggaaaattagtgtctagaaatactctcccattaaagaggaagagaagattttaaagacttaatgatgtcttattgggcataaaactgagtgtcccaaaggtttattaataacagtagtagttatgtgtacaggtaatgtatcatgatccagtatcacagtattgtgctgtttatatacatttttagtttgcatagatgaggtgtgtgtgtgcgctgcttcttgatctaggcaaacctttataaagttgcagtacctaatctgttattcccacttctctgttatttttgtgtgtcttttttaatatataatatatatcaagattttcaaattatttagaagcagattttcctgtagaaaaactaatttttctgccttttaccaaaaataaactcttgggggaag

SEQ ID NO: 17555 - DNA, 584 bp, Homo sapiens
gcatataatcatgatactggttaaattagccagtgatgctttattttcaaagaaatgttacaactacagttttcttctattatcatcatcgttttccttgaagcgcacttgctctgaaatttggggactgagtacaccaaatacgatagatcagtgggatacaacaggcctttacagcttctctgaacaaaccaggtctcttgatggtcgtctccaggtatcccatcgaaaaggattgccacatgttatatattgccgattatggcgctggcctgatcttcacagtcatcatgaactcaaggcaattgaaaactgcgaatatgcttttaatcttaaaaaggatgaagtatgtgtaaacccttaccactatcagagagttgagacaccagttttgcctccagtattagtgccccgacacaccgagatcctaacagaacttccgcctctggatgactatactcactccattccagaaaacactaacttcccagcaggaattgagccacagagtaattatattccaggtatttttgccttctgaatctcctaaaacttggatagatacaaattttgttcataagcat

SEQ ID NO: 17556 - DNA, 3389 bp, Homo sapiens
  misc_feature (263)..(263): n is a, c, g, or t
  misc_feature (266)..(268): n is a, c, g, or t
agcggcgggaggcggggcgggccgtagacaaagggaggtggggaggcggtggccggcgactccccgcgccccgctcgccccccggcccttcccgcggtgctcggcctcgttcctttcctcctccgctccctccgtcttccatacccgccccgcgcggctttcggccggcgtgcctcgcgccctaacgggcggctggaggcgccaatcagcgggcggcagggtgccagccccggggctgcgccggcgaatcggcggggcccgcngcnnngggtggcaggcgggtctacccgcgcggccgcggcggcggagaagcagctcgccagccagcagcccgccagccgccgggaggttcgatacaagaggctgttttcctagcgtggcttgctgcctttggtaagaacatgtcgtccatcttgccattcacgccgccagttgtgaagagactgctgggatggaagaagtcagctggtgggtctggaggagcaggcggaggagagcagaatgggcaggaagaaaagtggtgtgagaaagcagtgaaaagtctggtgaagaagctaaagaaaacaggacgattagatgagcttgagaaagccatcaccactcaaaactgtaatactaaatgtgttaccataccaagcacttgctctgaaatttggggactgagtacaccaaatacgatagatcagtgggatacaacaggcctttacagcttctctgaacaaaccaggtctcttgatggtcgtctccaggtatcccatcgaaaaggattgccacatgttatatattgccgattatggcgctggcctgatcttcacagtcatcatgaactcaaggcaattgaaaactgcgaatatgcttttaatcttaaaaaggatgaagtatgtgtaaacccttaccactatcagagagttgagacaccagttttgcctccagtattagtgccccgacacaccgagatcctaacagaacttccgcctctggatgactatactcactccattccagaaaacactaacttcccagcaggaattgagccacagagtaattatattccagaaacgccacctcctggatatatcagtgaagatggagaaacaagtgaccaacagttgaatcaaagtatggacacaggctctccagcagaactatctcctactactctttcccctgttaatcatagcttggatttacagccagttacttactcagaacctgcattttggtgttcgatagcatattatgaattaaatcagagggttggagaaaccttccatgcatcacagccctcactcactgtagatggctttacagacccatcaaattcagagaggttctgcttaggtttactctccaatgttaaccgaaatgccacggtagaaatgacaagaaggcatataggaagaggagtgcgcttatactacataggtggggaagtttttgctgagtgcctaagtgatagtgcaatctttgtgcagagccccaattgtaatcagagatatggctggcaccctgcaacagtgtgtaaaattccaccaggctgtaatctgaagatcttcaacaaccaggaatttgctgctcttctggctcagtctgttaatcagggttttgaagccgtctatcagctaactagaatgtgcaccataagaatgagttttgtgaaagggtggggagcagaataccgaaggcagacggtaacaagtactccttgctggattgaacttcatctgaatggacctctacagtggttggacaaagtattaactcagatgggatccccttcagtgcgttgctcaagcatgtcataaagcttcaccaatcaagtcccatgaaaagacttaatgtaacaactcttctgtcatagcattgtgtgtggtccctatggactgtttactatccaaaagttcaagagagaaaacagcacttgaggtctcatcaattaaagcaccttgtggaatctgtttcctatatttgaatattagatgggaaaattagtgtctagaaatactctcccattaaagaggaagagaagattttaaagacttaatgatgtcttattgggcataaaactgagtgtcccaaaggtttattaataacagtagtagttatgtgtacaggtaatgtatcatgatccagtatcacagtattgtgctgtttatatacatttttagtttgcatagatgaggtgtgtgtgtgcgctgcttcttgatctaggcaaacctttataaagttgcagtacctaatctgttattcccacttctctgttatttttgtgtgtcttttttaatatataatatatatcaagattttcaaattatttagaagcagattttcctgtagaaaaactaatttttctgccttttaccaaaaataaactcttgggggaagaaaagtggattaacttttgaaatccttgaccttaatgtgttcagtggggcttaaacagtcattctttttgtggtttttgtttttttgtttttttttttaactgctaaatcttattataaggaaaccataccgaaaacctttccaagcctcttttttccattcccatttttgtcctcataatcaaaacagcataacatgacatcatcaccagtaatagttgcattgatactgctggcaccagttaattctgggatacagtaagaattcatatggagaaagtccctttgtcttatgcccaaatttcaacaggaataattggcttgtataatctagcagtctgttgatttatccttccacctcataaaaaatgcataggtggcagtataattattttcagggatatgctagaattacttccacatatttatccctttttaaaaaagctaatctataaataccgtttttccaaaggtattttacaatatttcaacagcagaccttctgctcttcgagtagtttgatttggtttagtaaccagattgcattatgaaatgggccttttgtaaatgtaattgtttctgcaaaatacctagaaaagtgatgctgaggtaggatcagcagatatgggccatctgtttttaaagtatgttgtattcagtttataaattgattgttattctacacataattatgaattcagaattttaaaaattgggggaaaagccatttatttagcaagttttttagcttataagttacctgcagtctgagctgttcttaactgatcctggttttgtgattgacaatatttcatgctctgtagtgagaggagatttccgaaactctgttgctagttcattctgcagcaaataattattatgtctgatgttgactcattgcagtttaaacatttcttcttgtttgcatcttagtagaaatggaaaataaccactcctggtcgtcttttcataaattttcatatttttgaagctgtctttggtact

SEQ ID NO: 17557 - DNA, 3127 bp, Homo sapiens
aagccaggctggtacggtcggagtcgtttggatccgcggcggcggagaagcagctcgccagccagcagcccgccagccgccgggaggttcgatacaagaggctgttttcctagcgtggcttgctgcctttggtaagaacatgtcgtccatcttgccattcacgccgccagttgtgaagagactgctgggatggaagaagtcagctggtgggtctggaggagcaggcggaggagagcagaatgggcaggaagaaaagtggtgtgagaaagcagtgaaaagtctggtgaagaagctaaagaaaacaggacgattagatgagcttgagaaagccatcaccactcaaaactgtaatactaaatgtgttaccataccaagcacttgctctgaaatttggggactgagtacaccaaatacgatagatcagtgggatacaacaggcctttacagcttctctgaacaaaccaggtctcttgatggtcgtctccaggtatcccatcgaaaaggattgccacatgttatatattgccgattatggcgctggcctgatcttcacagtcatcatgaactcaaggcaattgaaaactgcgaatatgcttttaatcttaaaaaggatgaagtatgtgtaaacccttaccactatcagagagttgagacaccagttttgcctccagtattagtgccccgacacaccgagatcctaacagaacttccgcctctggatgactatactcactccattccagaaaacactaacttcccagcaggaattgagccacagagtaattatattccagaaacgccacctcctggatatatcagtgaagatggagaaacaagtgaccaacagttgaatcaaagtatggacacaggctctccagcagaactatctcctactactctttcccctgttaatcatagcttggatttacagccagttacttactcagaacctgcattttggtgttcgatagcatattatgaattaaatcagagggttggagaaaccttccatgcatcacagccctcactcactgtagatggctttacagacccatcaaattcagagaggttctgcttaggtttactctccaatgttaaccgaaatgccacggtagaaatgacaagaaggcatataggaagaggagtgcgcttatactacataggtggggaagtttttgctgagtgcctaagtgatagtgcaatctttgtgcagagccccaattgtaatcagagatatggctggcaccctgcaacagtgtgtaaaattccaccaggctgtaatctgaagatcttcaacaaccaggaatttgctgctcttctggctcagtctgttaatcagggttttgaagccgtctatcagctaactagaatgtgcaccataagaatgagttttgtgaaagggtggggagcagaataccgaaggcagacggtaacaagtactccttgctggattgaacttcatctgaatggacctctacagtggttggacaaagtattaactcagatgggatccccttcagtgcgttgctcaagcatgtcataaagcttcaccaatcaagtcccatgaaaagacttaatgtaacaactcttctgtcatagcattgtgtgtggtccctatggactgtttactatccaaaagttcaagagagaaaacagcacttgaggtctcatcaattaaagcaccttgtggaatctgtttcctatatttgaatattagatgggaaaattagtgtctagaaatactctcccattaaagaggaagagaagattttaaagacttaatgatgtcttattgggcataaaactgagtgtcccaaaggtttattaataacagtagtagttatgtgtacaggtaatgtatcatgatccagtatcacagtattgtgctgtttatatacatttttagtttgcatagatgaggtgtgtgtgtgcgctgcttcttgatctaggcaaacctttataaagttgcagtacctaatctgttattcccacttctctgttatttttgtgtgtcttttttaatatataatatatatcaagattttcaaattatttagaagcagattttcctgtagaaaaactaatttttctgccttttaccaaaaataaactcttgggggaagaaaagtggattaacttttgaaatccttgaccttaatgtgttcagtggggcttaaacagtcattctttttgtggtttttgtttttttgtttttttttttaactgctaaatcttattataaggaaaccataccgaaaacctttccaagcctcttttttccattcccatttttgtcctcataatcaaaacagcataacatgacatcatcaccagtaatagttgcattgatactgctggcaccagttaattctgggatacagtaagaattcatatggagaaagtccctttgtcttatgcccaaatttcaacaggaataattggcttgtataatctagcagtctgttgatttatccttccacctcataaaaaatgcataggtggcagtataattattttcagggatatgctagaattacttccacatatttatccctttttaaaaaagctaatctataaataccgtttttccaaaggtattttacaatatttcaacagcagaccttctgctcttcgagtagtttgatttggtttagtaaccagattgcattatgaaatgggccttttgtaaatgtaattgtttctgcaaaatacctagaaaagtgatgctgaggtaggatcagcagatatgggccatctgtttttaaagtatgttgtattcagtttataaattgattgttattctacacataattatgaattcagaattttaaaaattgggggaaaagccatttatttagcaagttttttagcttataagttacctgcagtctgagctgttcttaactgatcctggttttgtgattgacaatatttcatgctctgtagtgagaggagatttccgaaactctgttgctagttcattctgcagcaaataattattatgtctgatgttgactcattgcagtttaaacatttcttcttgtttgcatcttagtagaaatggaaaataaccactcctggtcgtcttttcataaattttcatatttttgaagctgtctttggtact

SEQ ID NO: 17558 - DNA, 2480 bp, Homo sapiens
  misc_feature (263)..(263): n is a, c, g, or t
  misc_feature (266)..(268): n is a, c, g, or t
agcggcgggaggcggggcgggccgtagacaaagggaggtggggaggcggtggccggcgactccccgcgccccgctcgccccccggcccttcccgcggtgctcggcctcgttcctttcctcctccgctccctccgtcttccatacccgccccgcgcggctttcggccggcgtgcctcgcgccctaacgggcggctggaggcgccaatcagcgggcggcagggtgccagccccggggctgcgccggcgaatcggcggggcccgcngcnnngggtggcaggcgggtctacccgcgcggccgcggcggcggagaagcagctcgccagccagcagcccgccagccgccgggagccctcccagccccctccatcccatcggaagaggaaggaacaaaaggtcccggaccccccggatctgacggggcgggacctggcgccaccttgcaggttcgatacaagaggctgttttcctagcgtggcttgctgcctttggtaagaacatgtcgtccatcttgccattcacgccgccagttgtgaagagactgctgggatggaagaagtcagctggtgggtctggaggagcaggcggaggagagcagaatgggcaggaagaaaagtggtgtgagaaagcagtgaaaagtctggtgaagaagctaaagaaaacaggacgattagatgagcttgagaaagccatcaccactcaaaactgtaatactaaatgtgttaccataccaagcacttgctctgaaatttggggactgagtacaccaaatacgatagatcagtgggatacaacaggcctttacagcttctctgaacaaaccaggtctcttgatggtcgtctccaggtatcccatcgaaaaggattgccacatgttatatattgccgattatggcgctggcctgatcttcacagtcatcatgaactcaaggcaattgaaaactgcgaatatgcttttaatcttaaaaaggatgaagtatgtgtaaacccttaccactatcagagagttgagacaccagttttgcctccagtattagtgccccgacacaccgagatcctaacagaacttccgcctctggatgactatactcactccattccagaaaacactaacttcccagcaggaattgagccacagagtaattatattccagaaacgccacctcctggatatatcagtgaagatggagaaacaagtgaccaacagttgaatcaaagtatggacacaggctctccagcagaactatctcctactactctttcccctgttaatcatagcttggatttacagccagttacttactcagaacctgcattttggtgttcgatagcatattatgaattaaatcagagggttggagaaaccttccatgcatcacagccctcactcactgtagatggctttacagacccatcaaattcagagaggttctgcttaggtttactctccaatgttaaccgaaatgccacggtagaaatgacaagaaggcatataggaagaggagtgcgcttatactacataggtggggaagtttttgctgagtgcctaagtgatagtgcaatctttgtgcagagccccaattgtaatcagagatatggctggcaccctgcaacagtgtgtaaaattccaccaggctgtaatctgaagatcttcaacaaccaggaatttgctgctcttctggctcagtctgttaatcagggttttgaagccgtctatcagctaactagaatgtgcaccataagaatgagttttgtgaaagggtggggagcagaataccgaaggcagacggtaacaagtactccttgctggattgaacttcatctgaatggacctctacagtggttggacaaagtattaactcagatgggatccccttcagtgcgttgctcaagcatgtcataaagcttcaccaatcaagtcccatgaaaagacttaatgtaacaactcttctgtcatagcattgtgtgtggtccctatggactgtttactatccaaaagttcaagagagaaaacagcacttgaggtctcatcaattaaagcaccttgtggaatctgtttcctatatttgaatattagatgggaaaattagtgtctagaaatactctcccattaaagaggaagagaagattttaaagacttaatgatgtcttattgggcataaaactgagtgtcccaaaggtttattaataacagtagtagttatgtgtacaggtaatgtatcatgatccagtatcacagtattgtgctgtttatatacatttttagtttgcatagatgaggtgtgtgtgtgcgctgcttcttgatctaggcaaacctttataaagttgcagtacctaatctgttattcccacttctctgttatttttgtgtgtcttttttaatatataatatatatcaagattttcaaattatttagaagcagattttcctgtagaaaaactaatttttctgccttttaccaaaaataaactcttgggggaag

SEQ ID NO: 17559 - DNA, 2237 bp, Homo sapiens
  misc_feature (263)..(263): n is a, c, g, or t
  misc_feature (266)..(268): n is a, c, g, or t
agcggcgggaggcggggcgggccgtagacaaagggaggtggggaggcggtggccggcgactccccgcgccccgctcgccccccggcccttcccgcggtgctcggcctcgttcctttcctcctccgctccctccgtcttccatacccgccccgcgcggctttcggccggcgtgcctcgcgccctaacgggcggctggaggcgccaatcagcgggcggcagggtgccagccccggggctgcgccggcgaatcggcggggcccgcngcnnngggtggcaggcgggtctacccgcgcggccgcggcggcggagaagcagctcgccagccagcagcccgccagccgccgggaggttcgatacaagaggctgttttcctagcgtggcttgctgcctttggtaagaacatgtcgtccatcttgccattcacgccgccagttgtgaagagactgctgggatggaagaagtcagctggtgggtctggaggagcaggcggaggagagcagaatgggcaggaagaaaagtggtgtgagaaagcagtgaaaagtctggtgaagaagctaaagaaaacaggacgattagatgagcttgagaaagccatcaccactcaaaactgtaatactaaatgtgttaccataccaagcacttgctctgaaatttggggactgagtacaccaaatacgatagatcagtgggatacaacaggcctttacagcttctctgaacaaaccaggtctcttgatggtcgtctccaggtatcccatcgaaaaggattgccacatgttatatattgccgattatggcgctggcctgatcttcacagtcatcatgaactcaaggcaattgaaaactgcgaatatgcttttaatcttaaaaaggatgaagtatgtgtaaacccttaccactatcagagagttgagacaccagttttgcctccagtattagtgccccgacacaccgagatcctaacagaacttccgcctctggatgactatactcactccattccagaaaacactaacttcccagcaggaattgagccacagagtaattatattccagaaacgccacctcctggatatatcagtgaagatggagaaacaagtgaccaacagttgaatcaaagtatggacacaggctctccagcagaactatctcctactactctttcccctgttaatcatagcttggatttacagccagttacttactcagaacctgcattttggtgttcgatagcatattatgaattaaatcagagggttggagaaaccttccatgcatcacagccctcactcactgtagatggctttacagacccatcaaattcagagaggttctgcttaggtttactctccaatgttaaccgaaatgccacggtagaaatgacaagaaggcatataggaagaggagtgcgcttatactacataggtggggaagtttttgctgagtgcctaagtgatagtgcaatctttgtgcagagccccaattgtaatcagagatatggctggcaccctgcaacagtgtgtaaaattccaccaggctgtaatctgaagatcttcaacaaccaggaatttgctgctcttctggctcagtctgttaatcagggttttgaagccgtctatcagctaactagaatgtgcaccataagaatgagttttgtgaaagggtggggagcagaataccgaaggcagacggtaacaagtactccttgctggattgaacttcatctgaatggacctctacagtggttggacaaagtattaactcagatgggatccccttcagtgcgttgctcaagcatgtcataaagcttcaccaatcaagtcccatgaaaagacttaatgtaacaactcttctgtcatagcattgtgtgtggtccctatggactgtttactatccaaaagttcaagagagaaaacagcacttgaggtctcatcaattaaagcaccttgtggaatctgtttcctatatttgaatattagatgggaaaattagtgtctagaaatactctcccattaaagaggaagagaagattttaaagacttaatgatgtcttattgggcataaaactgagtgtcccaaaggtttattaataacagtagtagttatgtgtacaggtaatgtatcatgatccagtatcacagtattgtgctgtttatatacatttttagtttgcatagatgaggtgtgtgtgtgcgctgcttcttgatctaggcaaacctttataaagttgcagtacc

SEQ ID NO: 17560 - DNA, 3100 bp, Homo sapiens
  misc_feature (263)..(263): n is a, c, g, or t
  misc_feature (266)..(268): n is a, c, g, or t
agcggcgggaggcggggcgggccgtagacaaagggaggtggggaggcggtggccggcgactccccgcgccccgctcgccccccggcccttcccgcggtgctcggcctcgttcctttcctcctccgctccctccgtcttccatacccgccccgcgcggctttcggccggcgtgcctcgcgccctaacgggcggctggaggcgccaatcagcgggcggcagggtgccagccccggggctgcgccggcgaatcggcggggcccgcngcnnngggtggcaggcgggtctacccgcgcggccgcggcggcggagaagcagctcgccagccagcagcccgccagccgccgggagcacttgctctgaaatttggggactgagtacaccaaatacgatagatcagtgggatacaacaggcctttacagcttctctgaacaaaccaggtctcttgatggtcgtctccaggtatcccatcgaaaaggattgccacatgttatatattgccgattatggcgctggcctgatcttcacagtcatcatgaactcaaggcaattgaaaactgcgaatatgcttttaatcttaaaaaggatgaagtatgtgtaaacccttaccactatcagagagttgagacaccagttttgcctccagtattagtgccccgacacaccgagatcctaacagaacttccgcctctggatgactatactcactccattccagaaaacactaacttcccagcaggaattgagccacagagtaattatattccagaaacgccacctcctggatatatcagtgaagatggagaaacaagtgaccaacagttgaatcaaagtatggacacaggctctccagcagaactatctcctactactctttcccctgttaatcatagcttggatttacagccagttacttactcagaacctgcattttggtgttcgatagcatattatgaattaaatcagagggttggagaaaccttccatgcatcacagccctcactcactgtagatggctttacagacccatcaaattcagagaggttctgcttaggtttactctccaatgttaaccgaaatgccacggtagaaatgacaagaaggcatataggaagaggagtgcgcttatactacataggtggggaagtttttgctgagtgcctaagtgatagtgcaatctttgtgcagagccccaattgtaatcagagatatggctggcaccctgcaacagtgtgtaaaattccaccaggctgtaatctgaagatcttcaacaaccaggaatttgctgctcttctggctcagtctgttaatcagggttttgaagccgtctatcagctaactagaatgtgcaccataagaatgagttttgtgaaagggtggggagcagaataccgaaggcagacggtaacaagtactccttgctggattgaacttcatctgaatggacctctacagtggttggacaaagtattaactcagatgggatccccttcagtgcgttgctcaagcatgtcataaagcttcaccaatcaagtcccatgaaaagacttaatgtaacaactcttctgtcatagcattgtgtgtggtccctatggactgtttactatccaaaagttcaagagagaaaacagcacttgaggtctcatcaattaaagcaccttgtggaatctgtttcctatatttgaatattagatgggaaaattagtgtctagaaatactctcccattaaagaggaagagaagattttaaagacttaatgatgtcttattgggcataaaactgagtgtcccaaaggtttattaataacagtagtagttatgtgtacaggtaatgtatcatgatccagtatcacagtattgtgctgtttatatacatttttagtttgcatagatgaggtgtgtgtgtgcgctgcttcttgatctaggcaaacctttataaagttgcagtacctaatctgttattcccacttctctgttatttttgtgtgtcttttttaatatataatatatatcaagattttcaaattatttagaagcagattttcctgtagaaaaactaatttttctgccttttaccaaaaataaactcttgggggaagaaaagtggattaacttttgaaatccttgaccttaatgtgttcagtggggcttaaacagtcattctttttgtggtttttgtttttttgtttttttttttaactgctaaatcttattataaggaaaccataccgaaaacctttccaagcctcttttttccattcccatttttgtcctcataatcaaaacagcataacatgacatcatcaccagtaatagttgcattgatactgctggcaccagttaattctgggatacagtaagaattcatatggagaaagtccctttgtcttatgcccaaatttcaacaggaataattggcttgtataatctagcagtctgttgatttatccttccacctcataaaaaatgcataggtggcagtataattattttcagggatatgctagaattacttccacatatttatccctttttaaaaaagctaatctataaataccgtttttccaaaggtattttacaatatttcaacagcagaccttctgctcttcgagtagtttgatttggtttagtaaccagattgcattatgaaatgggccttttgtaaatgtaattgtttctgcaaaatacctagaaaagtgatgctgaggtaggatcagcagatatgggccatctgtttttaaagtatgttgtattcagtttataaattgattgttattctacacataattatgaattcagaattttaaaaattgggggaaaagccatttatttagcaagttttttagcttataagttacctgcagtctgagctgttcttaactgatcctggttttgtgattgacaatatttcatgctctgtagtgagaggagatttccgaaactctgttgctagttcattctgcagcaaataattattatgtctgatgttgactcattgcagtttaaacatttcttcttgtttgcatcttagtagaaatggaaaataaccactcctggtcgtcttttcataaattttcatatttttgaagctgtctttggtact

SEQ ID NO: 17561 - DNA, 2552 bp, Homo sapiens
taatcattagggaggtgatggctttctaattcatcgtcaagtctgtgattctactttatggatatccctgacatctacacccaaagcttttgtctgaattggttttctaatgtatattttaatcatttctttcccagaatatggcagcagcctgttagttgactgtcctgcctcctgtttgccctcttatctgtcctccacagagtaattatattccagaaacgccacctcctggatatatcagtgaagatggagaaacaagtgaccaacagttgaatcaaagtatggacacaggctctccagcagaactatctcctactactctttcccctgttaatcatagcttggatttacagccagttacttactcagaacctgcattttggtgttcgatagcatattatgaattaaatcagagggttggagaaaccttccatgcatcacagccctcactcactgtagatggctttacagacccatcaaattcagagaggttctgcttaggtttactctccaatgttaaccgaaatgccacggtagaaatgacaagaaggcatataggaagaggagtgcgcttatactacataggtggggaagtttttgctgagtgcctaagtgatagtgcaatctttgtgcagagccccaattgtaatcagagatatggctggcaccctgcaacagtgtgtaaaattccaccaggctgtaatctgaagatcttcaacaaccaggaatttgctgctcttctggctcagtctgttaatcagggttttgaagccgtctatcagctaactagaatgtgcaccataagaatgagttttgtgaaagggtggggagcagaataccgaaggcagacggtaacaagtactccttgctggattgaacttcatctgaatggacctctacagtggttggacaaagtattaactcagatgggatccccttcagtgcgttgctcaagcatgtcataaagcttcaccaatcaagtcccatgaaaagacttaatgtaacaactcttctgtcatagcattgtgtgtggtccctatggactgtttactatccaaaagttcaagagagaaaacagcacttgaggtctcatcaattaaagcaccttgtggaatctgtttcctatatttgaatattagatgggaaaattagtgtctagaaatactctcccattaaagaggaagagaagattttaaagacttaatgatgtcttattgggcataaaactgagtgtcccaaaggtttattaataacagtagtagttatgtgtacaggtaatgtatcatgatccagtatcacagtattgtgctgtttatatacatttttagtttgcatagatgaggtgtgtgtgtgcgctgcttcttgatctaggcaaacctttataaagttgcagtacctaatctgttattcccacttctctgttatttttgtgtgtcttttttaatatataatatatatcaagattttcaaattatttagaagcagattttcctgtagaaaaactaatttttctgccttttaccaaaaataaactcttgggggaagaaaagtggattaacttttgaaatccttgaccttaatgtgttcagtggggcttaaacagtcattctttttgtggtttttgtttttttgtttttttttttaactgctaaatcttattataaggaaaccataccgaaaacctttccaagcctcttttttccattcccatttttgtcctcataatcaaaacagcataacatgacatcatcaccagtaatagttgcattgatactgctggcaccagttaattctgggatacagtaagaattcatatggagaaagtccctttgtcttatgcccaaatttcaacaggaataattggcttgtataatctagcagtctgttgatttatccttccacctcataaaaaatgcataggtggcagtataattattttcagggatatgctagaattacttccacatatttatccctttttaaaaaagctaatctataaataccgtttttccaaaggtattttacaatatttcaacagcagaccttctgctcttcgagtagtttgatttggtttagtaaccagattgcattatgaaatgggccttttgtaaatgtaattgtttctgcaaaatacctagaaaagtgatgctgaggtaggatcagcagatatgggccatctgtttttaaagtatgttgtattcagtttataaattgattgttattctacacataattatgaattcagaattttaaaaattgggggaaaagccatttatttagcaagttttttagcttataagttacctgcagtctgagctgttcttaactgatcctggttttgtgattgacaatatttcatgctctgtagtgagaggagatttccgaaactctgttgctagttcattctgcagcaaataattattatgtctgatgttgactcattgcagtttaaacatttcttcttgtttgcatcttagtagaaatggaaaataaccactcctggtcgtcttttcataaattttcatatttttgaagctgtctttggtact

SEQ ID NO: 17562 - DNA, 1802 bp, Homo sapiens
tctgtaaatttttaatgcagtgtacctaaacatagccattttccctgcctgtggacttgaatttcataatcattttcctgtatcttttaaacagaaggcagacggtaacaagtactccttgctggattgaacttcatctgaatggacctctacagtggttggacaaagtattaactcagatgggatccccttcagtgcgttgctcaagcatgtcataaagcttcaccaatcaagtcccatgaaaagacttaatgtaacaactcttctgtcatagcattgtgtgtggtccctatggactgtttactatccaaaagttcaagagagaaaacagcacttgaggtctcatcaattaaagcaccttgtggaatctgtttcctatatttgaatattagatgggaaaattagtgtctagaaatactctcccattaaagaggaagagaagattttaaagacttaatgatgtcttattgggcataaaactgagtgtcccaaaggtttattaataacagtagtagttatgtgtacaggtaatgtatcatgatccagtatcacagtattgtgctgtttatatacatttttagtttgcatagatgaggtgtgtgtgtgcgctgcttcttgatctaggcaaacctttataaagttgcagtacctaatctgttattcccacttctctgttatttttgtgtgtcttttttaatatataatatatatcaagattttcaaattatttagaagcagattttcctgtagaaaaactaatttttctgccttttaccaaaaataaactcttgggggaagaaaagtggattaacttttgaaatccttgaccttaatgtgttcagtggggcttaaacagtcattctttttgtggtttttgtttttttgtttttttttttaactgctaaatcttattataaggaaaccataccgaaaacctttccaagcctcttttttccattcccatttttgtcctcataatcaaaacagcataacatgacatcatcaccagtaatagttgcattgatactgctggcaccagttaattctgggatacagtaagaattcatatggagaaagtccctttgtcttatgcccaaatttcaacaggaataattggcttgtataatctagcagtctgttgatttatccttccacctcataaaaaatgcataggtggcagtataattattttcagggatatgctagaattacttccacatatttatccctttttaaaaaagctaatctataaataccgtttttccaaaggtattttacaatatttcaacagcagaccttctgctcttcgagtagtttgatttggtttagtaaccagattgcattatgaaatgggccttttgtaaatgtaattgtttctgcaaaatacctagaaaagtgatgctgaggtaggatcagcagatatgggccatctgtttttaaagtatgttgtattcagtttataaattgattgttattctacacataattatgaattcagaattttaaaaattgggggaaaagccatttatttagcaagttttttagcttataagttacctgcagtctgagctgttcttaactgatcctggttttgtgattgacaatatttcatgctctgtagtgagaggagatttccgaaactctgttgctagttcattctgcagcaaataattattatgtctgatgttgactcattgcagtttaaacatttcttcttgtttgcatcttagtagaaatggaaaataaccactcctggtcgtcttttcataaattttcatatttttgaagctgtctttggtact

SEQ ID NO: 17563 - DNA, 1834 bp, Homo sapiens
  misc_feature (263)..(263): n is a, c, g, or t
  misc_feature (266)..(268): n is a, c, g, or t
agcggcgggaggcggggcgggccgtagacaaagggaggtggggaggcggtggccggcgactccccgcgccccgctcgccccccggcccttcccgcggtgctcggcctcgttcctttcctcctccgctccctccgtcttccatacccgccccgcgcggctttcggccggcgtgcctcgcgccctaacgggcggctggaggcgccaatcagcgggcggcagggtgccagccccggggctgcgccggcgaatcggcggggcccgcngcnnngggtggcaggcgggtctacccgcgcggccgcggcggcggagaagcagctcgccagccagcagcccgccagccgccgggaggttcgatacaagaggctgttttcctagcgtggcttgctgcctttggtaagaacatgtcgtccatcttgccattcacgccgccagttgtgaagagactgctgggatggaagaagtcagctggtgggtctggaggagcaggcggaggagagcagaatgggcaggaagaaaagtggtgtgagaaagcagtgaaaagtctggtgaagaagctaaagaaaacaggacgattagatgagcttgagaaagccatcaccactcaaaactgtaatactaaatgtgttaccataccaagcacttgctctgaaatttggggactgagtacaccaaatacgatagatcagtgggatacaacaggcctttacagcttctctgaacaaaccaggtctcttgatggtcgtctccaggtatcccatcgaaaaggattgccacatgttatatattgccgattatggcgctggcctgatcttcacagtcatcatgaactcaaggcaattgaaaactgcgaatatgcttttaatcttaaaaaggatgaagtatgtgtaaacccttaccactatcagagagttgagacaccagttttgcctccagtattagtgccccgacacaccgagatcctaacagaacttccgcctctggatgactatactcactccattccagaaaacactaacttcccagcaggaattgagccacagagtaattatattccagaaacgccacctcctggatatatcagtgaagatggagaaacaagtgaccaacagttgaatcaaagtatggacacaggctctccagcagaactatctcctactactctttcccctgttaatcatagcttggatttacagccagttacttactcagaacctgcattttggtgttcgatagcatattatgaattaaatcagagggttggagaaaccttccatgcatcacagccctcactcactgtagatggctttacagacccatcaaattcagagaggttctgcttaggtttactctccaatgttaaccgaaatgccacggtagaaatgacaagaaggcatataggaagaggagtgcgcttatactacataggtggggaagtttttgctgagtgcctaagtgatagtgcaatctttgtgcagagccccaattgtaatcagagatatggctggcaccctgcaacagtgtgtaaaattccaccaggctgtaatctgaagatcttcaacaaccaggaatttgctgctcttctggctcagtctgttaatcagggttttgaagccgtctatcagctaactagaatgtgcaccataagaatgagttttgtgaaagggtggggagcagaataccggtatgaaatacatatttggttcttaaatttccacagtgtaattatgtttcattgcattcttgcatattctggagttcatttgtatctattttcaatgaggttatagagtcagctgatctttatgtaaaataaagttggaggcctccaaattca

SEQ ID NO: 17564 - DNA, 2748 bp, Homo sapiens
  misc_feature (263)..(263): n is a, c, g, or t
  misc_feature (266)..(268): n is a, c, g, or t
agcggcgggaggcggggcgggccgtagacaaagggaggtggggaggcggtggccggcgactccccgcgccccgctcgccccccggcccttcccgcggtgctcggcctcgttcctttcctcctccgctccctccgtcttccatacccgccccgcgcggctttcggccggcgtgcctcgcgccctaacgggcggctggaggcgccaatcagcgggcggcagggtgccagccccggggctgcgccggcgaatcggcggggcccgcngcnnngggtggcaggcgggtctacccgcgcggccgcggcggcggagaagcagctcgccagccagcagcccgccagccgccgggaggttcgatacaagaggctgttttcctagcgtggcttgctgcctttggtaagaacatgtcgtccatcttgccattcacgccgccagttgtgaagagactgctgggatggaagaagtcagctggtgggtctggaggagcaggcggaggagagcagaatgggcaggaagaaaagtggtgtgagaaagcagtgaaaagtctggtgaagaagctaaagaaaacaggacgattagatgagcttgagaaagccatcaccactcaaaactgtaatactaaatgtgttaccataccaagcacttgctctgaaatttggggactgagtacaccaaatacgatagatcagtgggatacaacaggcctttacagcttctctgaacaaaccaggtctcttgatggtcgtctccaggtatcccatcgaaaaggattgccacatgttatatattgccgattatggcgctggcctgatcttcacagtcatcatgaactcaaggcaattgaaaactgcgaatatgcttttaatcttaaaaaggatgaagtatgtgtaaacccttaccactatcagagagttgagacaccagttttgcctccagtattagtgccccgacacaccgagatcctaacagaacttccgcctctggatgactatactcactccattccagaaaacactaacttcccagcaggaattgagccacagagtaattatattccagaaacgccacctcctggatatatcagtgaagatggagaaacaagtgaccaacagttgaatcaaagtatggacacaggctctccagcagaactatctcctactactctttcccctgttaatcatagcttggatttacagccagttacttactcagaacctgcattttggtgttcgatagcatattatgaattaaatcagagggttggagaaaccttccatgcatcacagccctcactcactgtagatggctttacagacccatcaaattcagagaggttctgcttaggtttactctccaatgttaaccgaaatgccacggtagaaatgacaagaaggcatataggaagaggagtgcgcttatactacataggtggggaagtttttgctgagtgcctaagtgatagtgcaatctttgtgcagagccccaattgtaatcagagatatggctggcaccctgcaacagtgtgtaaaattccaccaggctgtaatctgaagatcttcaacaaccaggaatttgctgctcttctggctcagtctgttaatcagggttttgaagccgtctatcagctaactagaatgtgcaccataagaatgagttttgtgaaagggtggggagcagaataccgaaggcagacggtaacaagtactccttgctggattgaacttcatctgaatggacctctacagtggttggacaaagtattaactcagatgggatccccttcagtgcgttgctcaagcatgtcataaagcttcaccaatcaagtcccatgaaaagacttaatgtaacaactcttctgtcatagcattgtgtgtggtccctatggactgtttactatccaaaagttcaagagagaaaacagcacttgaggtctcatcaattaaagcaccttgtggaatctgtttcctatatttgaatattagatgggaaaattagtgtctagaaatactctcccattaaagaggaagagaagattttaaagacttaatgatgtcttattgggcataaaactgagtgtcccaaaggtttattaataacagtagtagttatgtgtacaggtaatgtatcatgatccagtatcacagtattgtgctgtttatatacatttttagtttgcatagatgaggtgtgtgtgtgcgctgcttcttgatctaggcaaacctttataaagttgcagtaccctaaaaaaaaaaaaaaaaaaaaaaaaaaaaaaaacaaaaaaaaactaaaacaacaaaacaaaaaaaaaaaagaagggggggggcgcgaaaaaaaatttcccccggggggggcccccagatttagccagcaccccccaggttttttgtgtaaaaaaggggggcccaaaaaggaggcgggtaaaaaaaaagggagggggcggggaaaccccggcggcgacgggggacacacccgaagggggactggggaagacgccccatccttcgggcgggggcgtaattcggcgacccaaccccaaagaaattagagccggggaatcaaccctcgcggtcaaggcggaaccacaggaatagtcggggagagaattcgtccagaatatctagaatacgggggcatcaatataccgactgcgctaacaactacaacagacaacaaacacgcgctcgcgaacatacagcaacatataacacacaaacgctgaacaacacagaccaccacacatcaacaacagaa

SEQ ID NO: 17565 - DNA, 3132 bp, Homo sapiens
aagccaggctggtacggtcggagtcgtttggatccgcggcggcggagaagcagctcgccagccagcagcccgccagccgccgggagccctcccagccccctccatcccatcggaagaggaaggaacaaaaggtcccggaccccccggatctgacggggcgggacctggcgccaccttgcaggttcgatacaagaggctgttttcctagcgtggcttgctgcctttggtaagaacatgtcgtccatcttgccattcacgccgccagttgtgaagagactgctgggatggaagaagtcagctggtgggtctggaggagcaggcggaggagagcagaatgggcaggaagaaaagtggtgtgagaaagcagtgaaaagtctggtgaagaagctaaagaaaacaggacgattagatgagcttgagaaagccatcaccactcaaaactgtaatactaaatgtgttaccataccaaggtctcttgatggtcgtctccaggtatcccatcgaaaaggattgccacatgttatatattgccgattatggcgctggcctgatcttcacagtcatcatgaactcaaggcaattgaaaactgcgaatatgcttttaatcttaaaaaggatgaagtatgtgtaaacccttaccactatcagagagttgagacaccagttttgcctccagtattagtgccccgacacaccgagatcctaacagaacttccgcctctggatgactatactcactccattccagaaaacactaacttcccagcaggaattgagccacagagtaattatattccagaaacgccacctcctggatatatcagtgaagatggagaaacaagtgaccaacagttgaatcaaagtatggacacaggctctccagcagaactatctcctactactctttcccctgttaatcatagcttggatttacagccagttacttactcagaacctgcattttggtgttcgatagcatattatgaattaaatcagagggttggagaaaccttccatgcatcacagccctcactcactgtagatggctttacagacccatcaaattcagagaggttctgcttaggtttactctccaatgttaaccgaaatgccacggtagaaatgacaagaaggcatataggaagaggagtgcgcttatactacataggtggggaagtttttgctgagtgcctaagtgatagtgcaatctttgtgcagagccccaattgtaatcagagatatggctggcaccctgcaacagtgtgtaaaattccaccaggctgtaatctgaagatcttcaacaaccaggaatttgctgctcttctggctcagtctgttaatcagggttttgaagccgtctatcagctaactagaatgtgcaccataagaatgagttttgtgaaagggtggggagcagaataccgaaggcagacggtaacaagtactccttgctggattgaacttcatctgaatggacctctacagtggttggacaaagtattaactcagatgggatccccttcagtgcgttgctcaagcatgtcataaagcttcaccaatcaagtcccatgaaaagacttaatgtaacaactcttctgtcatagcattgtgtgtggtccctatggactgtttactatccaaaagttcaagagagaaaacagcacttgaggtctcatcaattaaagcaccttgtggaatctgtttcctatatttgaatattagatgggaaaattagtgtctagaaatactctcccattaaagaggaagagaagattttaaagacttaatgatgtcttattgggcataaaactgagtgtcccaaaggtttattaataacagtagtagttatgtgtacaggtaatgtatcatgatccagtatcacagtattgtgctgtttatatacatttttagtttgcatagatgaggtgtgtgtgtgcgctgcttcttgatctaggcaaacctttataaagttgcagtacctaatctgttattcccacttctctgttatttttgtgtgtcttttttaatatataatatatatcaagattttcaaattatttagaagcagattttcctgtagaaaaactaatttttctgccttttaccaaaaataaactcttgggggaagaaaagtggattaacttttgaaatccttgaccttaatgtgttcagtggggcttaaacagtcattctttttgtggtttttgtttttttgtttttttttttaactgctaaatcttattataaggaaaccataccgaaaacctttccaagcctcttttttccattcccatttttgtcctcataatcaaaacagcataacatgacatcatcaccagtaatagttgcattgatactgctggcaccagttaattctgggatacagtaagaattcatatggagaaagtccctttgtcttatgcccaaatttcaacaggaataattggcttgtataatctagcagtctgttgatttatccttccacctcataaaaaatgcataggtggcagtataattattttcagggatatgctagaattacttccacatatttatccctttttaaaaaagctaatctataaataccgtttttccaaaggtattttacaatatttcaacagcagaccttctgctcttcgagtagtttgatttggtttagtaaccagattgcattatgaaatgggccttttgtaaatgtaattgtttctgcaaaatacctagaaaagtgatgctgaggtaggatcagcagatatgggccatctgtttttaaagtatgttgtattcagtttataaattgattgttattctacacataattatgaattcagaattttaaaaattgggggaaaagccatttatttagcaagttttttagcttataagttacctgcagtctgagctgttcttaactgatcctggttttgtgattgacaatatttcatgctctgtagtgagaggagatttccgaaactctgttgctagttcattctgcagcaaataattattatgtctgatgttgactcattgcagtttaaacatttcttcttgtttgcatcttagtagaaatggaaaataaccactcctggtcgtcttttcataaattttcatatttttgaagctgtctttggtact

SEQ ID NO: 17566 - DNA, 746 bp, Homo sapiens
aagccaggctggtacggtcggagtcgtttggatccgcggcggcggagaagcagctcgccagccagcagcccgccagccgccgggagccctcccagccccctccatcccatcggaagaggaaggaacaaaaggtcccggaccccccggatctgacggggcgggacctggcgccaccttgcaggttcgatacaagaggctgttttcctagcgtggcttgctgcctttggtaagaacatgtcgtccatcttgccattcacgccgccagttgtgaagagactgctgggatggaagaagtcagctggtgggtctggaggagcaggcggaggagagcagaatgggcaggaagaaaagtggtgtgagaaagcagtgaaaagtctggtgaagaagctaaagaaaacaggacgattagatgagcttgagaaagccatcaccactcaaaactgtaatagctgtaatctgaagatcttcaacaaccaggaatttgctgctcttctggctcagtctgttaatcagggttttgaagccgtctatcagctaactagaatgtgcaccataagaatgagttttgtgaaagggtggggagcagaataccggtatgaaatacatatttggttcttaaatttccacagtgtaattatgtttcattgcattcttgcatattctggagttcatttgtatctattttcaatgaggttatagagtcagctgatctttatgtaaaataaagttggaggcctccaaattca

SEQ ID NO: 17567 - DNA, 317 bp, Homo sapiens
cccttccatgctcacacctctccgtgcccacatcggggaaaggatccccactttaaaggctcgtgtgattagattgggctcacctggatagtccagaagaattttcccatctcaaccttgatcacatctgcaaagtcccttttgccatggaaagtaacatattcatgggttccagggattaggagatggccctattttgtcatattttgctggaggcggggaggatattattctgcctaccataaacatatgtacacacaaatagtaacaataagtgtaaatttatgtttgtatatgtataaacaattactataata

SEQ ID NO: 17568 - DNA, 396 bp, Homo sapiens
tccagcatatgattgaccttggacactgttccatgtgcacttgaggagaacgtgacttcggctcttgccaggtggagtgttctagagatgtcagttggtgtccagtgatgtcaagtcatttgtatctactgattttctttctaatttttctatccattattgagagtggggtaggattttggtgtccaattattgtttttttgttgtttttgttttgttttgttttgtttttttgaggtggagtctcactttgtcacccaggctggagtgcagtggtatgatcacagctcactgcagcccccacctcccaaggctgaggtgagaggatgacttgagcccagtaggcagagattgcagtgcattccagcctgggctacacagcaagaccctgacaaa

SEQ ID NO: 17569 - DNA, 403 bp, Homo sapiens
ctcctgggatggaaggtgtccttgtgctagtcatgaacccaacagaaagcaagtgccattttctcttctcttcccctctttatctctgagatcttaacttggctgcttcttttcagaagacagtgatgcactgtattcaagtgatagccccagcagtaacattgatgcagagaaaatggaatactttttacaagagaccagaagacacatgaagctagaaaaaggagcccagaaaactgccacattttgcccatatagaaaagcatatcccgaccgggcacagtggctcacgcctgtaatcccaggactttggaagcccaagatgggtggatcacaaggtcaggagttcgagaccagcctggccaatatggtgataccctatctctactaaaaatgaaaaaat

SEQ ID NO: 17570 - DNA, 333 bp, Homo sapiens
gtagctctaaacaaaaaggtgttgaaatggtagtattttctagagatcattgacctaagacatgttccatttcactttatttgaaaatcctgtcctggtgtgcatgttgcacacatttcccacctacttcctttaggacctcaccagcctgttgacaaagtctctggaaacaacaaccctttaaatttttagggcccaataagagtttttaaaggctggacctgaggctcattcctgtaatcccagcactttgggatgctgaggagggaggatcacttgaagccaggagagaccagcctgggtaacatattgagaccctgtctctaccaaaaa

SEQ ID NO: 17571 - DNA, 425 bp, Homo sapiens
ggtgccagatgacatcctgaggccattcatgggaagcctagatgtggcaaagctgcagggacagagagcagatgagaagctgctggaggcccagtcggggtgtggttgactgcagtggggatgggagagttttggggtgctagaaaggcccagtactatgatgtggtggcttcatagcttgccacagttgtcagaactcagttgagtctttaaaattgtgaatattattgcttgtaagttatgtattaagtcttttaaaaatagatgcaacacatacacacatgcacttacttttcctattaaaaaagctaattgggctgggattctgtgagaaattgtcaggcttgtcaggaggtaagagtggacgttaggtggaaagtaagtgactccattttgatcatgctaagtttgaagttacatcatgt

SEQ ID NO: 17572 - DNA, 397 bp, Homo sapiens
gtggtgaacacaatggattatggagctgtaaccggagctgggcccaaccctgagcaaatggtgcagccagcgaagtgtgtctttgatgccctctcctttctgtgggctccacctgcaccctgatctgggctccctcacaggcatctccatgaacttcaaagctggaactccacccacagctgagctgcacccagacagagatgcgggcagagctttctaaggaacccaaattagcagctcatggacgcagcgttaatttgctcttgctgctggctgactttgaacttagtatctcagttttctctctgtgtcaccggctttgaacttcaatgctttggtgcctgcattctctttataacccactgtgccccgggacctcagagggccccacgaaccc

SEQ ID NO: 17573 - DNA, 371 bp, Homo sapiens
acggcttcaacggaactttctgtgtaggttttgggcgggagatgaccgccttggcaggccagaccgctcataacgccatggcttgggttttccttccccagatctgcctccgctttcacagtcctccagatttttccaagagcagcagaaaatgaataaatccctggtgagtgtttctgttcatgtatttattctctactctgatttacaatacaccttaggaggagattaagggttcaaagtttaaaatgggaaagtagaaatagatacaagatttggtcagacagaacagtagccatcagcaccaagcctttttatcatattcatatgcgcagatagcgtgatccttaaaaagttccgttgaagtcaga

SEQ ID NO: 17574 - DNA, 801 bp, Homo sapiens
gtgttcgcgcatgcgcgccgcggccgcagtgccctcgcttcctgtgcgtccccaggtcaccgctcgccctagttcccaggctttggcctccggtgggcgagaatcgcggagcctgcggggctgggcgccgaagagccgggccggcacccaagcgggcgcggggctgtgcgggccaggcggaggctcaagcggggatccccgagcacgacccccggagccgacggcgctggggcccaaggggccggccgggcggtgacgacggcggaggcgaaggggcggcgggacccgggcccggcccgtgtgcgtcctcgacggcccggccccggctccgcaggacggtgagccccagggagacggatctgggctccgggagggacgccccgtctggatttgtcccgtaggcccggcccgggcccctctggagcagaacggccttggtgaggtggacaggaagggacctcgcgagcagacgcgcgcccgcgacagcaatcccgccccggcctgtcgggagcggtggggcagaggctgcggagccccaggaggatctgcctccgctttcacagtcctccagatttttccaagagcagcagaaaatgaataaatccctgatggagtctcactctgttgcccaggctggagtgcagtggcgctatccctgattcaagcgattctcctgccttagcctcccgagtagctgcgattacaggcacctgccaccacacccagctcatttttgtatttttttagtagagacggggtttcagaagcacttgggccaagctggtctcgaactcctgacct

SEQ ID NO: 17575 - DNA, 4524 bp, Homo sapiens
gtgttcgcgcatgcgcgccgcggccgcagtgccctcgcttcctgtgcgtccccaggtcaccgctcgccctagttcccaggctttggcctccggtgggcgagaatcgcggagcctgcggggctgggcgccgaagagccgggccggcacccaagcgggcgcggggctgtgcgggccaggcggaggctcaagcggggatccccgagcacgacccccggagccgacggcgctggggcccaaggggccggccgggcggtgacgacggcggaggcgaaggggcggcgggacccgggcccggcccgtgtgcgtcctcgacggcccggccccggctccgcaggacggtgagccccagggagacggatctgggctccgggagggacgccccgtctggatttgtcccgtaggcccggcccgggcccctctggagcagaacggccttggtgaggtggacaggaagggacctcgcgagcagacgcgcgcccgcgacagcaatcccgccccggcctgtcgggagcggtggggcagaggctgcggagccccaggaggatctgcctccgctttcacagtcctccagatttttccaagagcagcagaaaatgaataaatccctggggccagtgtcattcaaggacgtggctgtggacttcacccaggaggaatggcagcagctggatcctgagcagaagataacttacagggatgtgatgctggagaactacagcaatctagtttctgtggggtatcacattatcaaaccggatgttatcagcaagttggagcaaggagaagagccatggatagtagaaggagaattcctacttcagagctatccagatgaagtctggcaaactgatgacctaatagagagaatccaggaagaggaaaataaaccttcaaggcaaactgtgttcattgagaccctgattgaagagagaggtaatgttcctggtaaaacttttgatgtagaaacgaaccctgttccttcaagaaaaatagcctataaaaatagcctctgtgactcatgtgaaaagtgtttaacgtctgtttcagaatatattagtagtgatggaagctatgcaagaatgaaagctgatgaatgtagtggatgtgggaaatcactcctccatattaagcttgagaaaactcatccaggagatcaagcttatgaatttaatcaaaatggggaaccttatactctaaatgaagaaagtctttatcagaaaattcgtattttggagaaaccttttgaatatattgaatgccagaaagccttccaaaaggacactgtttttgttaatcacatggaagaaaagccctataagtggaatggatctgaaatagcctttctccagatgtcggacctcactgtacatcagacatctcatatggaaatgaagccctatgaatgcagtgaatgtgggaaatccttctgtaaaaagtcaaaatttattatacatcagaggactcacacaggagagaaaccttacgaatgtaatcagtgtgggaaatccttctgccagaagggaacccttactgtgcatcagagaacacacacaggggagaagccctatgaatgtaatgaatgtgggaagaacttttaccagaagttacacctcattcagcatcagagaactcactcaggagagaagccctatgaatgtagttattgtggaaaatccttttgccagaagacacacctcacacaacatcagagaacacattcaggagagagaccttatgtttgtcatgactgtgggaaaaccttctcgcagaagtcagcacttaatgaccatcagaaaattcacacaggtgtgaaactctacaagtgtagtgaatgtgggaaatgcttctgccgcaagtctactctcacgacccacctgaggacccacacaggagagaaaccgtatgaatgtaatgagtgtggaaaattcttctctcggttgtcatatctcactgtacattatagaactcattcaggagagaaaccctatgagtgtactgaatgtggaaaaaaattctaccacaaatcagcattcaacagccatcagagaattcataggagaggcaatatgaatgtaatagatgtgggaaggcttctctgaagtcagacctcattttatatcagagaaccctttcagtatagtgaatcagaaactcctgcctgaagtcaaacaccttgtacatcagagagttcacacaggttagtgtggacatccccttgtgtgttggactcataatctgaagactcacagaatggaaaccatgattataacaagaccacatggtataacaatactagactatagacaagtaaaaatttataaatattaagaatgtatatacatgtcaccatggattggaactgttttgcatatcagggaaatcatagccaaggggaaatctatcagtataaggaatgtggaagacataatcctttggaaactgttaatactaaaagatatgtttctgatacaatagcaaacttgaaaaaaaaaaaagaaatagaagattcctgctgtgaataaacatacttcttgtgtaaatagaaactgtaaagtcatcaggatagctagttaagtcggtaaccttaaactcatgtaagcagttcccaaagaacataggacttatgtttggggagagggttgtttttattacagtacattacaggaattgtatgttcacttcgaatcatgtttgaaaaaacgttgtatccttattttgtaattcatatagtaagagtattctaaacagcactacattaatatcatttgataggtataaagtatactttttcttgcactcttctctaggatttaatgcattgatcattcttaatgaacaatatcagctctaaaggaccaatgcttttataatgttttcaactgtatctgagtcagccagagagataaatatccatgtataaaatagatagaaaactttgcttggtaatttaaaattaataatgccagttttccaagagtgagaaaatcattgcactctatacagttttaagatatacttaaaatattcccatttgtatctatttttttttctactgttttttatttggacacttacataacagtgcagagcacaatgctgtgtaacataggaattcactgtgttttcatttgatgtcgtactggttttaaaccttgtgctctactccttcctgttaatgaattaagaacacattctaacaagggtctgtggcagacattgccgagtgactttctaacataggaattcactgtgttttcatttgatgtcgtactggttttaaaccttgtgctctactccttcctgttaatgaattaagaacacattctaacaagggtctgtggcagacattgccgagtgactttcttagtcactcccttactctgctggcggagtttggttatccatttatcctcaaaaggaagtgagataaatcctgattagttttaaccagtgacactccccttctcgttgccagcagttgatttacagtggtcacagggcccaattctagacataaaacaaaggatatacctgacagactacttctggaaaaggttttctcaaaggcccaaggattcaagcaaagggaagtggaatcttgtggtgaacagtaccttgtctggatgtggtgcctggtaaccatctttcagcaatggattatagtttaatcatggcctgagcagaaatactgaaagaccctgagacctggatgatgtctttgagccaccaaaccaagcagccttgtagccactcctcctttggactgtttcttttgtgagagactaaacttatttttaagccagttgatttaggatgctctattactaataactgaagacattctaattggtacagactgaaacctttataggagttatgcagttcagaagtggactttaggtaagtcatttattttaagctgttgatatagagatttattttctgtaaattttgacgtaaatagtttgagcattagaaatcaacttgaaacaataaaatgtatgcttccttgaactgtcatatcgttgacctgcaaaattcacctttggaacgtgacacaatgttaggcatacctccttttttctaatacatggaatacattttgttggaggtaatttatgtgattcatataccactgctacagtgttagctgacaacatatagtatgaggtaaggatctaattctgtttcctctcacatgattacttgatagctaagcatctgattggtttactgctttaccactgagctgaaatgccgtgttttccatttattaaaatcacacatggctcctgtttttgtcactcagcactttttctccatattcttcaagacgattgtgagtatggtacgtaacaggaattacatctggtaagttgtatagttttgtgtaggaactctatattcatagcatatttgtggaaatgatacctatggaggtttctcacactggtgtgtcattatacattaattgtacaatatgcattttcagtaaaatatttgaaaactgtaaaaaaaaaaaaa

SEQ ID NO: 17576 - DNA, 5112 bp, Homo sapiens
gtgttcgcgcatgcgcgccgcggccgcagtgccctcgcttcctgtgcgtccccaggtcaccgctcgccctagttcccaggctttggcctccggtgggcgagaatcgcggagcctgcggggctgggcgccgaagagccgggccggcacccaagcgggcgcggggctgtgcgggccaggcggaggctcaagcggggatccccgagcacgacccccggagccgacggcgctggggcccaaggggccggccgggcggtgacgacggcggaggcgaaggggcggcgggacccgggcccggcccgtgtgcgtcctcgacggcccggccccggctccgcaggacggtgagccccagggagacggatctgggctccgggagggacgccccgtctggatttgtcccgtaggcccggcccgggcccctctggagcagaacggccttggtgaggtggacaggaagggacctcgcgagcagacgcgcgcccgcgacagcaatcccgccccggcctgtcgggagcggtggggcagaggctgcggagccccaggaggatctgcctccgctttcacagtcctccagatttttccaagagcagcagaaaatgaataaatccctggggccagtgtcattcaaggacgtggctgtggacttcacccaggaggaatggcagcagctggatcctgagcagaagataacttacagggatgtgatgctggagaactacagcaatctagtttctgtggggtatcacattatcaaaccggatgttatcagcaagttggagcaaggagaagagccatggatagtagaaggagaattcctacttcagagctatccagatgaagtctggcaaactgatgacctaatagagagaatccaggaagaggaaaataaaccttcaaggcaaactgtgttcattgagaccctgattgaagagagaggtaatgttcctggtaaaacttttgatgtagaaacgaaccctgttccttcaagaaaaatagcctataaaaatagcctctgtgactcatgtgaaaagtgtttaacgtctgtttcagaatatattagtagtgatggaagctatgcaagaatgaaagctgatgaatgtagtggatgtgggaaatcactcctccatattaagcttgagaaaactcatccaggagatcaagcttatgaatttaatcaaaatggggaaccttatactctaaatgaagaaagtctttatcagaaaattcgtattttggagaaaccttttgaatatattgaatgccagaaagccttccaaaaggacactgtttttgttaatcacatggaagaaaagccctataagtggaatggatctgaaatagcctttctccagatgtcggacctcactgtacatcagacatctcatatggaaatgaagccctatgaatgcagtgaatgtgggaaatccttctgtaaaaagtcaaaatttattatacatcagaggactcacacaggagagaaaccttacgaatgtaatcagtgtgggaaatccttctgccagaagggaacccttactgtgcatcagagaacacacacaggggagaagccctatgaatgtaatgaatgtgggaagaacttttaccagaagttacacctcattcagcatcagagaactcactcaggagagaagccctatgaatgtagttattgtggaaaatccttttgccagaagacacacctcacacaacatcagagaacacattcaggagagagaccttatgtttgtcatgactgtgggaaaaccttctcgcagaagtcagcacttaatgaccatcagaaaattcacacaggtgtgaaactctacaagtgtagtgaatgtgggaaatgcttctgccgcaagtctactctcacgacccacctgaggacccacacaggagagaaaccgtatgaatgtaatgagtgtggaaaattcttctctcggttgtcatatctcactgtacattatagaactcattcaggagagaaaccctatgaatgtaatgaatgtggaaaaaccttctacctgaattcagccctcatgagacatcagagagtgcacacaggagagaaaccttacgaatgtaatgaatgtggaaagttattctcccagttgtcatacctcactatccatcatagaactcattcaggagtaaaaccctatgaatgtagtgaatgtgggaaaaccttctaccagaactcagccctttgtagacatcggagaatacacaaaggagagaagccctatgaatgctatatatgtggaaaattcttctctcagatgtcatacctcactatacatcatagaattcattcaggagagaagccctatgaatgtagtgaatgtgggaaaaccttctgccagaattcagcccttaatcgacatcagagaacacacacaggagagaaagcctacgaatgttatgaatgtgggaagtgcttctctcagatgtcctatctcactatacatcatcgaattcattcaggagagaaaccctttgaatgtaatgagtgtggaaaagccttctctcggatgtcatacctcactgtacattatagaactcattcaggagagaaaccctatgagtgtactgaatgtggaaaaaaattctaccacaaatcagcattcaacagccatcagagaattcataggagaggcaatatgaatgtaatagatgtgggaaggcttctctgaagtcagacctcattttatatcagagaaccctttcagtatagtgaatcagaaactcctgcctgaagtcaaacaccttgtacatcagagagttcacacaggttagtgtggacatccccttgtgtgttggactcataatctgaagactcacagaatggaaaccatgattataacaagaccacatggtataacaatactagactatagacaagtaaaaatttataaatattaagaatgtatatacatgtcaccatggattggaactgttttgcatatcagggaaatcatagccaaggggaaatctatcagtataaggaatgtggaagacataatcctttggaaactgttaatactaaaagatatgtttctgatacaatagcaaacttgaaaaaaaaaaaagaaatagaagattcctgctgtgaataaacatacttcttgtgtaaatagaaactgtaaagtcatcaggatagctagttaagtcggtaaccttaaactcatgtaagcagttcccaaagaacataggacttatgtttggggagagggttgtttttattacagtacattacaggaattgtatgttcacttcgaatcatgtttgaaaaaacgttgtatccttattttgtaattcatatagtaagagtattctaaacagcactacattaatatcatttgataggtataaagtatactttttcttgcactcttctctaggatttaatgcattgatcattcttaatgaacaatatcagctctaaaggaccaatgcttttataatgttttcaactgtatctgagtcagccagagagataaatatccatgtataaaatagatagaaaactttgcttggtaatttaaaattaataatgccagttttccaagagtgagaaaatcattgcactctatacagttttaagatatacttaaaatattcccatttgtatctatttttttttctactgttttttatttggacacttacataacagtgcagagcacaatgctgtgtaacataggaattcactgtgttttcatttgatgtcgtactggttttaaaccttgtgctctactccttcctgttaatgaattaagaacacattctaacaagggtctgtggcagacattgccgagtgactttctaacataggaattcactgtgttttcatttgatgtcgtactggttttaaaccttgtgctctactccttcctgttaatgaattaagaacacattctaacaagggtctgtggcagacattgccgagtgactttcttagtcactcccttactctgctggcggagtttggttatccatttatcctcaaaaggaagtgagataaatcctgattagttttaaccagtgacactccccttctcgttgccagcagttgatttacagtggtcacagggcccaattctagacataaaacaaaggatatacctgacagactacttctggaaaaggttttctcaaaggcccaaggattcaagcaaagggaagtggaatcttgtggtgaacagtaccttgtctggatgtggtgcctggtaaccatctttcagcaatggattatagtttaatcatggcctgagcagaaatactgaaagaccctgagacctggatgatgtctttgagccaccaaaccaagcagccttgtagccactcctcctttggactgtttcttttgtgagagactaaacttatttttaagccagttgatttaggatgctctattactaataactgaagacattctaattggtacagactgaaacctttataggagttatgcagttcagaagtggactttaggtaagtcatttattttaagctgttgatatagagatttattttctgtaaattttgacgtaaatagtttgagcattagaaatcaacttgaaacaataaaatgtatgcttccttgaactgtcatatcgttgacctgcaaaattcacctttggaacgtgacacaatgttaggcatacctccttttttctaatacatggaatacattttgttggaggtaatttatgtgattcatataccactgctacagtgttagctgacaacatatagtatgaggtaaggatctaattctgtttcctctcacatgattacttgatagctaagcatctgattggtttactgctttaccactgagctgaaatgccgtgttttccatttattaaaatcacacatggctcctgtttttgtcactcagcactttttctccatattcttcaagacgattgtgagtatggtacgtaacaggaattacatctggtaagttgtatagttttgtgtaggaactctatattcatagcatatttgtggaaatgatacctatggaggtttctcacactggtgtgtcattatacattaattgtacaatatgcattttcagtaaaatatttgaaaactgtaaaaaaaaaaaaa

SEQ ID NO: 17577 - DNA, 4067 bp, Homo sapiens
  misc_feature (33)..(33): n is a, c, g, or t
ttagaggatcgtcacactgggttcgagtccaanaatgaaagctgatgaatgtagtggatgtgggaaatcactcctccatattaagcttgagaaaactcatccaggagatcaagcttatgaatttaatcaaaatggggaaccttatactctaaatgaagaaagtctttatcagaaaattcgtattttggagaaaccttttgaatatattgaatgccagaaagccttccaaaaggacactgtttttgttaatcacatggaagaaaagccctataagtggaatggatctgaaatagcctttctccagatgtcggacctcactgtacatcagacatctcatatggaaatgaagccctatgaatgcagtgaatgtgggaaatccttctgtaaaaagtcaaaatttattatacatcagaggactcacacaggagagaaaccttacgaatgtaatcagtgtgggaaatccttctgccagaagggaacccttactgtgcatcagagaacacacacaggggagaagccctatgaatgtaatgaatgtgggaagaacttttaccagaagttacacctcattcagcatcagagaactcactcaggagagaagccctatgaatgtagttattgtggaaaatccttttgccagaagacacacctcacacaacatcagagaacacattcaggagagagaccttatgtttgtcatgactgtgggaaaaccttctcgcagaagtcagcacttaatgaccatcagaaaattcacacaggtgtgaaactctacaagtgtagtgaatgtgggaaatgcttctgccgcaagtctactctcacgacccacctgaggacccacacaggagagaaaccgtatgaatgtaatgagtgtggaaaattcttctctcggttgtcatatctcactgtacattatagaactcattcaggagagaaaccctatgaatgtaatgaatgtggaaaaaccttctacctgaattcagccctcatgagacatcagagagtgcacacaggagagaaaccttacgaatgtaatgaatgtggaaagttattctcccagttgtcatacctcactatccatcatagaactcattcaggagtaaaaccctatgaatgtagtgaatgtgggaaaaccttctaccagaactcagccctttgtagacatcggagaatacacaaaggagagaagccctatgaatgctatatatgtggaaaattcttctctcagatgtcatacctcactatacatcatagaattcattcaggagagaagccctatgaatgtagtgaatgtgggaaaaccttctgccagaattcagcccttaatcgacatcagagaacacacacaggagagaaagcctacgaatgttatgaatgtgggaagtgcttctctcagatgtcctatctcactatacatcatcgaattcattcaggagagaaaccctttgaatgtaatgagtgtggaaaagccttctctcggatgtcatacctcactgtacattatagaactcattcaggagagaaaccctatgagtgtactgaatgtggaaaaaaattctaccacaaatcagcattcaacagccatcagagaattcataggagaggcaatatgaatgtaatagatgtgggaaggcttctctgaagtcagacctcattttatatcagagaaccctttcagtatagtgaatcagaaactcctgcctgaagtcaaacaccttgtacatcagagagttcacacaggttagtgtggacatccccttgtgtgttggactcataatctgaagactcacagaatggaaaccatgattataacaagaccacatggtataacaatactagactatagacaagtaaaaatttataaatattaagaatgtatatacatgtcaccatggattggaactgttttgcatatcagggaaatcatagccaaggggaaatctatcagtataaggaatgtggaagacataatcctttggaaactgttaatactaaaagatatgtttctgatacaatagcaaacttgaaaaaaaaaaaagaaatagaagattcctgctgtgaataaacatacttcttgtgtaaatagaaactgtaaagtcatcaggatagctagttaagtcggtaaccttaaactcatgtaagcagttcccaaagaacataggacttatgtttggggagagggttgtttttattacagtacattacaggaattgtatgttcacttcgaatcatgtttgaaaaaacgttgtatccttattttgtaattcatatagtaagagtattctaaacagcactacattaatatcatttgataggtataaagtatactttttcttgcactcttctctaggatttaatgcattgatcattcttaatgaacaatatcagctctaaaggaccaatgcttttataatgttttcaactgtatctgagtcagccagagagataaatatccatgtataaaatagatagaaaactttgcttggtaatttaaaattaataatgccagttttccaagagtgagaaaatcattgcactctatacagttttaagatatacttaaaatattcccatttgtatctatttttttttctactgttttttatttggacacttacataacagtgcagagcacaatgctgtgtaacataggaattcactgtgttttcatttgatgtcgtactggttttaaaccttgtgctctactccttcctgttaatgaattaagaacacattctaacaagggtctgtggcagacattgccgagtgactttctaacataggaattcactgtgttttcatttgatgtcgtactggttttaaaccttgtgctctactccttcctgttaatgaattaagaacacattctaacaagggtctgtggcagacattgccgagtgactttcttagtcactcccttactctgctggcggagtttggttatccatttatcctcaaaaggaagtgagataaatcctgattagttttaaccagtgacactccccttctcgttgccagcagttgatttacagtggtcacagggcccaattctagacataaaacaaaggatatacctgacagactacttctggaaaaggttttctcaaaggcccaaggattcaagcaaagggaagtggaatcttgtggtgaacagtaccttgtctggatgtggtgcctggtaaccatctttcagcaatggattatagtttaatcatggcctgagcagaaatactgaaagaccctgagacctggatgatgtctttgagccaccaaaccaagcagccttgtagccactcctcctttggactgtttcttttgtgagagactaaacttatttttaagccagttgatttaggatgctctattactaataactgaagacattctaattggtacagactgaaacctttataggagttatgcagttcagaagtggactttaggtaagtcatttattttaagctgttgatatagagatttattttctgtaaattttgacgtaaatagtttgagcattagaaatcaacttgaaacaataaaatgtatgcttccttgaactgtcatatcgttgacctgcaaaattcacctttggaacgtgacacaatgttaggcatacctccttttttctaatacatggaatacattttgttggaggtaatttatgtgattcatataccactgctacagtgttagctgacaacatatagtatgaggtaaggatctaattctgtttcctctcacatgattacttgatagctaagcatctgattggtttactgctttaccactgagctgaaatgccgtgttttccatttattaaaatcacacatggctcctgtttttgtcactcagcactttttctccatattcttcaagacgattgtgagtatggtacgtaacaggaattacatctggtaagttgtatagttttgtgtaggaactctatattcatagcatatttgtggaaatgatacctatggaggtttctcacactggtgtgtcattatacattaattgtacaatatgcattttcagtaaaatatttgaaaactgtaaaaaaaaaaaaa

SEQ ID NO: 17578 - DNA, 1705 bp, Homo sapiens
gtgttcgcgcatgcgcgccgcggccgcagtgccctcgcttcctgtgcgtccccaggtcaccgctcgccctagttcccaggctttggcctccggtgggcgagaatcgcggagcctgcggggctgggcgccgaagagccgggccggcacccaagcgggcgcggggctgtgcgggccaggcggaggctcaagcggggatccccgagcacgacccccggagccgacggcgctggggcccaaggggccggccgggcggtgacgacggcggaggcgaaggggcggcgggacccgggcccggcccgtgtgcgtcctcgacggcccggccccggctccgcaggacggtgagccccagggagacggatctgggctccgggagggacgccccgtctggatttgtcccgtaggcccggcccgggcccctctggagcagaacggccttggtgaggtggacaggaagggacctcgcgagcagacgcgcgcccgcgacagcaatcccgccccggcctgtcgggagcggtggggcagaggctgcggagccccaggaggatctgcctccgctttcacagtcctccagatttttccaagagcagcagaaaatgaataaatccctggggccagtgtcattcaaggacgtggctgtggacttcacccaggaggaatggcagcagctggatcctgagcagaagataacttacagggatgtgatgctggagaactacagcaatctagtttctgtggggtatcacattatcaaaccggatgttatcagcaagttggagcaaggagaagagccatggatagtagaaggagaattcctacttcagagctatccaggtgtgttagtggaggcagtgaggagatcggtaacttgggagtgtttttcccagggattttttaatggtcccgaacctttagaagtgactagaaatagttgcttatatgctctatgaacctgaatctcactcccaaagacttcttccttccccgtaagaacttatgtttatggagcttttctgtgcttgccactcccaagaatcgaattccagtcacttctgttgttctcttaaactttgggtctttgcttgctcttctagcattttcagaaaccattatcatggattttttaggtgttataagtctgacatttaaaaataacttatgtgattcttgtgttcttcgtgtaacttctggttttttttttttaatctttaccgtgcagtgcctgagactgtttctggaccctgttctactttgtacttttctttctttgaggttagactccaaagttcccatcctgtgcctaagccagtggatcctgctacttgtcatgtgcacctgtgcttcattggacagtgctgctcattcctgagacccagccctcctgaaatttggtgactgcagtacctgggtctccctctttaaccaaatgctcgttttcatcttgtttcttattttctgttctgttcccaatgccttgaatgataccctgtcatggcaggtgcttagtaagtatcatatacgcaaatgaagtctggtttatgcttccaccacctccagaaatgtctttaaagggtctgtttctacctactgtgatttcctcgcattatgagtttctcaaagggtgcctccagtgccaagtctttaggctttgttttttattttatgttgctcgcacccaggatgacatctctaccaccattgagcctgg

SEQ ID NO: 17579 - DNA, 415 bp, Homo sapiens
ccccgtgccatccgaaggccagtcccagcgtgacggtgttggcatggcttgtcaggacttacacagcaagagtggtttcctcatgacctcgctatttttacacagagaatttcgtaactccccataatgctgctaaagctgaacaccatgcctgtcataaacatgtggatacattcacaaggaatttcaaatgctaatctaactgacacgtggatgagctactctttgatctgcctttttttccccgcttcaacaaaatgctttgttttggtttagacagctgatattgtagcaagctaggaactctggggccagtaatttgctgcttgattctgataatggctttctctccaaagtcagctgatcctgtaagcagtaacttcaagggaccacagtcagattttcaataaactcc

SEQ ID NO: 17580 - DNA, 313 bp, Homo sapiens
gtgaggaaaatggaatttactgcgtgaaaagggaaaagaaaaaataactctcagcaaagcaagagagagtcctgttaggtttcctgcctcacaggttgaatcccagttcacagcacaggaacaggaggggccaggctcctctccactcccctcccccgcaaaacggtgcaaacttcctgaactctaccccctcctcctagtgtacaggtgggcattattcagaaagaatcaattgggaaagggcgggtttcatttgcgaccagcagtctggtttttcagccttcagactgttttaggcttgaaggcagggttt

SEQ ID NO: 17581 - DNA, 356 bp, Homo sapiens
gttatatatacgtataaatgtgtggtggatgcgactatataatgaagattgtactccctgagttataaagcagatagaattgttgacagtgtttaaattgttaaaggcttccctctcaaatacgtgttttattgaatctacatgtgttacttctccaccgtaagtccttttaggcctccagactcctgtagattcctccattctctgtagagtcccgactcccatcctgtttaatatgctctttacataaattgtaaacaccaattgtattcatttgtttattcagcagatacttatgagcactgttcagggaagtgggcttgctgctaggagcgagactgacaaagtctctttcc

SEQ ID NO: 17582 - DNA, 830 bp, Homo sapiens
gtggaccctttgaacgcatcgcccgaaaaccgcaacaaccagggcactgtaaattggtctgttgatgacattgtcaaaggcataaatagcagcaatgtggaaaatcagctccaagctactcaagctgccaggaaactactttccagagaaaaacagccccccatagacaacataatccgggctggtttgattccgaaatttgtgtccttcttgggcagaactgattgtagtcccattcagtttgaatctgcttgggcactcactaacattgcttctgggacatcagaacaaaccaaggctgtggtagatggaggtgccatcccagcattcatttctctgttggcatctccccatgctcacatcagtgaacaagctgtctgggctctaggaaacattgcaggtgatggctcagtgttccgagacttggttattaagtacggtgcagttgacccactgttggctctccttgcagttcctgatatgtcatctttagcatgtggctacttacgtaatcttacctggacactttctaatctttgccgcaacaagaatcctgcacccccgatagatgctgttgagcaaattcttcctaccttagttcggctcctgcatcatgatgatccagaagtgttagcagatacctgctgggctatttcctaccttactgatggtccaaatgaacgaattggcatggtgggtgaaaacaggaattgtgccccaacttgtgaagcttctaggagcttctgaattgccaatgtgactcctgccctaagagccttagggaatattgtcactggtacagatgaacagactcaggttgtgattgatgc

SEQ ID NO: 17583 - DNA, 494 bp, Homo sapiens
gccgtcatagcccccctttgtgcccccgtcgtaccgccacacatccctcgagcgggacactagaagttcgttctgaatggaacagccggaaggacagcacccctgggtccacagcaccttcaacggcgagccccagagcctgtcttcatcagtcaggagacatccgaggcatctgaacaggggagaggcaccatcagatgtggatttagaaaagctctggtaatcgtttgctccaataatgatggatggagtgtggaggttctaaaagcagaacactcgcagtaggataacaggagccgtatcactgcccgcatgctttagccagcggccaactaaagaggactaaagtattttgcccagaattatcaccagctcaacctacttggaattgcaggactcccagcactggttcagctccgtgcctctcagagtatgcctgcctttcattatgtgtgaaattcaatggaataaaagtggctgcaagcatagcaaag

SEQ ID NO: 17584 - DNA, 391 bp, Homo sapiens
gccgtcatagcccccctttgtgcccccgtcgtaccgccacacatccctcgagcgggacactagaagttcgttctgaatggaacagccggaaggacagcacccctgggtccacagcaccttcaacggcgagccccagagcctgtcttcatcagtcagttctaaaagcagaacactcgcagtaggataacaggagccgtatcactgcccgcatgctttagccagcggccaactaaagaggactaaagtattttgcccagaattatcaccagctcaacctacttggaattgcaggactcccagcactggttcagctccgtgcctctcagagtatgcctgcctttcattatgtgtgaaattcaatggaataaaagtggctgcaagcatagcaaag

SEQ ID NO: 17585 - DNA, 237 bp, Homo sapiens
ctctggtaatcgtttgctccaataatgatggatggagtgtggagggtaagcatctggaaggtgggagcccagctgggaggtctgattcagtagaaacactacaaggggcagaaggagagcactgtcagcctgagtggaaaggagacgaggaggtgtggtctgtgccttatgcagccaagggatgacaaatgtccgcagctggaacaaaccaccagcacaggcctcgggccgctggcc

SEQ ID NO: 17586 - DNA, 446 bp, Homo sapiens
aacaggcaggagatgaatgttgcaatgaatggaacagccggaaggacagcacccctgggtccacagcaccttcaacggcgagccccagagcctgtcttcatcagtcaggagacatccgaggcatctgaacaggggagaggcaccatcagatgtggatttagaaaagctctggtaatcgtttgctccaataatgatggatggagtgtggaggttctaaaagcagaacactcgcagtaggataacaggagccgtatcactgcccgcatgctttagccagcggccaactaaagaggactaaagtattttgcccagaattatcaccagctcaacctacttggaattgcaggactcccagcactggttcagctccgtgcctctcagagtatgcctgcctttcattatgtgtgaaattcaatggaataaaagtggctgcaagcatagcaaag

SEQ ID NO: 17587 - DNA, 353 bp, Homo sapiens
ttttttttttagtattactatgttcttacgtgaaatgatggtgagaaatagagggtaatgtttttatttctgttttggctaaagatatttacaaggcaaccctatagttaacttcgtatttttgttttaagtttacaggtctgggacataggagggtctggcaaatgctgacctggagtaaatgcatttgctagcactaacccaattgtcatgcctggttctccacggctgatcaagcttgccaacgagcacaggagtgcccgtctcagcaatccgcctccctgttcaagggacaccactgtctgccacctccctgccttcctttacactctcagagtgtagcatcttagagt

SEQ ID NO: 17588 - DNA, 2065 bp, Homo sapiens
tttcaagacggagtgttgctgttgtcgcccgggctggagtgctgtggtgcgatcttggctaattgcaacctccgcctcccagattcaagcgattgtcctgcctcagcctcccgagtagctgagattacaggcacgcaccaccgtgcctggctaatttttgtgtttttagtagaaacaggatttcaccatgttggccaggctggtctcaaactcctgaccttgtgatccacctgcctcggcctcccaaagtgctgggtttacaggcgtgaaccactgcacccggcctgaatcatggttttttgaaaccattggcatctgaacctgtagctctctctggtagtgttgtgtggttttaaatgtcatgtgagctgagttactgacctcaacctactgccagatgaaggtgtgatcctgtgataccaatcttgagggtcccttctagttttagcagtcagtgacttctcttgtttatttttgtttgaaaaagtaaaaggctctctttttggctatagagttgcatcttgaaatttttgacaaattacatagagctgaagaaggatacaagttttgatatcttaaaatcacagggttgaagcttgaaaggacagtattggcattgcagctaagtgggagtgtgaggaagcgccttctctagggcaggtaattgcatctgttaatgtggtccttgggcccctgagttgctgccttccaatcagaattcccttagcattagccagtgacgcctgaattaatctcaggtaggacttctaacttttttccaaaattatttttgtgcagaggtttatctagatttttcttctaaatgtcctcctccccacttgttttattattactgtttttttctctctttaattttttttttttttttatagagacatggtctcactatgttgcctgggctgatctcagactcctgggctcaagtgatcctcctgcctcagcttcccaaagtgctgggattataggcgtgagccattgcgcctggctctgttactgtttttctaacctgagttacttaggatcatattttcattcttttttaaaaagatgggagttttctgaacttttccttaactaaaaagtggaatgcatcttaatattttcctttttttacttgtgtttctccccagggagggaaaaacatatttattgtgacagaatttagcatattttaggccacattaaaatactgataaatgtattaatcagtgaaaataggttatagtgaaaaatatataccatttgattaataaaaatgttattggaaaaatgcaagaactgctgtaagaattgctaacattgtgttggaaaataaatatactaagctaagaaacaatgggaaactgtcatatgtagggccaacagcctttttttttttaaacccttccaatttattaatatctagtctaataaaccctgatttataggacctctgcaccttttttgactttttattcatccattcttaatattctacactatgacaaaatccttaaaactccattattgatgaaatgggaacagacttttgtttttgtatgttggtgttctctgagtggtgaaggcccagggagaatgttttgtttggtggtcacttagcatttgaaaacatccacttccttgtgacttagctgggtatcttttaacatctggaagccacgtccctgattgaaatctctggagacaacttacctttcaccaacttgtctgccaaattgcaccatggaccaagattgcagtggctgcatcaagtctaggcctgccctgaagtctggatttgtaagtcccccatttcaaatggggcagaaggcagaggagcagaggagccactgtgcctttcgctgtcctggagccagttggccttctggttttggtgaaccctgcttttataagaggactccctggcatcttccagtttcccgctacttgttttatgtattattttatgtctgtgtttgtcctggagtgctgtaactcctttcactgtctgctgtaagttcaacttcttcaataaaagaaatgtttcaaattgaaagaaaaatgg

SEQ ID NO: 17589 - DNA, 1830 bp, Homo sapiens
acagtattggcattgcagctaagtgggagcgtgaaccactgcacccggcctgaatcatggttttttgaaaccattggcatctgaacctgtagctctctctggtagtgttgtgtggttttaaatgtcatgtgagctgagttactgacctcaacctactgccagatgaaggtgtgatcctgtgataccaatcttgagggtcccttctagttttagcagtcagtgacttctcttgtttatttttgtttgaaaaagtaaaaggctctctttttggctatagagttgcatcttgaaatttttgacaaattacatagagctgaagaaggatacaagttttgatatcttaaaatcacagggttgaagcttgaaaggacagtattggcattgcagctaagtgggagtgtgaggaagcgccttctctagggcaggtaattgcatctgttaatgtggtccttgggcccctgagttgctgccttccaatcagaattcccttagcattagccagtgacgcctgaattaatctcaggtaggacttctaacttttttccaaaattatttttgtgcagaggtttatctagatttttcttctaaatgtcctcctccccacttgttttattattactgtttttttctctctttaattttttttttttttttatagagacatggtctcactatgttgcctgggctgatctcagactcctgggctcaagtgatcctcctgcctcagcttcccaaagtgctgggattataggcgtgagccattgcgcctggctctgttactgtttttctaacctgagttacttaggatcatattttcattcttttttaaaaagatgggagttttctgaacttttccttaactaaaaagtggaatgcatcttaatattttcctttttttacttgtgtttctccccagggagggaaaaacatatttattgtgacagaatttagcatattttaggccacattaaaatactgataaatgtattaatcagtgaaaataggttatagtgaaaaatatataccatttgattaataaaaatgttattggaaaaatgcaagaactgctgtaagaattgctaacattgtgttggaaaataaatatactaagctaagaaacaatgggaaactgtcatatgtagggccaacagcctttttttttttaaacccttccaatttattaatatctagtctaataaaccctgatttataggacctctgcaccttttttgactttttattcatccattcttaatattctacactatgacaaaatccttaaaactccattattgatgaaatgggaacagacttttgtttttgtatgttggtgttctctgagtggtgaaggcccagggagaatgttttgtttggtggtcacttagcatttgaaaacatccacttccttgtgacttagctgggtatcttttaacatctggaagccacgtccctgattgaaatctctggagacaacttacctttcaccaacttgtctgccaaattgcaccatggaccaagattgcagtggctgcatcaagtctaggcctgccctgaagtctggatttgtaagtcccccatttcaaatggggcagaaggcagaggagcagaggagccactgtgcctttcgctgtcctggagccagttggccttctggttttggtgaaccctgcttttataagaggactccctggcatcttccagtttcccgctacttgttttatgtattattttatgtctgtgtttgtcctggagtgctgtaactcctttcactgtctgctgtaagttcaacttcttcaataaaagaaatgtttcaaattgaaagaaaaatgg

SEQ ID NO: 17590 - DNA, 255 bp, Homo sapiens
tttgggaggccgaagcgggaggatcgcttgaacctacaagttcgagaccaggctgggcaacatagtggaaccccctctgtacaaaaaaaaaataacaaaaattagctggtgtagtggcatgtgcctatagtcccaactactcgggaggctgaagcagcggaagggttgcttgagcctgggagatcaaggctacagtgagccatggtcataccactgcactccatccagagtgacacagtgagatcctctctcaga

SEQ ID NO: 17591 - DNA, 473 bp, Homo sapiens
atgttttttgaggattttgcatatttcttgttgccataatgctgtgctattttaccctgattttcagtgatacaatatgggtgacaatactggcccctccataaatctgaagagtaagaagtagtgaaaataaggcttaggatatgaaatggcgttgtcacttgaatcaaggccactttttgtcctacttgagcatctcaagttgggatgcatcttctgatggcacttccggaactggctgtggtttttttgggtgtaccgagagtgccagtgactgtgcttcttacaattcctggcatcttgagtaggtgaaacactgtatcagactgggtgatgggcacattgtcatttcaccaagttcctggaactgttagaattgcttgtgtatggggatcctatgttagttcccctggatacattgttttatcagtcggaattcttaaataaagacatacttcccttcatgtagtggt

SEQ ID NO: 17592 - DNA, 1619 bp, Homo sapiens
agctgacttacgtactttccccatcttcccaggcatcttgtacgtcgttacatttatcatattggaaggtaataaatgatcttgttttcctcttttcctgggctccttattaagagcagggaacctaatttatatcctcagggcagaacaggtattcagaaaagaataatgcaagaggaaaaaagtttaatataaactagggagatcgtaacattggctaatcacgagcaaatatttatagaagacccactgtgtgctaaatggctcctaatatatacttaagatattctcccagcttggaaattctgctcacttcttgctcttgcttgcttctctggtgggcttccatccaaatttggccatgacatcagatcatatggttaatattaacaaatattgtataaattgttttcatacttaatatccaacaggttgtcaatttacgtactactggtgccttatctgtttttactgtcccatacactgcccatctggaataagcttagtgtttaaaaaaaaaaaaagatctttgcatacacacagtaaatcctagattcagttttgtgataaacactggaatcctgaatgggacttttggtaggagataactgctgtttttaaaggtcataaaggtggtttaatccattggaaattaaaaaaaaaaacttaaaagaggatcaacattgacctatttaactggcccatcagtaagtagcaaaacaatactgtagttgttgaaatgaagatagttataagcctcaaaccgagcacagtcagaggtgggaggccaaaaaaacaaaaattgctcatgaaacagtagtacctatcagagcccatcaaaaagctaattaaattaatagaagtaaaagaatttgtcagtgatcattccagcacaacccagggaggattattttattataagaattagcaaacctaaagtaaaaatgggagttaccaagctggcataccttgatagaactagcccctaaaaactgtcctctgccacattcttgtcctttaagaaactttaaaatgtgaaatttggtacatacaggtaaattcacattcaggtaaattcttaattcacccattcaaaaaatatttagagtacctactgagtattagacactgaacgaggtactagactgatcaagacaggaaaaatccctttaaggagctgacattctactggaggaatcaataagcaagacttctactgagccagtcatgcaaagatccaggagaaaggcagcatgtgttcgttcggtaataaccatctcggcttgttagaatggcaaggccactgtacctggactagtggacaagagtaggatatgaaagagcatgggatcatgtagggcctttggagcaatggtaaggattctgagcataatcggaggctacagaggacttattatagtcatctgatacacatttttatgagtagaatcaagatctgaaaggtactactgtttcatgagcaatttttgtttttttggcctcccacctctgactgtgctcggtttgaggcttataactatcttcatttcaacaactacagtattgttttgctacttactgatgggccagttaaataggtcaatgttgatcctctttta

SEQ ID NO: 17593 - DNA, 326 bp, Homo sapiens
catcaaaaagctaattaaattaatagaagctatgatgaattaacagcccaaggtgctgtcagaaaggaagcctgcggttattttttttaaaagaatttgtcagtgatcattccagcacaacccagggaggattattttattataagaattagcaaacctaaagtaaaaatgggagttaccaagctggcataccttgatagaactagcccctaaaaactgtcctctgccacattcttgtcctttaagaaactttaaaatgtgaaatttggtacatacaggtaaattcacattcaggtaaattcttaattcacccattcaaaaaatat

SEQ ID NO: 17594 - DNA, 491 bp, Homo sapiens
gagaatccaggtttggcttagctaagtccctctggttcaaggcttctgtgaggttgcaatcaagatgtcacttaaggctgtgatctcatctgaaggctctaccagtggggatccattcacatggtaattggcttgcttgggtttctcatcacctaggtctttccataaaggctgctttatgacctgacagctattttcccaccaaacagaccaagagagctaaagagaaaacaagcaagtccaagatggaagccatggtctttttataatctcatcttggaagtgacattccattccttctgccatatgctattcattagaagcagattagtaagtctagcccatcctaaaggggaggaaattacatgagaatgtaataccagcaggtagggatcactggacattgaccacaatgatgtttttctttcttcttgctttcctattttctaacatgtcaattttggacatgtgttacttgtgtaaaaaggaaa

SEQ ID NO: 17595 - DNA, 377 bp, Homo sapiens
gccaactctcagctcaaaagtgcatgtttgtctctaccagtggactaaggaccagctcctaggatgggagcagtttcttactcatgtttataaagtgctatgcagaaaatagcagggctatgggaaagaaagagaccaggttagaaaagtcatttgaatcggatctgcatgaaaaaaggcactttagataagacctgatagcaaagggctgtaagaggagaaaagggcaaatcaaaggtaccgacagaacatattaagcatggcctaggctgagcaaagccaaatttaaacataattttgtatgttgaagcacattattttccaatatgttaatgtgtagccattctcacatacataataaagctaatggattattt

SEQ ID NO: 17596 - DNA, 1923 bp, Homo sapiens
tgtatttttagtagagatagagtttcaccatgttagccaggatggtctcgatctcctcaccttgtgatcctcccgcctcagcctcccaaagtgcttggattacaggcgtgagccactgcacccggcccaaaaagtattttaaaatgaaacatctgtagtttttaccccaacctgcgtccattgatcttgctggttgaatttcatgttaaaattgaataataagttagcaattaagtatatttttggggatcaaattattttgtctccaaacatcttaacaatcttgtgattcagtgaacaaaattaaaaacttacagaatctgataaatgcatccaaactagcacacgtctgtgtgtatctcctacttaatggaaaaaataaaacaagatattggataacatctactgtaaggattcacccccagatatactgaaggataatcaatcatttgattacataggtaaggggaggtatgtggttttgttgatacagtcattggggaaaaacttaccatttgctaccggctgtgtacccaacagtaaaagtagaagtctgggttttctctccctggtgaataaattatgtatgtttaaatctgttttgatcttaccctttttatgcagtaacgcacttggtagatgataatcacatgtatgaaatacctctactgtcaggagagaatactaagatttcaagcagtgttactgcacattaatgtaatgtcataacttcatgctagccttacatccatttctttctcactgacctacaacttacctagatgttgaggcaaacaacagggacaaagtactagagattaaaaaaagagagaagttaaaacacacatacacagaggctgctctgcaactttagttactttgcttatttttctcccacgttttgtaattttggtgaattgtaatatgtagtatgtaaggacatcattttgcagatgaggatacaaggccaaagatgtcttgctcaaagttatgaagctatttgatagcagaactgagagaactttgagtgatgaaaatgtgtgattatttttgtactctccccacaccacacacacacactctgtctctctctctctctcattctctctccctctctctctctctgtctctccactatgctccttgcttagttatagcaacagatctcatgatgcttgtattagagaattttcatgataaatttatggttatacgaataatccagtcatttgtagatatgcctctaatatgatattggttttctctctcatgcccatgtaatttgtaaagcaatgtttgacttttgtcacagatattttgctatgtctttaatttactggtttgtggcagtgaacaacaaaaagatttctacgatacttgttaaggcaggcaggatgattcttccccccattcccagcttttctgagattaatggataaaaattgtacatatttaagatatgaaatatgttttgatatgacatgagtaccacaataaggctaattattatatccatcacctcatgtggtaatcagtttggggtttttttggtggtgaaaacacttaagatttactctcagcaaatttcaagtatataatacagtattattaactgtagtccccatgctgtatattaggttcctggaacttatttatcttataactgaaagtttgtactctttgatcaacaactccccattttcctctccctgcagtcttgccaaccactcttctactctctgcctctctgagtttgcagcattattcacagtagccaagatatggaaacaacctaagtgttggtcagtggatgaatggatgaagaaaatgtgcaatacagacacatacacacaggaacacacacacaaacacacacacacacacacacacacacacacacacagaggaatattattcagtctt

SEQ ID NO: 17597 - DNA, 408 bp, Homo sapiens
taaagccctgccatggcagtgctgccagctcactctccttgggctcccttcccacctcccacatccccatgtccccatggactcctggtgccacggcacagctgcatgggggtgattcatgctggacacctgagacacaaggagaggaggcagggagctgccgaaagaggttcagttaaaaacttccaacaatgagggaagatgggatttcctcattttggccaggccggtcttgagctcctgacttcaagtattctgctcacctcggcctcagaaagtactggaattacaggcttgagccatcacgcccggcttcgctcctgcttttgccatgtgacgtgcctgctcccactttgcattctgccatgatgtctcaaaaataaaaataaaagtttaaaaaaattggaa

SEQ ID NO: 17598 - DNA, 313 bp, Homo sapiens
catccacccactgtggggtctctgagcccagggctgggtcatttctcctgggccgagtgtggcactaagcatgctgagtgctagcctgcacagaggccaggcccgggtgggccccaggacacagctgtcagtggctgtcttgccatggagtgagtggatgaatcagcagggctgggatcctctcccattttacagtaggaggctggggagaggagctggccagcccgtccacctctgcagcctggcatctgaggccctcatggcatccctgctggtctgccttcccctgcagcccttccaccctctgtggagc

SEQ ID NO: 17599 - DNA, 522 bp, Homo sapiens
ctgagtagctgggattacagacttgtgccaccatgcctggctaatttttgtatttttagtagagacggggtttcaccatgttggtcagactggtcttgaacttctgacctcgcagtctgccccctcggcctcccaaagtgctgggattataggtatgagccaccctgcctggccaagaacagtttttaactctaagaatatcagtgctgttgagaatataagccagatgcaaaagaatacatactgtatgattctatttgtatgaagttcaaaaagagacaggactgatctttgatgacagaaatcagaataatggttactttttgggcttgagagggtggtattgactgggaaagggcacgtgaaagcgttcttgggtttttaaaatgatccatgtcttaatctgagtggtgattactgggtgcatgtatgtgtaaaaattgttcaagctgaacacttgacatttgtgcactttactgtattttacctcaataaaaatgagtttaaaaaaaaaaaagaaca

SEQ ID NO: 17600 - DNA, 218 bp, Homo sapiens
cctggcctggcctgaggctggcatccagctgggcagagtgccaagccctgcatggaagccaagccaagcttcctgcccccagggcccgaggaagtgggtgtaggggtcaggggatggcccgttctgtgtctgttccccctgcccctgagagtgggtgcccagtgggcacagcccagcctcctgctccactgaccccacactgccagtgagatgaagtt

SEQ ID NO: 17601 - DNA, 209 bp, Homo sapiens
cttcttgccctctggtgatcaggtgaccaccaggtcccctcgtctgctggttgtttcgtgagttttcatcctttctgtttcaagtgtgcaatttccgaatggccacccgcatcatccctgcagcctgtggactctcaaaacccagtccctcctgctgggaagtaagggaccagctgttctgatggctcaaaaaccttcagccgtttgca

SEQ ID NO: 17602 - DNA, 949 bp, Homo sapiens
tatcacaaatttagtgacttaaagtaacataaattaattattttgcagttctggaggtcagaattccttagcattctttctggaggctgttggggagaactcactgccttgccttttccagcttctagaggccacctgccttctttggctcatggcctcttcctccgtcttcaaagccagcaacgtgacatttcagatctccctctctctgtctgtctcaccgcatcttcactaccctcttcctctcattctggcccttctgcatgtcttttataaagacctttgtgatttcactgggcccactcatataagccaggaaaatctctgtgtctcagatccttaatttaattacacctgcaaagtccgttttctcgtgtaaagtaacatattcacaggtttctggaattgggacgtggacatcttcgggggaccattactctgtctgtcatactccctgagtgtgtaagggccatctcttcagagcctaatgtgtcatcctacacagagcaggtgtttccttataaattaagttgaattaaattacccctatgaagccacataatcaataattcagctataataaacattgccgaataaattaacaaagggaggataatgactccttatgatgatggatagaaacactgaagaaaaccattttcagaggatttactgaatcttcctctccaaggagcttgtaatagaagggtaaacctctagtttcttgtccagcagaggaataggctcatgtcttttgttttattttatttttttggtgagtcagtatggttgggttaatcatattcacattagattccatgttgaagaacaactaatcaaagaagaaaatcatcaggaatcagggtgagattaacagaccaaggtcagaaacatggagttacaattttccaaaaaagcacgacagcccaaacggtaccggctcgatctt

SEQ ID NO: 17603 - DNA, 420 bp, Homo sapiens
agaaaaccattttcagaggatttactgaatcttcctctccaaggagcttgtaatagaagggtaaacctctagtttcttgtccagcagaggaataggctcatgtcttttgttttattttatttttttggtgagtcagtatggttgggttaatcatattcacattagattccatgttgaagaacaactaatcaaagaagaaaatcatcaggaatcagggtgagattaacagaccaaggtcagaaacatggagttacaattttccaaaaaagcacgaagtgagattaaaaccacagtaagtcttagtctgactgacaggctttatacaggccctcggtaagcagttgggagaacccatgcccaccactgctctgtacggtatctggctgctcagagctctctgattcacaaaagagatcatca

SEQ ID NO: 17604 - DNA, 694 bp, Homo sapiens
  misc_feature (637)..(637): n is a, c, g, or t
  misc_feature (675)..(675): n is a, c, g, or t
  misc_feature (682)..(682): n is a, c, g, or t
aagtttatagaaaatgcttgttttatagttggttgttattgagatgagagtccctcaaggaactccctatgctttagggagctttttgttttaaacctactggttagacttgtgggttttaatgttttcagctgtggttgtaagaaacacattttaaattgcacctagtatagacatacatgtaaaacaaacaaaatttttacgaagtagtacttgtattaagagtgatgtactctgctatcttctatttcatttttttaaagttgatattgctgccttaaattgattttttcaaccactaatgagtcaggacccactatttaaaaaatactggtgtgttctcttgctgttacgaattaacccaaaacttagtggtttaaagcaataaacttgtgtttatctcatgtaggttctgtgggtcaggaatctgggagtagcttacttaggtggttctgggtcagggtttttcatgaggttccgcgctctgctccagccaaacttctgcagaccatgtgcagccgaggcgaggaaacttctctccacctattggggctggaggcctgagtcacaagccccttgtttacataaagtgtttaaggtagcacaagtccttgagatgctcggggtagagatgganaaccactgcttcgtatccttctgccgcttctgcttganatctctngccttacccttg

SEQ ID NO: 17605 - DNA, 2163 bp, Homo sapiens
agtgatacttagcttacaagagaaattagattcatgtctgacaactgtagggagtttacaagctaaattccacaacatggcaatatgtgattaagggctgaaatgaaacattcaggcagtaaattcagtgggtcagagaataggggaagtgtgtgtaggtagaaatatcagggcagatggagcctgagagagtcttcttgtggcaagggactccacagggtccttttagagatgcttggggaaaacagtaagtagccttaagatcagagtggcccatttcacaaaacaatctgtgtgaaataacattgcctgatgagaacccatttaaaactgagttcccgttgccttgaagaatatgtcccacttagccttctcttagcttgcctttattttaattatttgaaggagtagaagaaaagacacttgttttccccaattttttttcttgatttttatggactttttacctgtttaaaactaaaacttttacaaactctgactgagggtgtggtgtttattttaagggtgaggcaatagagagcagggcactgtaaaaccactaaccagggatgtgcttctctctcaggccagctaggccttctttgctcctggtctctgactggtctcctgctcccagtgaccattcgcaggtcctttcctgtttggccagttgagagaacaggggctgggcatggtggctcacatctgtaatcccaatactttgagaggctgaggtgggaggatcactccagcccaggagttcaagaccagcctgggtaacacagtgagatttttatttattatttaattgttacaaaaaataaaaaagaatcaaccaggcctggtgatgcacctgtagtcccagctactcggagggctgaggtgggaggattatttgagtccaggaatgatcgtgccactgaactccagcctaggctacagagttagaccctgtctcaaaaaaagaaaaaagaaattggccaggcacagtggatcacacctataatcccagcactttgggaggccagggcagggggatcacttgagcccaggagtttgagaccagcctgagcaataatagcgaaaccctgtctctttaaaaataaaaataaatttaaaaagaacaggaagcttggtaatgtgctcttcttcactagtcagtagacctgctccactgatagggctttattcatccatttacctgtcatttattaattcctattatgtttcagggtctgtgctaattctgagcatttgaaaatgggccttcaggtaacaacttttggcctaatgggagcaaaagtcaaacaaacagatatttacaatgccttttggcaagagttaagagcaagttaggcactagtttctttggaagagaataaggagagtaatgtaacttagcctaaagggaggagggagcttcagggaagatttttctggaggaactactatttgacacttgaaatacaagtaggagttggccagagaaagaagagaaaggtgttccaggcaagagacacaacataaagaggcatgggagagcataatgacttcggagaacttgccaggacataaaggaagaaggtgtataggtgaggaaaaagggaagtgaagcgagattaatcacttcacttttaaaagcaatggtagttcccgccatgtgtgcacatgccctagctctaaaaaaaaaaatacatatttttaactcctttagcagccttttgaggtatggatttactggtgttttatgatctagaaagttaagatataccttcccacattttcattggtaaattctcaggactgggtgaagctatattacctcataccaaagtatcaactcctattccttatagttgtaacatctttacatttgtcaagttcaaagacattgtatatcagtgactgttttagcaggcatattcttgatctgttggtttgattgatagccagtcttagtagttgtattgctaacacttcataggtgattagatggatttgtaaaaagacatggttgctcctttgtatctcaagctctacttggatattaactcatttgaaatacttgcacaggcatatggtgtaagcctgtagtcccagttactctggaacgcaggagttcaggaccagcctgagcaacttagtaccattccatctctttta

SEQ ID NO: 17606 - DNA, 462 bp, Homo sapiens
cccagatgtgaatactgtaacttcggaaagaattcttaccccccactcttgtgaattatcaaactttctcatcattctccatctgttgctcaaaatgcaggtaaagaatagcagaaaaagagagaggaactctcgcaaacccatcctgctcctgctcactgggtcattagaaacaaaacagatctggtgaagggtctgctgtaaagcagcttgtcttgtgtctgcagattttcacggactgctccctcctgccagcagaggacctgtaacactgccccgattgaagtcagggaacaattcacagatcggaggaacatttctgaatgacgctcagatgacagagaaacgaagtttgcataatttcagcagtaatgcaagaaaagatgagtgtgcgtgttgtaagggagggagggatgcagaaagggttgaaatctgtaataaactgcctccaagaaaacagga

SEQ ID NO: 17607 - DNA, 306 bp, Homo sapiens
cccagatgtgaatactgtaacttcggaaagaattcttaccccccactcttgtgaattatcaaactttctcatcattctccatctgttgctcaaaatgcaggtaaagaatagcagaaaaagagagaggaactctcgcaaacccatcctgctcctgctcactgggtcattagaaacaaaacagatctggtgaagggtctgctgtaaagcagcttggtgagtcacggtctgagatccctgggatatgccagaaatagaacaagccaaaaaaaaaaagaaggaataaagttgagactcaaaacactgaaa

SEQ ID NO: 17608 - DNA, 1097 bp, Homo sapiens
gtttgaatgatcatgtggtactccaccaacaaccagtcattaacgatgtgtccaagattgctgaaatacttctcacaacttctgtctagcattgtggtcaaactacctgaattcatttttgagctctaccatttactactggaatgaccatggataagttacttaacatctgtaaattgggagtaataattacacctacatcatagagtttttgtgagaattaagagagttaatgtgttgcaaggtacatttattgggagcttacatgggaagcccccaataaattgtagtagtgttatttcggtaatttttcatttgtccccccgttgtctttgtgactgtatctcacagcaaacagaaagaagaggcaggggggtaaattgtggttttaaaggcttttctgatgtctactgatatgtacagcatgcatgataaatcatttgagttccaaatcttctagttacctagatcttgtaaaaacttataaactaatgtcctaaatcctaagtctttataatgtctagtatttgtacatcaaaagccctagttaggggactttaattacttttacttttctcatggattctgctgtcagtgggtcctaaatgagaataccttaaagcagtgattctcaaagtgtgggccacagaatgctggggtgggggtgatggtagtgaccgtgtcactgagacccttttagaggtgcacaagtttaaaactattttcataattacactaatttgatattctccttattcactgcgctgacatttatattaatggtgcaaaagcaatgatggataaaactgccatcacctctgcgtgaattaagatggtgagtgactccatttgggaggccgaggtgggtggattgcttgagtccaggagtaggggactagtctaggtaacatgatgaaaccctgtgtctacaaaaaatacaaaaaaattaaataggcatggtagtgcgtgtctgtagtcgcagctactcaggagactgaagtgggagaattgcctgaggcacggagtgtcgaggctgcagtgagccatgattgtgccattgtactccagccttggcaatggcgtgagaccctgtcttt

SEQ ID NO: 17609 - DNA, 486 bp, Homo sapiens
ttgggagcccaagatcacctgagcacaggagtttgaggccatcttgggcaacacagggaaacctcatgtcttaaaaacaaacaaacaaaaccgccaggtttagtagcacatgcctgtggtcccacccagctacttgggaggttgaggtgagaggacggcttggatccagaaggccatggctgcaataagccgtgactgcacgatggcactccagcctgaaccataccacagagagagactgtttcaagaaaaaaaaaaaaccaatttattactattactttgagccagatggaagaatagagggcctgggcagttgttaaaaaattctacctttaaaaaacaccataccattcaaattcattgacctctaactttgtaaagtgattggccttaagggtgctcaagttgagacaaataaattaggcagaatttaaactattgacagcaaatcatacaagctagtttaggagccattctgaaataagg

SEQ ID NO: 17610 - DNA, 510 bp, Homo sapiens
ggaccaccattcccgaaaacgaggagcctcatctaaccacctcgattagaccccacaattcctgggtttgagctgccacatggaccaggcgcccactagccgaggacaatgctcccttgttcgttgtttcagcgctatgtgggtgacacccacagctagaagaacccggagtgaggggaagaacacgctttgatttatatatgtgtatatatatatatacagttttagggaacccaagcacaggaatcaactgccgagcactcaagactgaagaaagaagaagagcaaatgataaaggaagggaacagagcacaaaagttcttgactcttgtggggagtagggtggagaggagtaaaagggacaggctagagcaactcctatttctacaaaaaaaataattatattaatattcagatcttatgtatatttagcatccctgcacttcaggatttaaatagcacaaattcacttatttctgcatcagatgaataatactactttgcatttct

SEQ ID NO: 17611 - DNA, 255 bp, Homo sapiens
tcaaatttcacatagatgacgtcatatggcatgtattcttttgtatctggtttatctctcttaacattcttaggttgttgagatgcatccctgttcttgaatgtagcactaggtctttcgttcaagtttcaatgtagccttccgttctgtaaatatgcaacaatttctttacccatccttttgttgataaacatttcatttgtttctacctatttactattacaaatgtgctgtcatgtcttgtacctgagttta

SEQ ID NO: 17612 - DNA, 446 bp, Homo sapiens
gcaagttacttcagttctctgcatactcatgccctcggctggaaaacggtgtaatagctgcccatggggtgttgtgcaggttacagagctcgactgcagagtgcctggatccctgccctgcaccgagcgaacgctcggagtgtccactaggatgagccgtttctgtctgatctggggcaagggcctgagccggacctctctgagcctcggtctcctctgcacgatagtgtggatacccctcagctcctcggtacgcgtggtgaagactaaataagatgatgcatggcagaacctggcacaaggggacatccagtagatggttgcttggcctggcatggtggctcacgcctgtaatcccagcactttggaaggccaaggcaggtagatcacatgaggtcaggagtttgagaccagcctggccaacatggtgaaaccccgtcgctact

SEQ ID NO: 17613 - DNA, 288 bp, Homo sapiens
gaataatgcttgtgtgttgttttcacagtattatctaaacatagaagggtaaaaatccaagtatcagccactgttttgctctatcacatttaatatctgtgcaccaacaatagtttgtaggattatggaatcattaaacatagatgcatattattccaaggcttattatggatgtttgtcatcactgactttccttcaatattaaaaaagtgctaaattttgattggattatgattataatttcttctataattgacagattctgtaatacaaatggtcatgtcttcg

SEQ ID NO: 17614 - DNA, 413 bp, Homo sapiens
cgattctccaaacatttatttttaaagttaatattaaatctcatctggtggaaaacctgacaggaactgaagcatatattttctagtctaaactctcattgttaaaatgaagacaacatgagacagttatagcgccgtaatcaagttatttgaaaaaaatgttttaaaaattaccactttttggtagtcaacatacacacatatgccaacagatggcattaaaaaatggcaagaacatgagacaattatagggtcataataaatttatttgaaaaaaatgtttaaaaaattaccactttttgatagtcagcatacacacatatgccaacagatgacattaaaatagctgtaaagtcaagaagcagggaggatgacaaagtgaaaaatagaagaaatcaaaggaagttaagtca

SEQ ID NO: 17615 - DNA, 478 bp, Homo sapiens
gcttcggaggtagaagaccccaagacaggcgggcgatgcgaactgcaagactttccgagctccgcaatcctgcggtccgcggtacccgcatgttgctatggcgacgggaggcagcggccgtctctctccatggcaacgggagggaaaagtttctggcgaacaggaatggggggtcatttcaagagggcgcagggcgctcagttccgccgacccacctccttgcttcggtgaaacagcaccagagatcatgtatctttctgctaagcataacaagaaagacagaaagctcaacgggaggattgaggctagacttaaagtagagatcccctcagaaactgtggagtgaggcccagggaacagattcggctgagaggcttcgagctgcctcactcagcgctggaagtctgtgagccatggtcagggaggccgggggaccagcgccctgcaggggcctatctcgggagtctcttgatctaca

SEQ ID NO: 17616 - DNA, 259 bp, Homo sapiens
acaaatgtgtgtaccttaatcatacccatatgtaaaactagagcggtggcatgaatcccaagaagtgggcggttgcccacagctgtacttctgtctcagatggataactgcaatcactaaccttttttgaagaatttgatatgatactgagaaaatagtgattaatcaaagccccttttaaaatggaagactttcatctataggcattaactttttatgatcagagaaaaaagcagtaaagaataggtgaaacatttat

SEQ ID NO: 17617 - DNA, 553 bp, Homo sapiens
tctcctgactcagcttgaattggtcatggaaggcttttctgagggagagaagtctacactgagatctaaaggcaagtgagttaacgagtatggggagacaaggtggcatagtcaggtgaagaaggcagtgccttgggccagacacgctggtttgaatcctagttctgccagtagtgtgtaattttaagcaagtttctcgaactctacgtccctcagttcttcatatctgtaaaattgggatgataacgtacataccatatagggttgtggtgaagatgaaatgttgctgttatcatcatcgttgttaaaatgtggcacttgccagtggcaggtacagcccgctgttgcggggagtctggagggaggagaggaagagagtatggtgtctgctctgctcatctcagcacttcctttcctgggaacttcccatgtcactgttgaaactttggatgtccaatatactgtattccctaaactaatttgtttcttgccctgtgaatgaagaagtgttctctttcactctggtggagtatgttcagtagctgtagtttca

SEQ ID NO: 17618 - DNA, 662 bp, Homo sapiens
atccttaattaaattaatctcccccccccgtttcaccatgttggtcagggtagtcttgaactcctgacctcatgctctgcccagcttggcttcccaaagtgctgtgattacaggcttaagccacagcgcccgacccaaagtgttcttttttccttgaaaagaagtacagattttttaaaaagctaatattgctgtgattcaactctcaagttacttgatgctatttcttcatttctattgtattcacatgtgaaagcatgtgatcagttgtcacggcatcaaagataggagagtttctttttttttaggtgggcattatttatgaccttttctttggaagagtaaggatattaaaatgtaacatgcatgatgaaaatctaagtggagatgatatttgtggttaattatgatattgagtggtgcatgaggtaggtgtttagagtaatattcttttgcattatagtaagaacatttaagttttgttaaaattaaaaaattagtagtacgttattttactatttgtacttttatgtaataaaatgcagtacatttttaaattttcagatgatgtgtgaacttgtttcattatacatttttaacatgttaatactattgtgcattcaatgaagcattattatgccactaactgaaacctatcccat

SEQ ID NO: 17619 - DNA, 734 bp, Homo sapiens
agcggttcaagcaattctcctgcctcggcctactgagtagctgagattacaggtgcacaccaccacgtccggctgacttttgtgtttttagtggggacggggtttcaccatgttggtcagggtagtcttgaactcctgacctcatgctctgcccagcttggcttcccaaagtgctgtgattacaggcttaagccacagcgcccgacccaaagtgttcttttttccttgaaaagaagtacagattttttaaaaagctaatattgctgtgattcaactctcaagttacttgatgctatttcttcatttctattgtattcacatgtgaaagcatgtgatcagttgtcacggcatcaaagataggagagtttctttttttttaggtgggcattatttatgaccttttctttggaagagtaaggatattaaaatgtaacatgcatgatgaaaatctaagtggagatgatatttgtggttaattatgatattgagtggtgcatgaggtaggtgtttagagtaatattcttttgcattatagtaagaacatttaagttttgttaaaattaaaaaattagtagtacgttattttactatttgtacttttatgtaataaaatgcagtacatttttaaattttcagatgatgtgtgaacttgtttcattatacatttttaacatgttaatactattgtgcattcaatgaagcattattatgccactaactgaaacctatcccat

SEQ ID NO: 17620 - DNA, 305 bp, Homo sapiens
  misc_feature (271)..(271): n is a, c, g, or t
cagtacgaataaattttaaaaatggattttaaaggtccaatgcaaattgcagaatgatgcataacacatgatgctacagtacttataaagtgtgaaaatatacttaaggttatttaacatcatggtttttatattggatactttctgaaaagataggagaaaaaggataggaccacaaagggtttatatgatatataggtatacctcagagatattgtgggtttggttcagtgagtcaaacaactttttggcttcctagtacatataaaangttatatttaccctatagtgtattgtgtgtgcaa

SEQ ID NO: 17621 - DNA, 468 bp, Homo sapiens
tgttactctcctgttaagttttcaagatatgaagtactttgttgaagagggcagggggtctgtccagattagttgacacgtagatcctcctttaaaatgtaaagtatgtgcagaataataaaagacatgaagggtataaaataaatgagatcaaagacaataggatttttggctatattttaagcataccctttcctctgctgatgtatgaccactgtctttatcttactgcaaattcacttcaaagtagtagtgatgtaataataaattaatgaggtaatagcagaatttttattacaactacttcatggcttttctggctaaaagctgtagttttcagtctttgggacatggttacttattcccatcagagaagactgtaagaaccaaagattgattctgcacattttttaaaaatctgccacagacatggcattaaatggagtatagaaatgatgcatactttgg

SEQ ID NO: 17622 - DNA, 1620 bp, Homo sapiens
gttgcttcaccaacaaagcccaagccaagaactgcagcgttgagggttgtccctcggagtggagtagcccaaggaatctcaggtccaccaagagcattggtaccatccgggccacgggtggatgcctttgttctggcacagttctccacttcccgattcctggctcagccagccaggcctccctctaatggcatttagtaaccaggaaacaaaacacatgccacctgagcaaaactgcctgcacttcatctctggaggttcgctgcacagaggccacctgccgcatcaccagtgaggaagctttgccaccatcctgcttggcagcttcacacttgacatctgaggattggtttttggctggaaaaagggtaccagggtttcctggcaaggacaggagagcagtgcagtgacacagatgagaagctgtgagtctccaggattcaaggaagccaccaggtgtgcaggctgggaagagacatctctttcagtttgaccctttatctcctgcacttttaaagaaacaccagagaaaaaatctacaaggcgtgtttccactgaagctgaacctctgcctttaggagtcccctatatttgagcaaggccacctgcttcccctggacttgagctggactccttgaagagtgggcttctggagagatgttaggaatatagcacatgctctctgggggccacagggtcattgggaaggtttgaaatgaagatgggatgtggctggaacagcctgtgagatggctccattggggacactcccctcatcttgtcatcacgatggatatgctggaagaggaggtgtcccagtgagccgcccgaagttcatagctttgccctcgccttggcaacagcggcaatgcctctatctctgggatgcatcttaaggagggctcctaacaaggccgatgatttagacagaacaagagactaagtaaggtccagctatcccgtggagccagtagtaggtgggagctcctgtccccgccagccctgctccagcccccgtgtccagctgggccagtggaagaactgggaaggaggaagcccctccctttcactgtggctaatgtttgctaggccagttatggtgaaccaatgatacagtgttttccctcttaacgttcccctcctggttttgccttttcagggttttctgggggattttgttgtagtagttgcttttcttcctctctcatttgggtttgaggattgtggtcgggggagccctggctttcaccaaaggagcccagtggtttctgtggaagaggcgcccactcccactttaatgagggtgaagattgtcaggtcactgtttgacatattcatgccccgtcccttccccccccacccccccgcccacccaccacgggtgtcgctttaaagagtcaattcttgtacagagaaggatttgctaggtttgcatttgggtgttagcatcacgacccacgagggccctgccaaaccgtgcgtcccatggggcaccttgactcttcaaaccaaaattccttaaaggggcacagccagccttgtccgcaacctcaggggcctgggattcctgtggcgcttcctgaattccaggttggcacagatgatgaggtctgagaccag

SEQ ID NO: 17623 - DNA, 332 bp, Homo sapiens
caaaggttacaaattcaggcacttcccctctctggagcctcagtcttctcacccgtaaaatatgcatgtgggatgtctgtacctcttagtgttgtgatgacccacttagaacagtgcctgacttcaagataaatgatggctgctgtgattataacaaaagaaactgtggtggagattcagggaaggcagaagaaggagtccagagtaggtatcaggaggtctgagttcaggaccagttcttctctaccacactgtgtggccctgggcagaatgttctgcctgtcccttggtttttgtttttggatgtattggccaagtaatacacaaattct

SEQ ID NO: 17624 - DNA, 1495 bp, Homo sapiens
gcggccgcgtcgacgtgacagccggtacggccccgggtttgggcaacctcgattacgggcggcctccagccccgccagcagcgccccgcgccgcccgcccgcgcccctgccgccccccggttccggccgcggaccccactctctgccgttccggctgcggctccgctgccggtagcgccgtcccccgggaccacccttcggctggcgccctcccatgctctcggccacccggagggcttgccagctcctcctcctccacagcctctttcccgtcccgaggatgggcaactcggcctcgaacatcgtcagcccccaggaggccttgccgggccggaaggaacagacccctgtagcggccaaacatcatgtcaatggcaacagaacagtcgaacctttcccagagggaacacagatggctgtatttggaatgggatgtttctggggagctgaaaggaaattctgggtcttgaaaggagtgtattcaactcaagttggttttgcaggaggctatacttcaaatcctacttataaagaagtctgctcagaaaaaactggccatgcagaagtcgtccgagtggtgtaccagccagaacacatgagttttgaggaactgctcaaggtcttctgggagaatcacgacccgacccaaggtatgcgccaggggaacgaccatggcactcagtaccgctcggccatctacccgacctctgccaagcaaatggaggcagccctgagctccaaagagaactaccaaaaggttctttcagagcacggcttcggccccatcactaccgacatccgggagggacagactttctactatgcggaagactaccaccagcagtacctgagcaagaaccccaatggctactgcggccttgggggcaccggcgtgtcctgcccagtgggtattaaaaaataattgctccccacatggtgggcctttgaggttccagtaaaaatgctttcaacaaattgggcaatgcttgtgtgattcacaatcgtggcatttaaagtgcacaaagtacaaaggaatttatacagattgggtttaccgaagtataatctataggaggcgcgatggcaagttgataaaatgtgacttatctcctaataagttatggtgggagtggagctgtgcggtttcctgtgtcttctggggtctgagtgaagatagcagggatgctgtgttcacccttcttggtagaagctaaggtgtgagctgggaggttgctggacaggatgggggaccccagaagtcctttatctgtgctctctgcccgccagtgccttacaatttgcaaacgtgtatagcctcagtgactcattcgctgaaatccttcgctttaccaaatctagacatacataagggactttctctcccttttcagccctctctgtgcagagaaaagatgtgagtccgcttgatgaattctaatgctttgcttagagctatgagaaatgtttgttttaataaaaacctacagtccaataa

SEQ ID NO: 17625 - DNA, 1527 bp, Homo sapiens
gcggccgcgtcgacgtgacagccggtacggccccgggtttgggcaacctcgattacgggcggcctccagccccgccagcagcgccccgcgccgcccgcccgcgcccctgccgccccccggttccggccgcggaccccactctctgccgttccggctgcggctccgctgccggtagcgccgtcccccgggaccacccttcggctggcgccctcccatgctctcggccacccggagggcttgccagctcctcctcctccacagcctctttcccgtcccgaggatgggcaactcggcctcgaacatcgtcagcccccaggaggccttgccgggccggaaggaacagacccctgtagcggccaaacatcatgtcaatggcaacagaacagtcgaacctttcccagagggaacacagatggctgtatttggaatgggatgtttctggggagctgaaaggaaattctgggtcttgaaaggagtgtattcaactcaagttggttttgcaggaggctatacttcaaatcctacttataaagaagtctgctcagaaaaaactggccatgcagaagtcgtccgagtggtgtaccagccagaacacatgagttttgaggaactgctcaaggtcttctgggagaatcacgacccgacccaaggtatgcgccaggggaacgaccatggcactcagtaccgctcggccatctacccgacctctgccaagcaaatggaggcagccctgagctccaaagagaactaccaaaaggttctttcagagcacggcttcggccccatcactaccgacatccgggagggacagactttctactatgcggaagactaccaccagcagtacctgagcaagaaccccaatggctactgcggccttgggggcaccggcgtgtcctgcccagtgggtattaaaaaataattgctccccacatggtgggcctttgaggttccagtaaaaatgctttcaacaaattgggcaatgcttgtgtgattcacaatcgtggcatttaaagtgcacaaagtacaaaggaatttatacagattgggtttaccgaagtataatctataggaggcgcgatggcaagttgataaaatgtgacttatctcctaataagttatggtgggagtggagctgtgcggtttcctgtgtcttctggggtctgagtgaagatagcagggatgctgtgttcacccttcttggtagaagctaaggtgtgagctgggaggttgctggacaggatgggggaccccagaagtcctttatctgtgctctctgcccgccagtgccttacaatttgcaaacgtgtatagcctcagtgactcattcgctgaaatccttcgctttaccaaatctagacatacataagggactttctctcccttttcagccctctctgtgcagagaaaagatgtgagtccgcttgatgaattctaatgctttgcttagagctatgagaaatgtttgttttaataaaaacctacagtccaataaaaaaaaaattattaaacagcacgcaagctaca

SEQ ID NO: 17626 - DNA, 287 bp, Homo sapiens
  misc_feature (8)..(8): n is a, c, g, or t
  misc_feature (13)..(13): n is a, c, g, or t
  misc_feature (66)..(66): n is a, c, g, or t
aggagagnaaagnaagagagaaaaaaaaaagaggagaggaagagaagagaaaagaaagaagaaaancccgttctttcagagcacggcttcggccccatcactaccgacatccgggagggacagactttctactatgcggaagactaccaccagcagtacctgagcaagaaccccaatggctactgcggccttgggggcaccggcgtgtcctgcccagtgggtattaaaaaataattgctccccacatggtgggcctttgaggttccagtaaaaatgctttcaacaaa

SEQ ID NO: 17627 - DNA, 264 bp, Homo sapiens
ataaaacaatcaatcataacatatcaaaagaaaagaaaaaagttgagttctttcagagcacggcttcggccccatcactaccgacatccgggagggacagactttctactatgcggaagactaccaccagcagtacctgagcaagaaccccaatggctactgcggccttgggggcaccggcgtgtcctgcccagtgggtattaaaaaataattgctccccacatggtgggcctttgaggttccagtaaaaatgctttcaacaaa

SEQ ID NO: 17628 - DNA, 266 bp, Homo sapiens
agtataaggagaatagaaaatttattatatttagtggatatgagactagttctttcagagcacggcttcggccccatcactaccgacatccgggagggacagactttctactatgcggaagactaccaccagcagtacctgagcaagaaccccaatggctactgcggccttgggggcaccggcgtgtcctgcccagtgggtattaaaaaataattgctccccacatggtgggcctttgaggttccagtaaaaatgctttcaacaaa

SEQ ID NO: 17629 - DNA, 262 bp, Homo sapiens
tacataattatacaatttaaccaacacaaataaatcattcctcagttctttcagagcacggcttcggccccatcactaccgacatccgggagggacagactttctactatgcggaagactaccaccagcagtacctgagcaagaaccccaatggctactgcggccttgggggcaccggcgtgtcctgcccagtgggtattaaaaaataattgctccccacatggtgggcctttgaggttccagtaaaaatgctttcaacaaa

SEQ ID NO: 17630 - DNA, 382 bp, Homo sapiens
aattcggcacaaggggagatgtgccagcttcctcttctgccatgattattattattttacattgtaggtacagccagtgtgatcagacaaagcaattcgagaactacaaaagaggaaaaaagatcagaagttcttaaatacataagggaatgcagcatttgataaagccaaacatcatgtcaatggcaacagaacagtcgaacctttcccagagggaacacagatggctgtatttggaatgggatgtttctggggagctgaaaggaaattctgggtcttgaaaggagtgtattcaactcaagttggttttgcaggaggctatacttcaaatcctacttataaagaagtctgctcaggtaggaagaatttgctttattgtatt

SEQ ID NO: 17631 - DNA, 1707 bp, Homo sapiens
agagtgagagagagaaagagggagagagagaggcagagggagagctgaggaaagaaaaaaaggcaagacttggcacagctcagtcaaatcagcttcttttgtctgctttctcggcttgagcttcaggaaagaaaaccgtcctggggtacagaaaaactcagaactttttggttttcaaacttagaaggctttttaagtctcttgggctatttgaaagtgttggtacatacaatgacgtttagtcaccagtattaagggaaataaaagcctttttcaaaacgaagcttccatagtgtccatgcatttgggaaatactatatttgattttttgcatgtatgattataccatgagagacaggattaatatagaagatggcaaggcaaatttctaattagagggaatattaattttctacaaaataaagtttgttcatcaatacaaacctgctttcaaatcaaatcagaaagacatccttcggaatgtgttcagaaccaattagtgacaacactgaagaccagaaaggcaagctgaagacaccagacttcgcttgaagggcaaacaagaaatccaaacatcatgtcaatggcaacagaacagtcgaacctttcccagagggaacacagatggctgtatttggaatgggatgtttctggggagctgaaaggaaattctgggtcttgaaaggagtgtattcaactcaagttggttttgcaggaggctatacttcaaatcctacttataaagaagtctgctcagaaaaaactggccatgcagaagtcgtccgagtggtgtaccagccagaacacatgagttttgaggaactgctcaaggtcttctgggagaatcacgacccgacccaaggtatgcgccaggggaacgaccatggcactcagtaccgctcggccatctacccgacctctgccaagcaaatggaggcagccctgagctccaaagagaactaccaaaaggttctttcagagcacggcttcggccccatcactaccgacatccgggagggacagactttctactatgcggaagactaccaccagcagtacctgagcaagaaccccaatggctactgcggccttgggggcaccggcgtgtcctgcccagtgggtattaaaaaataattgctccccacatggtgggcctttgaggttccagtaaaaatgctttcaacaaattgggcaatgcttgtgtgattcacaatcgtggcatttaaagtgcacaaagtacaaaggaatttatacagattgggtttaccgaagtataatctataggaggcgcgatggcaagttgataaaatgtgacttatctcctaataagttatggtgggagtggagctgtgcggtttcctgtgtcttctggggtctgagtgaagatagcagggatgctgtgttcacccttcttggtagaagctaaggtgtgagctgggaggttgctggacaggatgggggaccccagaagtcctttatctgtgctctctgcccgccagtgccttacaatttgcaaacgtgtatagcctcagtgactcattcgctgaaatccttcgctttaccaaatctagacatacataagggactttctctcccttttcagccctctctgtgcagagaaaagatgtgagtccgcttgatgaattctaatgctttgcttagagctatgagaaatgtttgttttaataaaaacctacagtccaataa

SEQ ID NO: 17632 - DNA, 1632 bp, Homo sapiens
agagtgagagagagaaagagggagagagagaggcagagggagagctgaggaaagaaaaaaaggcaagacttggcacagctcagtcaaatcagcttcttttgtctgctttctcggcttgagcttcaggaaagaaaaccgtcctggggtacagaaaaactcagaactttttggttttcaaacttagaaggctttttaagtctcttgggctatttgaaagtgttggtacatacaatgacgtttagtcaccagtattaagggaaataaaagcctttttcaaaacgaagcttccatagtgtccatgcatttgggaaatactatatttgattttttgcatgtatgattataccatgagagacaggattaatatagaagatggcaaggcaaatttctaattagagggaatattaattttctacaaaataaagtttgttcatcaatacaaacctgctttcaaatcaaatcagaaagacatccttcggaatgtgttcagaacccaaacatcatgtcaatggcaacagaacagtcgaacctttcccagagggaacacagatggctgtatttggaatgggatgtttctggggagctgaaaggaaattctgggtcttgaaaggagtgtattcaactcaagttggttttgcaggaggctatacttcaaatcctacttataaagaagtctgctcagaaaaaactggccatgcagaagtcgtccgagtggtgtaccagccagaacacatgagttttgaggaactgctcaaggtcttctgggagaatcacgacccgacccaaggtatgcgccaggggaacgaccatggcactcagtaccgctcggccatctacccgacctctgccaagcaaatggaggcagccctgagctccaaagagaactaccaaaaggttctttcagagcacggcttcggccccatcactaccgacatccgggagggacagactttctactatgcggaagactaccaccagcagtacctgagcaagaaccccaatggctactgcggccttgggggcaccggcgtgtcctgcccagtgggtattaaaaaataattgctccccacatggtgggcctttgaggttccagtaaaaatgctttcaacaaattgggcaatgcttgtgtgattcacaatcgtggcatttaaagtgcacaaagtacaaaggaatttatacagattgggtttaccgaagtataatctataggaggcgcgatggcaagttgataaaatgtgacttatctcctaataagttatggtgggagtggagctgtgcggtttcctgtgtcttctggggtctgagtgaagatagcagggatgctgtgttcacccttcttggtagaagctaaggtgtgagctgggaggttgctggacaggatgggggaccccagaagtcctttatctgtgctctctgcccgccagtgccttacaatttgcaaacgtgtatagcctcagtgactcattcgctgaaatccttcgctttaccaaatctagacatacataagggactttctctcccttttcagccctctctgtgcagagaaaagatgtgagtccgcttgatgaattctaatgctttgcttagagctatgagaaatgtttgttttaataaaaacctacagtccaataa

SEQ ID NO: 17633 - DNA, 1628 bp, Homo sapiens
gtgatgaaattgatggcccctaagatagaggagacacctgctaggtgtaaggagaagatggttaggtctacggaggctccagggtgggagtagttccctgctaagggagggtagactgttcaacctgttcctgctccggcctccactatagcagatgcgagcaggagtaggagagagggaggtaagagtcagaagcttatgttgtttatgcggggaaacgccatatcgggggcaccgattattaggggaactagtcagttgccaaagcctccgattatgatgggtattactatgaagaagattattacaaatgcatgggctgtgacgataacgttgtagatgtggtcgttacctagaaggttgcctggctggcccagctcggctcgaataaggaggcttagagctgtgcctaggactccagctcatgcgccgaataataggtatagtgttccaatgtctttgtggtttgtagagaatagtcaacggtcgccaaacatcatgtcaatggcaacagaacagtcgaacctttcccagagggaacacagatggctgtatttggaatgggatgtttctggggagctgaaaggaaattctgggtcttgaaaggagtgtattcaactcaagttggttttgcaggaggctatacttcaaatcctacttataaagaagtctgctcagaaaaaactggccatgcagaagtcgtccgagtggtgtaccagccagaacacatgagttttgaggaactgctcaaggtcttctgggagaatcacgacccgacccaaggtatgcgccaggggaacgaccatggcactcagtaccgctcggccatctacccgacctctgccaagcaaatggaggcagccctgagctccaaagagaactaccaaaaggttctttcagagcacggcttcggccccatcactaccgacatccgggagggacagactttctactatgcggaagactaccaccagcagtacctgagcaagaaccccaatggctactgcggccttgggggcaccggcgtgtcctgcccagtgggtattaaaaaataattgctccccacatggtgggcctttgaggttccagtaaaaatgctttcaacaaattgggcaatgcttgtgtgattcacaatcgtggcatttaaagtgcacaaagtacaaaggaatttatacagattgggtttaccgaagtataatctataggaggcgcgatggcaagttgataaaatgtgacttatctcctaataagttatggtgggagtggagctgtgcggtttcctgtgtcttctggggtctgagtgaagatagcagggatgctgtgttcacccttcttggtagaagctaaggtgtgagctgggaggttgctggacaggatgggggaccccagaagtcctttatctgtgctctctgcccgccagtgccttacaatttgcaaacgtgtatagcctcagtgactcattcgctgaaatccttcgctttaccaaatctagacatacataagggactttctctcccttttcagccctctctgtgcagagaaaagatgtgagtccgcttgatgaattctaatgctttgcttagagctatgagaaatgtttgttttaataaaaacctacagtccaataa

SEQ ID NO: 17634 - DNA, 1612 bp, Homo sapiens
gcggccgcgtcgacgtgacagccggtacggccccgggtttgggcaacctcgattacgggcggcctccagccccgccagcagcgccccgcgccgcccgcccgcgcccctgccgccccccggttccggccgcggaccccactctctgccgttccggctgcggctccgctgccggtagcgccgtcccccgggaccacccttcggctggcgccctcccatgctctcggccacccggagggcttgccagctcctcctcctccacagcctctttcccgtcccgaggatgggcaactcggcctcgaacatcgtcagcccccaggaggccttgccgggccggaaggaacagacccctgtagcggtcttgctctgtcggccaggctggagtgcagtggcatgatctcggctcactgcaccctccgtctcccggattcaagcgattctccatacctcagcctcttgagtagctgggattacagccaaacatcatgtcaatggcaacagaacagtcgaacctttcccagagggaacacagatggctgtatttggaatgggatgtttctggggagctgaaaggaaattctgggtcttgaaaggagtgtattcaactcaagttggttttgcaggaggctatacttcaaatcctacttataaagaagtctgctcagaaaaaactggccatgcagaagtcgtccgagtggtgtaccagccagaacacatgagttttgaggaactgctcaaggtcttctgggagaatcacgacccgacccaaggtatgcgccaggggaacgaccatggcactcagtaccgctcggccatctacccgacctctgccaagcaaatggaggcagccctgagctccaaagagaactaccaaaaggttctttcagagcacggcttcggccccatcactaccgacatccgggagggacagactttctactatgcggaagactaccaccagcagtacctgagcaagaaccccaatggctactgcggccttgggggcaccggcgtgtcctgcccagtgggtattaaaaaataattgctccccacatggtgggcctttgaggttccagtaaaaatgctttcaacaaattgggcaatgcttgtgtgattcacaatcgtggcatttaaagtgcacaaagtacaaaggaatttatacagattgggtttaccgaagtataatctataggaggcgcgatggcaagttgataaaatgtgacttatctcctaataagttatggtgggagtggagctgtgcggtttcctgtgtcttctggggtctgagtgaagatagcagggatgctgtgttcacccttcttggtagaagctaaggtgtgagctgggaggttgctggacaggatgggggaccccagaagtcctttatctgtgctctctgcccgccagtgccttacaatttgcaaacgtgtatagcctcagtgactcattcgctgaaatccttcgctttaccaaatctagacatacataagggactttctctcccttttcagccctctctgtgcagagaaaagatgtgagtccgcttgatgaattctaatgctttgcttagagctatgagaaatgtttgttttaataaaaacctacagtccaataa

SEQ ID NO: 17635 - DNA, 1292 bp, Homo sapiens
tgctggcagcagaatctggggaatgcagtctgcgagctttccgcctgtgcggtacgagggtgagctgagaatgtcagggaccaaggcacagtatctgatacacacttttaaatatgggtgataataataggacttccttcccgtggctgttgtgaggctaaaattaacatgtgtgaagtctttgcacagatcatggcatatggtagaccctcaataattgctagtttacaaaaaattgtcaaaactgacattagaatggctcctcattctcattcctaacccctgcaagaaaactggctgcctctgagctggctggtctaacccacccgtcttggcggggaccctgccccttgtcgttccggacctgctgggcctcaagatcctcgatcggccttctgctggctcagacggcgaaacagagatgcaggaaataagtgacgttgctcaagaaaaacctgacgcagtgaatcatgctgaatattaatattggatgcactgtgcttggcagacttgaagacttcatctcacatggaccagtggacagtcagagtgtggttctttcagagcacggcttcggccccatcactaccgacatccgggagggacagactttctactatgcggaagactaccaccagcagtacctgagcaagaaccccaatggctactgcggccttgggggcaccggcgtgtcctgcccagtgggtattaaaaaataattgctccccacatggtgggcctttgaggttccagtaaaaatgctttcaacaaattgggcaatgcttgtgtgattcacaatcgtggcatttaaagtgcacaaagtacaaaggaatttatacagattgggtttaccgaagtataatctataggaggcgcgatggcaagttgataaaatgtgacttatctcctaataagttatggtgggagtggagctgtgcggtttcctgtgtcttctggggtctgagtgaagatagcagggatgctgtgttcacccttcttggtagaagctaaggtgtgagctgggaggttgctggacaggatgggggaccccagaagtcctttatctgtgctctctgcccgccagtgccttacaatttgcaaacgtgtatagcctcagtgactcattcgctgaaatccttcgctttaccaaatctagacatacataagggactttctctcccttttcagccctctctgtgcagagaaaagatgtgagtccgcttgatgaattctaatgctttgcttagagctatgagaaatgtttgttttaataaaaacctacagtccaataa

SEQ ID NO: 17636 - DNA, 1187 bp, Homo sapiens
agagtgagagagagaaagagggagagagagaggcagagggagagctgaggaaagaaaaaaaggcaagacttggcacagctcagtcaaatcagcttcttttgtctgctttctcggcttgagcttcaggaaagaaaaccgtcctggggtacagaaaaactcagaactttttggttttcaaacttagaaggctttttaagtctcttgggctatttgaaagtgttggtacatacaatgacgtttagtcaccagtattaagggaaataaaagcctttttcaaaacgaagcttccatagtgtccatgcatttgggaaatactatatttgattttttgcatgtatgattataccatgagagacaggattaatatagaagatggcaaggcaaatttctaattagagggaatattaattttctacaaaataaagtttgttcatcaatacaaacctgctttcaaatcaaatcagaaagacatccttcggaatgtgttcagaaccaattagtgacaacactgaagaccagaaaggcaagctgaagacaccagacttcgcttgaagggcaaacaagaaatccaaacatcatgtcaatggcaacagaacagtcgaacctttcccagagggaacacagatggctgtatttggaatgggatgtttctggggagctgaaaggaaattctgggtcttgaaaggagtgtattcaactcaagttggttttgcaggaggctatacttcaaatcctacttataaagaagtctgctcagaaaaaactggccatgcagaagtcgtccgagtggtgtaccagccagaacacatgagttttgaggaactgctcaaggtcttctgggagaatcacgacccgacccaaggtatgcgccaggggaacgaccatggcactcagtaccgctcggccatctacccgacctctgccaagcaaatggaggcagccctgagctccaaagagaactaccaaaaggttctttcagagcacggcttcggccccatcactaccgacatccgggagggacagactttctactatgcggaagactaccaccagcagtacctgagcaagaaccccaatggctactgcggccttgggggcaccggcgtgtcctgcccagtgggtattaaaaaataattgctccccacatggtgggcctttgaggttccagtaaaaatgctttcaacaaa

SEQ ID NO: 17637 - DNA, 539 bp, Homo sapiens
ccagtttcaaacagacccacagcgtccaaaccagggcccccaacatgcacttgggatggcaggggtgtgggggtagagtgtaagttactgatttaaaaatctgatataaacctgatttcagttcccagtcaactgaggcacagcaaggtaagtccctgcccagcgtcactccacttggaatgcggagagcccggcctaaaggggacccactgcacatcccaagccacgcgtctgctcactgcagccctggcccctcagtgccacccctcgcaggtgctgtctctctagcatgggagctgatggcgcctttctgtgtccccacagttctttcagagcacggcttcggccccatcactaccgacatccgggagggacagactttctactatgcggaagactaccaccagcagtacctgagcaagaaccccaatggctactgcggccttgggggcaccggcgtgtcctgcccagtgggtattaaaaaataattgctccccacatggtgggcctttgaggttccagtaaaaatgctttcaaca

SEQ ID NO: 17638 - DNA, 484 bp, Homo sapiens
gcggactccctggcctgctaaactacccttgaaatacagtagcctccaaattttcagggaaattgatttaagtaatggtcaggcctctgagcccaagccaagccatcgcatcccctgtgacttgcacgtatatgcccagatggcctgaagtaactgaagaatcacaaaagaagtgaatatgccctgccccaccttaactgatgacattccaccacaaaagaagtgtaaatggctggtccttgccttaagtgatgacattactttgtgaaagtccttttcctggctcatcctggctcaaaaagctcccccactgagcatcttgcgacccccactcctgcccgccagagaacaaaccccctttgtctgtaattttcctttacctacgcaaatcctataaaacggtcccacccttatctcccttcgctgactctcttttcggactcagcccgcctgcacccaggtgaaataaacagccattttgctc

SEQ ID NO: 17639 - DNA, 284 bp, Homo sapiens
tggcaagtttcttaccctctctgagccttgagtacaacactgaagaatgttggatgatcacttacatggtgcagttgtgaataagatatcacctttagcacattatcagcgtccaatgattaatagtagtagttatttgttccctttgtctttccaggtacttcttggatgtttcagaaaacaactacaagaatcttttcattttgaggactgtcctctgaatctctgatgaaagcaaataggagatacatacccatggaacaatacaaataaatagataacat

SEQ ID NO: 17640 - DNA, 445 bp, Homo sapiens
ctacctgtagagtctgaaatgccaaaaatggcaagttatttttacatgtagttcaaaggcaagccttagaaatgctgtaacttcatcaatataatgtcacaaatctcttgtgtgtttatttatatcaaatcagtacaaatgatttcaatcagtagtcaagaagacctttttttagggtgggtgtgttggcttatgcctgtaatcctagtactttgggatgctgaggtgagaggattccttgaggccaggagttcaagaccagcctgggctattaatatagtaagacccatctctacaaaaaattagctgggtttggtggtgtatgcctgtattcccagctactctggaggcttgaggtgggtggattgcttgagcccaggaatttgaggctactgtgagccatgatcatgccactgcaatcagcgagatcctatctctgaaagga

SEQ ID NO: 17641 - DNA, 148 bp, Homo sapiens
cacacctgcccctgatgtcattgtagccccacgattgtagtgcccgtatccactctattgggaagatggcaaccatggggtgaaggtccttcacaggggagccaggggcagcctgagtctccctgagccaagaggctgggtgggggct

SEQ ID NO: 17642 - DNA, 182 bp, Homo sapiens
gacggagggcaccgtactctgggcactagcttcactgcctactaccccgaggtgccttagctcgtaagcgtctgtggctcaggccctgtgcgcctcgcagggacccgctgctcgggacccccgtctcagcggctcttctgtagctgggcctagacggtccgctgcctccttgggcctgaagg

SEQ ID NO: 17643 - DNA, 627 bp, Homo sapiens
caagtagctattaccaatgcacagctctgaatgactaaatatctcaatcaagaatatcgacaataaatccaggagctgtggctcaagctctgaatgactaaatatctcaatcaagaatatcgacaataaatccaggagctgtggctcaagcctgaaatctcaatgcctagggaagctgaggtgggaggatcatttgaagttaggagttcaagaccagcctggccaacagtgataccctatctctacaaaaaacaaaaataataaccagagatggttgtgcacatttgtagtcccagctattcagggaagctaaagcaggaggattgcgttgagcccaggggaggacgcagtgagctataatcctgccattgcactgtagcctgggtgacagactaagatgctgtctcaaaaaaaaaaaggaaagaaaaaaaagaaaaaaaacccaacataacaacagaataccgaatacccataataagaaatgtaagattctccatgaactccacatttttgggcttagtaacttgactcttaccacctaaattcaactcatttaaaactataggccaggagcagtggccacacctggctaatttttgtacttttagtagaaacagggttttgcca

SEQ ID NO: 17644 - DNA, 451 bp, Homo sapiens
gtaagatggaatcaactatgtccgatttctctgtcataattttgcaaaggcagtttcacaattagaaaaatgtagaatttgctgcattctttaaaacagctggtggaagtctttaaaaatcattgttgccttggcaaagctgctgggattataaaagaaaaaaaccaaaaagttaaacaaacaaaaatcattgccatggaaaagaagggaggatgttctagattttaaaagattaaggagatagtagccacaggcaatttgtatatattgattaggtactgaattgggggaaaaatggctttaaaaatatgtctggggactgggcagtagctcatgtttgtaatcccagcattttggaaagctctggcgggtagatcgcttgagtccaggtggattccttgagcccaggagttcgagatcagcctggccaatggggtgaaatcccgtctct

SEQ ID NO: 17645 - DNA, 284 bp, Homo sapiens
tgtgactattttctctcattctgtagggttgtctgtttactctgttgtttcttttgttgtacagaagctctgtagtttaattaggtctcacttttcaatttttgttgtcaactttgtcaaccatcaggtggtcgtaggtgtgtggctttatttctgagttctctgtcctgttccattggtctatgtgtctgtttttgtaccagtaccattctgttttggttactgtagtgtgtctgtggtttctgcatccatggattgaaccaattgtggattgaaaatatttg

SEQ ID NO: 17646 - DNA, 180 bp, Homo sapiens
ttgagaacagattcttaaaaataccctatctctgtagtgtgtccttgttcttatatatggccctgagttttgtgatcacctgaataattctaacatacgtttggctggctgactgtggagatacatttgagttacatgtttatttttaatttaaggtcatcattgttttaaaggagctgt

SEQ ID NO: 17647 - DNA, 448 bp, Homo sapiens
ggagctgcacttcagagagtcccactgtaatctgttaatagaatctgctttaaatgagtcactccttagactggcaatgacacccagcttagtctgtaaaatcaggaatctttgtgttggctgaaggaacttagtaatcttagttgaattcctcttccccatgtctttcaaaaccagagcactgggtcgaacctaacccacaaaataattcgtccaaattaaattgacttttttacataacatcagcaccaccccttacacttttaaagttaaagaccctgttgatcaggttacctggaaatttcaagtgcatctgaccagggattatcaagctccttgtgacatctgtttctgatgctgtgaatgtgatgtcaccacaaatagaggattctgaattttgctggtactaatgctgagtggtgacttattggggccttgctcatgttac

SEQ ID NO: 17648 - DNA, 655 bp, Homo sapiens
aaagtggaactgtgtagaagagaggatatgtcacctccaacgtgaaaatgcgtggcttgtacagcaactagatgacgttcatcagaaagaggatcataaagagatagtaactaatatccaaagaggctttattgagagtggaaagaaagacctcgtgctagaagagaaaagtaagaagctaatgaatgaatgtgatcatttaaaagaaagtctctttcagtatgagagagagaaaacagaaggagtagtggttgtgagacaacttcaacaagaagtggctgacagcgtaaaaaaattaacgacgttagagtctccactggaaggtatatcacgttgtcatattaatttggatgagacacaggcctcaaataagaaattatttcaagtgaaaagtcaaatatgtatggaatttaacatgtcaacagttattctgtagctagttgaattatataacgtgttttaggatactaattttggcagaagcttgattttttattttcattataatgaatgatttccattttactatctttataatgtactatttttttatattgtgactttcattataccattttgaaaaaccattgcataccttttctcttacaatatgtacccttggaaaagttgagaattatacatcattcctcataga

SEQ ID NO: 17649 - DNA, 466 bp, Homo sapiens
acagatgaatattaaatgtggcttcactaaactctacatgcttagctcatttgatctcacattaggtcatctagaatttgtcagcctattttggtgtgcatgtttatgtttaattttaattcagcaggcaagttatatggtatataggtatctcagtagacatgttttggccaagattctcttccccatcctgaagctcgtggaacatctaaaaataggactggcctggtcccatgatactactaaatcacatgtcaggttagcctgtgttttcctctgccctcctttgcttctttgtgcctttgctaccatctaaaatatagctgctgagtatttttccagaattaggttctcctttgggtatattcacttgtattttttaatatactttactttgttctgtttttctgaacataaaaatatatggggcttcccaattaaatggcagaaagttaccaactcttga

SEQ ID NO: 17650 - DNA, 460 bp, Homo sapiens
gaatacagatatcttttccatatactgatttcctttgttttggatatatacccagcagtgggcttgctggatcatatggcagctctgattttaggtttttaaggatgggttttttttttgcaatgagaataaaaattttccatgtataagatcagtgtctttgaactttgtttatatcctttgcccatttttctattgagttcttttttctttttgagacagggtttattgcccaggctagagtgcagtggcatgatcacagctcactgcagctttgatctcccgggctcaagtggtcctcccatgtcagcctcttcagtagctgggactagaggcacatgacatcatgcctggctaatttcttgtatattttgtggagatggagtcttcctattttgcccaggctggtctccaggtcctgggcataaatggtctttctgccttgacttcccaaagtgta

SEQ ID NO: 17651 - DNA, 382 bp, Homo sapiens
tgtgagttctgccaacctattatcctgacaagaacgacaacaggatcattggtggcaattttaatggtgctttgtagttttcagagtttttaaagtgtatgttggtttattcttagagtcattctcacaggattatttgggagaggaatttagcagatgatgttgtgaaaatccacttgtaagagaatggaaaggaattggtggtgatgggtgtaggtagatcacatatgagagtgacagaaagtagctgagcacaggaaagtgcatgattttagttctagctactcagaaggctgaggcaggaggataacttgaggccaggagttcaaggccagcctaggcaacgtagtgagaccctcatctctttaaaacaaatcaaaac

SEQ ID NO: 17652 - DNA, 174 bp, Homo sapiens
ctgagaagtaaaatcattcaaagtggctttaaaaactaggtaaaacactgactatgaaaatgttcttttactttgtaagaaaaagaaaaaaaatacctccatttttcacttgtacttcacatttggagccctaaaaacatataatttatttatcaaagaaacagtatactaccc

SEQ ID NO: 17653 - DNA, 462 bp, Homo sapiens
gtctccaatttactttcaaatgattaagaaaaaataatttgcaagtacatagagaaaaagtgtgaaaaatgtaaacaattggtgagtctgaatataggttacatgggtattcctagttccttgggctattcttgaaccttttctgtaactttgaaagtatatcaaaataggccaggcatggtggctcatgcctgtaattccagcactttgggagcccaaggcgggcagatcacgaggttaggaggttgagaccagcctgaccaacatggtgaaagcctgtctctactaaaaatacaacaacaaaaaaagaaaattagccgggcatggtggcgcatgcctgtaatcccagctactcaggaggctgaggcaggagaatcgcttgaatccgggaggtggaggttgcagtgattcgagatcgcaccactgcactccagcctgggggacagcgccaggctccatctc

SEQ ID NO: 17654 - DNA, 440 bp, Homo sapiens
ggcatactcagccctcgaacacaggcagtcagcctccagagcccgtgctcttactgagctatgctgaactggaccaagtggtaatgatttcatggtagatctagaacaagaccagatatcttcaacaaaacaaaaatgtatttgctttgctattgcctagatttacttaaatccttttctgtttcaagatctgtctttactttgtcattaaagattatttcagtggcggtattggacagtgattttttttttgagcacaggatgacactgttctcggctgaattgctcttttaaagaaaggtgcaagaggttgggaaggctgattgtggtgttgtagcacttagttccttctctcaggaatgccttccagtcttgggctcagccatcctttggcggccagagggacactgttcttccctgttactctctctactcaagtc

SEQ ID NO: 17655 - DNA, 748 bp, Homo sapiens
gcataaaacggcaatgagctcagtaaacaacccccttcccgtgatcttcgtggcttcccgcccagacgtgtgaccaagatagcaaggagcagtctttaaggcgacacggcagagaggcagaaaaagatgggccttaccggttagttaagaaaaaaagaggacctgttgcctgtccctctagctttgaactacaaagtggaggggaagtttgtctggattttcctgtagaactgagggcaggacatgaggctctgcctgcagtcagcaacttggaatattcagacttcagaccagcatcacagattataaccctccgtaaatcatctgcatcccagctcccatcaaaagccagcctgaaggacccatggacacgtgactccagtgttctcaacaacatcttaagatcaagttggtttgcacaacatttgcatctacttgggacaaagcaagaacaataagggcaaaaaaaaaaaaaaaaaaaaaaaaaaaaaatttggggggggacaggggaccattcaagaggctttgagagaacaactggtggggaccgcaggcccagaaggataagagcaacacgtggccacagagggaccacgggaaaacacgggcacagacacagggcggggatatcaacacaataaaaaagccgggcggaaaacgagccttgtgaaaactcaaagggggatcagagaggaaaaggggaatataacagggggatccaaggaagcgaataaaattgcccggcggg

SEQ ID NO: 17656 - DNA, 760 bp, Homo sapiens
ctgggagcggggagccagcggggtgcggcgccggagtgcggggagaaccaccaggcgccggaattggggagcacgtggagggggcagcggctccagccccagaccgccgcgctctgtcactttgcattaagaaagcttccggggaatgcacacggcctggccgccgccttcgtgcagcccgccctgcaggtgcaggaagaaaagaataatcgcacccgtttctcaggtgcttacttcaccatgtccgatccggacatgaggctctgcctgcagtcagcaacttggaatattcagacttcagaccagcatcacagattataaccctccgtaaatcatctgcatcccagctcccatcaaaagccagcctgaaggacccatggacacgtgactccagtgttctcaacaacatcttaagatcaagttggtttgcacaacatttgcatctacttgggacaaagcaagaacaataagggcaaaaaaaaaaaaaaaaaaaaaaaaaaaaaatttggggggggacaggggaccattcaagaggctttgagagaacaactggtggggaccgcaggcccagaaggataagagcaacacgtggccacagagggaccacgggaaaacacgggcacagacacagggcggggatatcaacacaataaaaaagccgggcggaaaacgagccttgtgaaaactcaaagggggatcagagaggaaaaggggaatataacagggggatccaaggaagcgaataaaattgcccggcggg

SEQ ID NO: 17657 - DNA, 724 bp, Homo sapiens
tctctccctcacaggattggcatcttcttctgccccctgctgccctttatccaaatgattatgcttttcatcatgttctactcaattctcagaagaaagcgatcggccccgaggcaggaaggccggctccggtgcagggagcgccgcctgcgggctgcttcgggccagggtcgacccgagggccagcgcaagcagcggcaacaggagcgccaggaggacatgaggctctgcctgcagtcagcaacttggaatattcagacttcagaccagcatcacagattataaccctccgtaaatcatctgcatcccagctcccatcaaaagccagcctgaaggacccatggacacgtgactccagtgttctcaacaacatcttaagatcaagttggtttgcacaacatttgcatctacttgggacaaagcaagaacaataagggcaaaaaaaaaaaaaaaaaaaaaaaaaaaaaatttggggggggacaggggaccattcaagaggctttgagagaacaactggtggggaccgcaggcccagaaggataagagcaacacgtggccacagagggaccacgggaaaacacgggcacagacacagggcggggatatcaacacaataaaaaagccgggcggaaaacgagccttgtgaaaactcaaagggggatcagagaggaaaaggggaatataacagggggatccaaggaagcgaataaaattgcccggcggg

SEQ ID NO: 17658 - DNA, 783 bp, Homo sapiens
ccttgtatgtacgggggtagtggctcatgccgtgtgatccagcactttgggaggccaatgacgggcggatcacttgaggtcgggagttcgggaccagcctggccagcatggtgaaaccccatctctactaaaaatacaaaaaaattagcccggtacatgcaagggccccgaggcaggaaggccggctccggtgcagggagcgccgcctgcgggctgcttcgggccagggtcgacccgagggccagcgcaagcagcggcaacaggagcgccaggaggacatgaggctctgcctgcagtcagcaacttggaatattcagacttcagaccagcatcacagattataaccctccgtaaatcatctgcatcccagctcccatcaaaagccagcctgaaggacccatggacacgtgactccagtgttctcaacaacatcttaagatcaagttggtttgcacaacatttgcatctacttgggacaaagcaagaacaataagggcaaaaaaaaaaaaaaaaaaaaaaaaaaaaaatttggggggggacaggggaccattcaagaggctttgagagaacaactggtggggaccgcaggcccagaaggataagagcaacacgtggccacagagggaccacgggaaaacacgggcacagacacagggcggggatatcaacacaataaaaaagccgggcggaaaacgagccttgtgaaaactcaaagggggatcagagaggaaaaggggaatataacagggggatccaaggaagcgaataaaattgcccggcggg

SEQ ID NO: 17659 - DNA, 443 bp, Homo sapiens
ttatgattactgcaattcaaaagtcataataaattttaaaacaaatcctcctgtacctgttgtggtgcatgcagaaacttttcctgttcaacacacttatatggcactatatagggatataccaaatagctcaggtacatagtgaatacaactttaacacttatattgaaatgctaatcttacttgccaatattagtggcacattagcataatttaacttttataaaattatggaaaacagtttaaaattattctccctaatattagcaaattgcattaatggcatgtaccgtgtgccagtttgtttccaaataaacaaaatgtaccttgatatgccacttcagagccagcagagggagctcatacttttttattgttttcaacttactgaagaaaatttgcttttaaaagctactgtgttataaccaatgagaaccaagaaa

SEQ ID NO: 17660 - DNA, 946 bp, Homo sapiens
tgagactccgtttcaaaacaacagcaacaaccacaacaaaaaagaaaaaaacaaaaacaacaacaaaaaaacaaaaacgagataagattccttccctgtgtctgcccgcgagctgtctggaaccatgcaccagtcaggaaatggcaacttgtggcagcccatcttggggaagaacaaactggatggttagaagggacagaaaagatgcagacaggtttcagggaaagatggtgtccacacaaaggcccatgtgttaaagaggccaaatactagctcagaatcagcagctaagaaaaggcactttctggaagcctcaataaatcaggcaaaccaaatggcagcaagagaagtaggcataggtgaagcaggacttccaggggcctggagcctaagactttgaagagacaggagaaaactgcagagtcagtacaggatggaggagagttttttcatttcaaccacaaaagtctcatttgtctccttttcgtgctcacaccttatcctgagatctccaccagccaggaagtttgcctgagctttattgctcttgttttacaaaaaaatgcattttcactttgaacgtacaaaaattaaaatggtaacttaaaaatatattggagaaaatatctaagggagcatccttagtccccataatatcttatttgatcttcacagaccttggttgggggatagagagggaatattcctagaaagaataaataataacttttatattatattatatatatataaatgggccaggtgtggtggctcatgcctttaataccagggctttgggaggctgaggcaggacgatcacttgaggccaggtgtttaagaccagcctgggcaacatagggaggctgggtgtggtggctcacgcctgtaatcccagcactttgggaggccaaggcaggtggatcccttgagaccaggagttcgagac

SEQ ID NO: 17661 - DNA, 288 bp, Homo sapiens
caaaggcctctctcttccccgattcggaagattggcaaacccaagcctggatgtgccaccaggtgggaccccctccagctccccagtgctgagtgcgtcgtccctgtcactccatgggcagctcagctgagcaaaccctttctccataggcaagagaaaggagcaggtgctgcagccagggccccccagggtaggggcagctgaggaaaggaaaaaacgaatcctctggggaaagacgaagcgcttcagctcctagaggacacagtctctctgaagcaaggacctcag

SEQ ID NO: 17662 - DNA, 377 bp, Homo sapiens
ctacgtggaactgtaagtccaattaaactgctttcttttgtaaattgcccattctcaggtatgtctttatcggcagtgtaaaaatggactaatacagccctacatccagtagcttgtgacagcttgtttctaagtcctgggggcagccctgctgccactgggctccaggacagctcacagtctgtaggggagggagttctaaagtggtgccttgccatagctacttaagtgtcagggaacatgaaggacccaggggaagtgttctctcttgggcagtgcatggtacaatctcccggcagctccttgtgttagtttcagggctcacgagggttcaggagctcttcagtggcctggtatcgtagggatccatggtgata

SEQ ID NO: 17663 - DNA, 354 bp, Homo sapiens
atagaagtaattctgattttccaaatatcaaaaatctcgtaatgtccaattcaataatattgtaaacatttgtttttattaagaaaaatgtggctggacacagtggctcacacctgtaatcccagcaatttgggaggccaaggcaggagcatcacttgagcctgggagtttgagaccagctttcacagcatagggggacctctctataaataattaaaaaaaaatagccaggcatggtggcatacacctgtgtattccagctactcaggaggctgaggcaggaggatcacctgagcccaggaggtcaaggcttcagtcagctgtgatcacaccactgcactccagcttgggtga

SEQ ID NO: 17664 - DNA, 464 bp, Homo sapiens
acaaaggcctctcctcatcataccaatagggaaggaagaactgggctcctgtgagtggtggtggtctcctttccctccacgatgacagtggaaagagcagtgccactgcctttatttctcaaatcttgaaggtacaagttaaaaaacaaaaaaaaagttcacactaagagaccagtttatgccttgtatgttgtagactcagtcatgttgaaaatgatgctttattgaatgtttgccatgagaagagttcatggccctgtctcaacaatggcgccccctttggtcaggtgttgatatatacactgagaacaaggcatttaacccggtaactcatttaggtagagaatagctggaaataaaagaatgttttggaattttgtctcttggtcgggggagggagtcttttcctcttaaataattaaaataaaaaacataaacaaaatgtttcatttcctctcaaacac

SEQ ID NO: 17665 - DNA, 410 bp, Homo sapiens
ggctagggattgcttttgtcgccatctgctggtttccaccggtttcttcacttcatcctgtgtggaccatcttttggtcagcaggactgtgaccagaagacaagtcctgccagtctcctacctcatttccaagagacaaaaagataggatgtgcagcggaatagaaaaaagacttagaaaacatattttaaacatctaatgaacatgttgtcagacacccagaaggaggagtgagagaatgggcagtgacaaaattgaagatggagtggctggaaagaggaccttcacagcaccacccacgagtaaggggctgctgtaaagagacagaggtggtcgccatgctcctgcagcccagtgggttcctttttggaatcagagaatcaaaataaaagggccgaattccacctcca

SEQ ID NO: 17666 - DNA, 291 bp, Homo sapiens
tcagatattctacatggtccatggaagactctgtgggccgcagaagcccatagctgcatacccttctattttcctcttccccatttcactcttttaagctccctactcctattccctatgatcactttccaaaataaacggcaggtgtgctagctgttgtcttagactctgctttctggaaactatttttcccctccacaagaaattatcactgtgaatattacaggaggagaaataaaataagaataaatcagtggtttattttcaggttcgaataaactctttctaatg

SEQ ID NO: 17667 - DNA, 380 bp, Homo sapiens
gcaaaacacaaataatacattgtttgttgtatatttttatgactacgtataggtactaaaagtataaaaagatgtgcggaagtcataaatagtgaaattagggtattgattatcaaatgaatgggccaggaaaggatccacagggagcttcaagtgtatcttgactgttttatttcttaagctaagagataggatttgcaatattatctatacttttttaaactcctgggaattagctgggcatgatgactcatgcctgtagtcctagctgcttgggaggctacggtgggaggattgcttgatcccaggagtttggtgaactatgatcacaccactgtatcccagcctgcatgacagagtgagaccctgtctcttaaaaa

SEQ ID NO: 17668 - DNA, 304 bp, Homo sapiens
ataagggcatctgctcttacaagaacttgaaacaaagtctgcacctatgcatgatgcaaacaactcaaaaagcacaaatccagagcaaagggggtttatgtggaaggtgcaattagagcaaaaaaaatccaaatttatttctgctcttagctatctcaaatcatactttcgttgtggtctcatcagttgtaaaccaaataattatttctttgtgatgtataaaggtgagttccttcaagcttcattggtaataatagtaattatgatgatgataataataaaaattatcttccttattctttcg

SEQ ID NO: 17669 - DNA, 271 bp, Homo sapiens
acggtttgaacgcaggagatggaggttgcagtgagccgagatcgcaccactgcactccagcctgggcgacacagtgagactttatttcaaaaaaacaaaaaacagattgttaaatcatgtaacttcatctcagttgtgtttggaatttttcagcttaacattttataatagtagcccctcctcttgaattgaagatgagtcattaaagcttcattcatttcttgagactgttactctaccaatgctaaaatcactgcactttcaataaggc

SEQ ID NO: 17670 - DNA, 1026 bp, Homo sapiens
agcaacatcctcagcagatgccagggaggtacaggacttagatttcagtggcttcctggcccttccacctgcctccaatccagcattttataggtcacattcatgacattcctcagggtcaggaagtaaaatatttttatacattaacttactaaatcctcatagtaatgctatgagatagatactataactcccatttccctgataaggcaaatgaggcctgaagaaggcaagtggctggctgggagttaaattaggctacttagtgatgggctgcaatttgagatttcatactagatccttcctcttagccgcttgtttcttctgcttcctttccattgttgtgttcacaaaaatgccacttcacaggtttgaaattattctctttttagcctgaaatgttctttacatttcttgataggaggattttattttatgtctaaatacattttcttgttcacttttgtcttgatgaattacaagtaacagtttttaaattccatgtcttaatgtttaggatatttgcatttttatgttttattattaagggaactgtcaatattatgttaaacagacatgagcatcgaacgtgttgtagagcaaatttcagagaaatcacttcttaaattatttttgtcaggacaaatcaaagaattgtataagataggtaattgatctataaactggtgaaggggtcattttaaaatccaggctaatttaagttagattcttacttgacttacagtattgtgttggctttggttcatttttttcaccttctcctggtacataaaaagaagaaagattcttggcttaaacaaatcgctaaagttaatcttgtatgaagaagaaaaaatgaggacatcatttttcaatttgctaaagagttagcctcaatttttaaaactttttatcttggtatatagatatatattttttaaatgctcacttgcatatcttagaaccaaaggcctaataacaaaaaataaacacttggttctttcagaagaaaaatcacagatggca

SEQ ID NO: 17671 - DNA, 354 bp, Homo sapiens
tgaggtcattcagcttttggtagtaagttcagcttctgactcagagattatagctcttgccaccaggccttgctatgtttcttagccatcttcagatttttcataatattgcaagtctgaaagtttgaacgctatagattgtttaaaaggaattctgaatatatgttttaatatttgctatatagtcaacattaagttaaaatgaaatttaggaaagcaaagacaaatagcattgctaaaagacatgaagaatttgtttaatttgggaaaatgctttttttctagattcagtgcttttacctaatattaatatttgattagcttaaaataaacattaattgtccagcccattca

SEQ ID NO: 17672 - DNA, 489 bp, Homo sapiens
aatctgttgatatctgccacattcttatttaatctttattttcagtatcaaatcctaagatttttagtttttccatacaagagtactcaactctttgatcatgtagtgccttcttggcatcttctttaggtgcattttatctttcttaagaaagtatcccagttattgtcacaccaggcaagattttatacagacaaaaggcatagtttgttttgttttggtattgatcctctgctttaaaatactcgacatcttggggattcttaaggtcttccctgtcaatttcatgggtcaaaattctcagttcttttacaggctccttttcttttacccaagtgtaaaatggtggaattccttgaagctctgccctaggctcttttcctttctctctatgcttctgttatagtttttgtttttgttttcaaatttacagctcaatttgagttttttccctgagttttagacacattattgaactgactatgtgac

SEQ ID NO: 17673 - DNA, 433 bp, Homo sapiens
cctggctcagggaacttctttaccctctcaggcagtgccagcagagaccaatgggagctcaaaggcactagataaacaaagcaggctaaataacactgcaaaggctctgtaaattagtctgctattggaacgatagcctagaaaagtagaccaagatactcgtgctaaaactaaacagggtggctaactgttaaaagatttaatagaagcctatgttagagacttctaacataatagacaaaatgttcatgatataatagcaaatcacttgtcataccatcaacaaaggaaaccacaaattgaatcagaaaagacaatcaacagtcaccaatacaagatgaatcagatgttggaattttctgacaaggattttaaagcatccatcataaaaatgcttcaaaatcaattaaaattatcctgaaacaaaagatat

SEQ ID NO: 17674 - DNA, 494 bp, Homo sapiens
aaagattttaccaatttaatttaatgaaaacttgaaaaaaaaagcctcattttaaaacaagctctcttaccattctcacattttagtttagaggttaaaaaatagaccagaattctggaaatagtatatcagaataaaattgagatatttctgatttatttgaggatcatcttgagaagggttagatttttaactcattcagagggcctaatatttaaagcaggatgattttatgcttagacaggggacatggtgaaatggcatagcaattgctcttcggtttctgttctttttctttatgagacaggtatgtttggctcaggcagcggctgtttgtttttcctctgcttatcactgtacatttttctatcaaatgctttggttgcttgttttattgagatccttttttggttttcttagcaataggaatggaaaacctcagaacgctggggtaaatttaaatgcaggtatttttaatcttttgataatgaaga

SEQ ID NO: 17675 - DNA, 716 bp, Homo sapiens
acttccccaaaagaagctatgctcgggccttcccatcgtcccactcaagagctttcttcatattggtcccttggttgaattctgtgttctgaagaggcaagaattgaggttgctgcagacctgtatggattcgccaccagtaacaagatctcagaacactggaaaaatcgatgcacaaaaaaaaaaggtttctgttgctctattaggatgatgtctgaatttgaacccaccacacgaggggaaaagaagtcgacagagacttgagctgtgccgaaacaactgtgtcctgatttccccaggccctacacagctcatggtatacggaatgcaagggaagaactgcttgcaggccacagggtggacaaggccctggagctctgcgaaaccaggaaggcaccatggatggctctggcttccagaagtttaataggaaaaaaaaggcaaacaaacattaagacagaaaatgcatgcagcatatagcgcccacagctcctttttcttggcgtgcccctggtccctgcagccacttggccaagtgcagtgtctgtcttccttcaggtcctctattggtgtgcacttctcgagcctagggccacgtctttccatctttggacaaatgccagtgccttttctgacacattgtaagtgctgaatagatagtaaatggctgactgaacaaatgcaacttacaactatataatggaagatgtggaagt

SEQ ID NO: 17676 - DNA, 1674 bp, Homo sapiens
aatctctattttataaatgaaaaaactaaggccataaatttaagaaatttgtcagtgtctcaaagctaggaaatggccatctaatcccagagcctatgctttaggtcactatgatatatactactcctgtatcctcaagtaatgtatcatttagtaacactaagcaccctgcttagttttcatggatactgccaaattgccctatctcaagctttatacttgcaccatttaaagttttccacactgttggcaatatcagaagtgataaggctttgaaatgttcgccactttgataaagaggaaatgattgtttgttactgttatatacatgtatttttatcagagatgggttatgtacttttccacgtttgatagttggttgtatttctttagtgaattgatttttcttttcctttgcccatttttctgtttggatgtttgactttcttcttaatttgtaagagtatcctatgtagtaacaaaatccttttttaaaaatttttaaagaaaaagtatacacacaggacttttttttttctaattcaaaaaatacaaaggcatgcaatgaaaattaagtctgttccactaccacattttccagttttttgtgtatctttctaatgatagataccatatgagtattcaaatatacatacacatacacttaaaaaaaaaagatggcatatactaactgttctgtttggggctttttggtggtggtgtttgtttgacagggtctcactctgcctcccaggttggagtgcaccttgaactcctggactcaagtgatccttcacctcctccttccaagtatctgacactacaggcttgcatcactatgcccagcttatactcaccatagtggttctgtactcccttaaaatattctggaggccaggcatgctggctcacacctgtaatcccagcaccttgggaggccaaggtgggtggatcacctgaggtcaggagttcaagaccagcctgatcaacatggtgaaaccccatctctactaaaaatacaaaagtatccaggcgtggtagcacatacctgtaatcccagctacttgggaggctgaggtaggaaaattgtttgaacccggcagacagaggttgcagtgagccgacatcgtgccattgcactccaagcctgggcaacaagagtgaaaccgtctcacacacacacaaaaaaaaatattttggagctccttctatatgagtctctctctcttatctctctcaggatgtgtgtatgtgtttgtttctctggaaaaccctgactaatacagattagctatgtattaggtaatacataatgcctaatacataactaatatatggacaggaagttaatagactgactgtgccaccttaaaactcgtatgttgaagccctaacctccaacgtggtggtattgggagatgggccttttggaaggtaagtgtgtttgaatgaggtgaagaggttggggacttcgtgatgggattattgtccttacaagaaaagacaccagagagcttgttctgtctctttgggccatgtgaagacatggtgagaaagcagccagctgtaagccagagagtcctcaccagaacctaaccatgctggtgatatcctcatctcagacttctaacctccagaactgtgagaaaataaacttctttgtttaaaaaaaaa

SEQ ID NO: 17677 - DNA, 399 bp, Homo sapiens
tcaagaccaggctgggcagcatagtgagaccctgtctgtggtagtccgttttcatgctgctgataaagacatacccaagactgggcaatttataaaaaagagaggtttaatggacttacagttccatgtggctgcagacgcctcacaatcatggcagaaggcaaggaggagcaagtcacgtcttacatggatggcagtaggcaaaatgagagagagcttgtgcagggaaactccaccttataaagccatcagatctcatgagacttattcacatgagaacagcacaggaaagaccatgattatattacctcccactgggtccctcccacaatatgtgggaattcaagaggagacttgggtggggacacagccaaaccatgtcactgtctctaaaaaaaa

SEQ ID NO: 17678 - DNA, 429 bp, Homo sapiens
tcattgattcttacgggagtaggttattaccagacagacaagtgaaattcagtaggcagaatgataataaatgtcatttattaaatattaaaaagacaaataccttccctattttagaaataaggtaggcaaaggaactgaggagtggaagttgaaggccagctctgggtgctttgtgaacagagcccagttgacagtgggaagatttgtgctctatgctaaggacacgctctgtaatgacaatccactcggttgcactaagaatttaagagcatttatatgaatatatacaatttaaggaaagataaagagaaaaatttgctatcaactctgtgtagatttggaaaatggtgtcaaaggaacagtttcacctgcatttctttgtctagaaagttttattttattaaaaaatgtagtctacaaacgagc

SEQ ID NO: 17679 - DNA, 260 bp, Homo sapiens
actgtggggttattagtacatatatcaaattcatgaggctcctattcctgtatattgttacagagctgttcttgtatattgatgtttaatgatatggggccgaattgttattcaaataattacagcccattcctgattatttagatgctgattaactagtcaatgacttattccctttgacaaaatttcccaccctctggctttcctttgatgttaatgaggaagaggatccagttttcatcccatttggcaaggttggt

SEQ ID NO: 17680 - DNA, 174 bp, Homo sapiens
caaaacaacttgaaccaactgttcagtcactagagatgaaatcaaagactgcaagaaatactccaaattgggtaaatcaatctttggattttcataatcatgaagaaatgaaaggtctgatggatgaaaattgcattttgaaggcagatattgctatactcagacaggaaatat

SEQ ID NO: 17681 - DNA, 455 bp, Homo sapiens
tccctaagtgaaataggatagtaggtaaacatagttactattttgagatatgtaaactatttctatttttatttaatgggttgatatcctattttgttttgagcaaagcaaattttatttatgaaagctttcttaggtttatttctgacctctttttcacaccttttgttattgagatcttaagttcttttttttttttttagatcttaagttcttaaccattaatttttcttattacaaaggttgcaggaaccctaccttcaaaactggggactaacaattctaaggaatgtgttaataaattcgataaaacaaaaaggttggccaggtgccatagctcatgcctgtaatcccagcactttgggaggctgaggctggtggatcacgaggtcaggagatcgagaccatcctggccaacgtagtgaaaccccgtctctactaaaaatacaaaaatt

SEQ ID NO: 17682 - DNA, 444 bp, Homo sapiens
tttctatttttttttttttacattaaaaaatagaagaaagaaaaatcggccaggcacagtggctcatgtatgtaatcccagcactttgggaggctgagtcaggcagatcacctgaggttaggagcttgagactagcctggccaacatggtgaaaccctatctctactaaaaatacaaaaattatccaggcatggtggtgggcacctctaatcccagctactcatgaggctgaagccagagaattgcttgaacccaggaggtggaggttgcagtgagccaaaatcatgccactacactccagtcttggtgacagagcaagacaggaaagaaagaaagggaagggaagggaaggggaagagaagagaaagaaagagagggagagcaggggagggagggagggaaggaaggaaggtctaaacaacaaagagaaaatagacccccctc

SEQ ID NO: 17683 - DNA, 178 bp, Homo sapiens
ccaactatcaagagaaatttcaacatagaaatttatttagtaagttttacttgacacaggagccttcataaaacatacctgtgtatgttttctgttagttatgatatggaagaggatagtaatggagaagcataattagataaaacagtatgatctaataataaactgggaagaactt

SEQ ID NO: 17684 - DNA, 1112 bp, Homo sapiens
gagcttgcctgccagaagctcctctcccagcctgcgagcatttccaggctcttgtttcccatcagcctctgggtccaaactaaccacaggtctctgggtccttttccggtgtccttaaggttcttggactctgcatgtgctgccaggttgccagatttctaagaaggagtttgaagaggagaaaaggatttttgcatgtttagaaatcaaggttcaggagaatcttgacagtgaatgtgtctcattacattgaataacagctacaggatgttcgagagctgttctggcttttctggattctgtgcttcaccaatagaggaatcccatggagcattaattagttcttgcaattccagaaccatgactgatgggttggtgacattcagggatgtggccatcgacttctctcaggaggagtgggaatgcctggaccctgctcagagggacttgtacgtggatgtaatgttggagaactatagtaacttggtgtcactgggtaaggtcatctgcctgaaataatttagagtctcctctttgcatcatcagttttctgcactggaaattacagggctatctttgaagaaaccaggtgaatttcttctcccccttcccaagggcatgcttttatacttgctgggttagaaatgggtttgttaaacacgttgatcttccccatccctcagtgagctttacaccattctcgggccctccctgcaatcacctctctcctttaatggccaaggggctggatttgcattatagaacatttatttcataactatggcaaagaaaccagatttcataaattctgcaaatattatattgaatatctactcctggccagccttgtgctgagcactgtcaattgaatcatgaacaagctttgataacttgcccattttcgtgcagtttactttgtagtaaagcagaaacatcaaataagtaaatttataaatagataaatagtatgtaatgaagcaaattctttggaaaaggtaaacagcataagggaatagaaaatgatgaggactgacagggctaatttaggtaagacagtcggggaacgctttcttgaacagagatgtggagcctgggatctctatgtgaatatc

SEQ ID NO: 17685 - DNA, 1277 bp, Homo sapiens
gagcttgcctgccagaagctcctctcccagcctgcgagcatttccaggctcttgtttcccatcagcctctgggtccaaactaaccacaggtctctgggtccttttccggtgtccttaaggttcttggactctgcatggttccctttagcctgtcttcgggcctgccacaattaaatgaccgcaagaaagaagtctatgctaagccccataatgaacgtttcaagcaagaaggatgagaattttagatctggaagtgtccgcgggacaggatcttgtcaagacctgatggggaagttctagagtgctgccaggttgccagatttctaagaaggagtttgaagaggagaaaaggatttttgcatgtttagaaatcaaggttcaggagaatcttgacagtgaatgtgtctcattacattgaataacagctacaggatgttcgagagctgttctggcttttctggattctgtgcttcaccaatagaggaatcccatggagcattaattagttcttgcaattccagaaccatgactgatgggttggtgacattcagggatgtggccatcgacttctctcaggaggagtgggaatgcctggaccctgctcagagggacttgtacgtggatgtaatgttggagaactatagtaacttggtgtcactgggtaaggtcatctgcctgaaataatttagagtctcctctttgcatcatcagttttctgcactggaaattacagggctatctttgaagaaaccaggtgaatttcttctcccccttcccaagggcatgcttttatacttgctgggttagaaatgggtttgttaaacacgttgatcttccccatccctcagtgagctttacaccattctcgggccctccctgcaatcacctctctcctttaatggccaaggggctggatttgcattatagaacatttatttcataactatggcaaagaaaccagatttcataaattctgcaaatattatattgaatatctactcctggccagccttgtgctgagcactgtcaattgaatcatgaacaagctttgataacttgcccattttcgtgcagtttactttgtagtaaagcagaaacatcaaataagtaaatttataaatagataaatagtatgtaatgaagcaaattctttggaaaaggtaaacagcataagggaatagaaaatgatgaggactgacagggctaatttaggtaagacagtcggggaacgctttcttgaacagagatgtggagcctgggatctctatgtgaatatc

SEQ ID NO: 17686 - DNA, 301 bp, Homo sapiens
gagcttgcctgccagaagctcctctcccagcctgcgagcatttccaggctcttgtttcccatcagcctctgggtccaaactaaccacaggtctctgggtccttttccggtgtccttaaggttcttggactctgcatgtgctgccaggttgccagatttctaagaaggagtttgaagaggagaaaaggatttttgcatgtttagaaatcaaggttcaggagaatcttgacagtgaatgtgtctcattacattgaataacagctacaggatgttcgagagctggtaggtgtaaattgtttcag

SEQ ID NO: 17687 - DNA, 1048 bp, Homo sapiens
gagcttgcctgccagaagctcctctcccagcctgcgagcatttccaggctcttgtttcccatcagcctctgggtccaaactaaccacaggtctctgggtccttttccggtgtccttaaggttcttggactctgcatgtgctgccaggttgccagatttctaagaaggagtttgaagaggagaaaaggatttttgcatgtttagaaatcaaggttcagttctggcttttctggattctgtgcttcaccaatagaggaatcccatggagcattaattagttcttgcaattccagaaccatgactgatgggttggtgacattcagggatgtggccatcgacttctctcaggaggagtgggaatgcctggaccctgctcagagggacttgtacgtggatgtaatgttggagaactatagtaacttggtgtcactgggtaaggtcatctgcctgaaataatttagagtctcctctttgcatcatcagttttctgcactggaaattacagggctatctttgaagaaaccaggtgaatttcttctcccccttcccaagggcatgcttttatacttgctgggttagaaatgggtttgttaaacacgttgatcttccccatccctcagtgagctttacaccattctcgggccctccctgcaatcacctctctcctttaatggccaaggggctggatttgcattatagaacatttatttcataactatggcaaagaaaccagatttcataaattctgcaaatattatattgaatatctactcctggccagccttgtgctgagcactgtcaattgaatcatgaacaagctttgataacttgcccattttcgtgcagtttactttgtagtaaagcagaaacatcaaataagtaaatttataaatagataaatagtatgtaatgaagcaaattctttggaaaaggtaaacagcataagggaatagaaaatgatgaggactgacagggctaatttaggtaagacagtcggggaacgctttcttgaacagagatgtggagcctgggatctctatgtgaatatc

SEQ ID NO: 17688 - DNA, 353 bp, Homo sapiens
aagttcaatcatgctaatatacataaaagacaaacacggagccttctttggtcaactgggaaaggagatgaggagagaggtatattgttaagaggccttcagaagcaatgccttccaatcattcctgatttttttctgttttctttaatgcacatgtattctataattaggggagaaaatgttcaaaagcaagtccacaggtctagtttgaagggcaaataagctgggtgcagtggctcatgcctataatcccagcagtttgggaggctgaggcaggaggatcacttgagatcaggagtttgagaccagcctggccaacatgcagaaaccctgtctgtactaaaaatacaaaa

SEQ ID NO: 17689 - DNA, 1041 bp, Homo sapiens
cgtgagggccactaccccgaacccgctcacctgtctgccaatgcgcgccgcctcatcgtgcacctcctagcacccaacccggccgagcggcccagcctggaccacctgctgcaggacgacttcttcacacagggtttcactccagaccggctgccggcccactcctgccacagtccccccatcttcgccatacccccgcctctgggcaggatcttccggaaggtgggccagcggctgctcacccagtgccggccaccctgccccttcacgcctaaagaggcctcgggtccaggagaaggtgggccagaccctgactccatggagtgggacggcgagagctccctgtctgcgaaagaggttccctgcctggaaggccccatccacctggtcgcacaagggaccctgcagagtgacctggccgggcccgaggggagccggcggccagaggtggaggcggccctcagacacctgcagctgtgcctggatgtaggccccccggccacacaggaccccctgggagagcagcagcccatcctctgggcccccaaatgggtggattattccagcaaatacggctttggctaccagctcttggacggggggcgcacgggacggcacccacatggccctgcgaccccccggagggtgagcttcagtggagtcccggcccaactggtgctgagtggcgagggtgagggtttgcagctcaccctctgggagcaggggtcccctggcacctcctactccctggacgtcccgcggagccacgggcgcccccaccaccggacagcaccttcaccacgccctccgcatgctgcagagtatctagtgcccctgagggtcagagtggacccctgcatggtagtgccagggacccaggctccatttccattcctgtggctcccccagaggggctgtcctgggggagggctggggggcacacgggaggtgggttcttgccttgtggcatgactgttcaacccagactttgctgggatctcttcctttttcattaaagacaatttgaaatgctgtaggcca

SEQ ID NO: 17690 - DNA, 1208 bp, Homo sapiens
cgtgagggccactaccccgaacccgctcacctgtctgccaatgcgcgccgcctcatcgtgcacctcctagcacccaacccggccgagcggcccagcctggaccacctgctgcaggacgacttcttcacacaggtgggcggcggtcctcggcgtggggtccctggcgtggggtccctggcaggtgatgagccagagcctgccctgctcagccgagggaggccccgccctgtcccaggtaacccaggtgctcaggggctgggtgacctaagccggggataaccccaaatccccatccaaagggtttcactccagaccggctgccggcccactcctgccacagtccccccatcttcgccatacccccgcctctgggcaggatcttccggaaggtgggccagcggctgctcacccagtgccggccaccctgccccttcacgcctaaagaggcctcgggtccaggagaaggtgggccagaccctgactccatggagtgggacggcgagagctccctgtctgcgaaagaggttccctgcctggaaggccccatccacctggtcgcacaagggaccctgcagagtgacctggccgggcccgaggggagccggcggccagaggtggaggcggccctcagacacctgcagctgtgcctggatgtaggccccccggccacacaggaccccctgggagagcagcagcccatcctctgggcccccaaatgggtggattattccagcaaatacggctttggctaccagctcttggacggggggcgcacgggacggcacccacatggccctgcgaccccccggagggtgagcttcagtggagtcccggcccaactggtgctgagtggcgagggtgagggtttgcagctcaccctctgggagcaggggtcccctggcacctcctactccctggacgtcccgcggagccacgggcgcccccaccaccggacagcaccttcaccacgccctccgcatgctgcagagtatctagtgcccctgagggtcagagtggacccctgcatggtagtgccagggacccaggctccatttccattcctgtggctcccccagaggggctgtcctgggggagggctggggggcacacgggaggtgggttcttgccttgtggcatgactgttcaacccagactttgctgggatctcttcctttttcattaaagacaatttgaaatgctgtaggcca

SEQ ID NO: 17691 - DNA, 577 bp, Homo sapiens
cgtgagggccactaccccgaacccgctcacctgtctgccaatgcgcgccgcctcatcgtgcacctcctagcacccaacccggccgagcggcccagcctggaccacctgctgcaggacgacttcttcacacaggtgggcggcggtcctcggcgtggggtccctggcgtggggtccctggcaggtgatgagccagagcctgccctgctcagccgagggaggccccgccctgtcccaggtaacccaggtgctcaggggctgggtgacctaagccggggataaccccaaatccccatccaaagggtttcactccagaccggctgccggcccactcctgccacagtccccccatcttcgccatacccccgcctctgggcaggatcttccggaaggtgggccagcggctgctcacccagtgccggccaccctgccccttcacgcctaaagaggcctcgggtccaggagaaggtgggccagaccctgactccatggagtgggacggcgaggtgagacatcggggtgggggacacggggagacacaggtggagggcatgctggcccctgctaaaaccccctcccc

SEQ ID NO: 17692 - DNA, 516 bp, Homo sapiens
  misc_feature (510)..(510): n is a, c, g, or t
gcctgtcttttctgtgggatacacaggacagtgccatgattctagtagatggtagatgtgagccagcccgaaggaacatcaaggagagttccaggaatgaaccgtgaaatccctaaggatccaaaaggatatgcagaaagaagagcagcacgtcatacccaagaccaacatctctcagtgtttcacgctaacccaaggagagacactagcagtcttctctgcaggaccccttgaatttacattgaattccatccccagccgagcaggtgcttaaagtcaacaggggacactccattttcttggaatttcattctggcaaagagggtgtgagcagcaataaggtgcttcacatcatgaagggatatttttccatcatcttgggatttcattctgggacatagagtatgagccacaataaggtcagagaggagtgaggatacaatcttgtgaggggtgaactgggtccagcaactttgcctgcaaaaataaataaattaattaattaattantaaatg

SEQ ID NO: 17693 - DNA, 533 bp, Homo sapiens
gcctgtcttttctgtgggatacacaggacagtgccatgattctagtagatggtagatgtgagccagcccgaaggaacatcaaggagagttccaggaatgaaccgtgaaatccctaaggatccaaaaggatatgcagaaagaagagcagcacgtcatacccaagaccaacatctctcagtgtttcacgctaacccaaggagagacactagcagtcttctctgcaggaccccttgaatttacattgaattccatccccagccgagcaggtgcttaaagtcaacaggggacactccattttcttggaatttcattctggcaaagagggtgtgagcagcaataaggtgggtcttcctgaagaaccaaccaaactcaggagctaccaggctgcttgtttctgtgaaaatgttgtgagtgttggatgtctgcatgtgtgtgtgccattgtgtgcttaggggtgtgtgtgtgtgtgtgtgtgagtgtgtgtgtgtttgcctttaactggagtctgcttaaaggactgtggataatgcact

SEQ ID NO: 17694 - DNA, 385 bp, Homo sapiens
gatggaaaaagcccacttcaccctactattgtcactaatttcaactaaaatttacgaagaaaatgcatgcagtccgtatttcagtactctaagaagtaagagacagtaggcatgttggacagcgtctcactctgtcacccaggctggagtgaactgcacaatgggctcagtacgatatccgtggctcaagcaatcctcccacctcagcctctcaagtagctgggactacgcctggccaatttgtatatgttttgtaaagatgagcttttgccatcttgctcagttggtctcaaactcctgagctcaagtgatcgcctgcttcggcctcccaaaatgctgggattacagatgagagccacaacacctagcctctatttggtttcca

SEQ ID NO: 17695 - DNA, 388 bp, Homo sapiens
tttaaaatatgaaatgaacaaatgtttactcataatatcttaaaatgtcatttttttattagtaaaaatctttacttcatttcttattatatgcaattaggctatattagtttttaactatttgtaacttttaaatttgatatgttcaccctttcttttaatctattttttcaaacctaataaatattattagctgattgaaattaacaactcatttaaaagaaacagaattttataatatcctgtttcttcctcagagtagtttgatagtattaacgtaataactattctcactttattcaataagatcaaagtaaagatttgggggaagcatagaaacaacatttatttgccttaactggatctttaatacagcacctctacttaa

SEQ ID NO: 17696 - DNA, 444 bp, Homo sapiens
actgttggaatttagctgtgtatgacatagaagtattcatctaagaatgactttagagggtaactttctgtgatgctgcagcttaaatggaaaaccacctccttcccaagtccactgatttgctgatggactacgttgtcttggcaagtgaagtctctgccatctctggcagctctttctgattagggatctgacaagcacctaagtaattcatgcaatgactttatgcaagaaatttcattatttctaataacttacagtgttttaatattttaatgtatttatgcttaattatatattgtaatatgcattagcagagcttcgtctctggatctaagtaaaatacaactaatgcaaaattttcttccagtttttttttttaaacagggaattaagtcctgaaatgaaactacatgcaaagacagcaagcaatctcttgccaga

SEQ ID NO: 17697 - DNA, 2054 bp, Homo sapiens
gggacaagctgcttctgataggagccaggctggcagtggcagggctggagggtcctggcctgggatggggaggggactgcccaaggttggggtgggtcaaggctgctggcctgggagactggtgatttcctggtaactggacccctggcaacctcccagtgattcaggctgggcctttttggattctaatcagcctctctctctctttccctttctgtgtaactggaggccacttggctgctggttttcattgggcatttctggactttagatctcagctcttgtttacccatctcagagccttccctgatctgcctccagcactgcccatccttgcccctttccactgtccttggagcttcctgggcccttccctgggcctcaggatcccaccctccatcccgtctgccctgcaggatgccgcagctgagcctgtcctggctgggcctcgggcccgtggcagcatccccgtggctgcttctgctgctggttgggggctcctggctcctggcccgcgtcctggcctggacctacaccttctatgacaactgccgccgcctccagtgttttcctcaacccccgaaacagaactggttttggggacaccagggcctggtcactcccacggaagagggcatgaagacattgacccagctggtgaccacatatccccagggctttaagttgtggctgggtcctaccttccccctcctcattttatgccaccctgacatcatccggcctatcaccagtgcctcagctgctgtcgcacccaaggatatgattttctatggcttcctgaagccctggctgggggatgggctcctgctgagtggtggtgacaagtggagccgccaccgtcggatgttgacgcctgccttccatttcaacatcttgaagccttatatgaagattttcaacaagagtgtgaacatcatgcacgacaagtggcagcgcctggcctcagagggcagcgccagactggacatgtttgaacacatcagcctcatgaccttggacagtctgcagaaatgtgtcttcagctttgaaagcaattgtcaggagaagcccagtgaatatattgccgccatcttggagctcagtgcctttgtagaaaagagaaaccagcagattctcttgcacacggacttcctgtattatctcactcctgatgggcagcgcttccgcagggcctgccacctggtgcacgacttcacagatgccgtcatccaggagcggcgccgcaccctccccactcagggtattgatgatttcctcaagaacaaggcaaagtccaagactttagacttcattgatgtgcttctgctgagcaaggatgaagatgggaaggaattgtctgatgaggacataagagcagaagctgacaccttcatgtttgagggccatgacactacagccagtggtctctcctgggtcctataccaccttgcaaagcacccagaataccaggaacagtgccggcaagaagtgcaagagcttctgaaggaccgtgaacctatagagattgaatgggacgacctggcccagctgcccttcctgaccatgtgcattaaggagagcctgcggttgcatcccccagtcccggtcatctcccgatgttgcacgcaggactttgtgctcccagacggccgcgtcatccccaaaggcattgtctgcctcatcaatattatcgggatccattacaacccaactgtgtggccagaccctgaggtctacgaccccttccgtttcgaccaagagaacatcaaggagaggtcacctctggcttttattcccttctcggcagggcccagaaactgcatcgggcaggcgttcgccatggctgagatgaaggtggtcctggcgctcacgctgctgcacttccgcatcctgccgacccacactgaaccccgcaggaaacccgagctgatattgcgcgcagagggtggactttggctgcgggtggagcccctgggtgcgaactcacagtgactgccctacccacccacccacctctgtagagtcccagaaacaaaactatgctgacacctctg

SEQ ID NO: 17698 - DNA, 1729 bp, Homo sapiens
gggacaagctgcttctgataggagccaggctggcagtggcagggctggagggtcctggcctgggatggggaggggactgcccaaggttggggtgggtcaaggctgctggcctgggagactggtgatttcctggtaactggacccctggcaacctcccagtgattcaggctgggcctttttggattctaatcagcctctctctctctttccctttctgtgtaactggaggccacttggctgctggttttcattgggcatttctggactttagatctcagctcttgtttacccatctcagagccttccctgatctgcctccagcactgcccatccttgcccctttccactgtccttggagcttcctgggcccttccctgggcctcaggatcccaccctccatcccgtctgccctgcaggatgccgcagctgagcctgtcctggctgggcctcgggcccgtggcagcatccccgtggctgcttctgctgctggttgggggctcctggctcctggcccgcgtcctggcctggacctacaccttctatgacaactgccgccgcctccagtgttttcctcaacccccgaaacagaactggttttggggacaccagggcctggtcactcccacggaagagggcatgaagacattgacccagctggtgaccacatatccccagggctttaagttgtggctgggtcctaccttccccctcctcattttatgccaccctgacatcatccggcctatcaccagtgcctcagctgctgtcgcacccaaggatatgattttctatggcttcctgaagccctggctgggggatgggctcctgctgagtggtggtgacaagtggagccgccaccgtcggatgttgacgcctgccttccatttcaacatcttgaagccttatatgaagattttcaacaagagtgtgaacatcatgcacgacaagtggcagcgcctggcctcagagggcagcgccagactggacatgtttgaacacatcagcctcatgaccttggacagtctgcagaaatgtgtcttcagctttgaaagcaattgtcaggagaagcccagtgaatatattgccgccatcttggagctcagtgcctttgtagaaaagagaaaccagcagattctcttgcacacggacttcctgtattatctcactcctgatgggcagcgcttccgcagggcctgccacctggtgcacgacttcacagatgccgtcatccaggagcggcgccgcaccctccccactcagggtattgatgatttcctcaagaacaaggcaaagtccaagactttagacttcattgatgtgcttctgctgagcaaggatgaagatgggaaggaattgtctgatgaggacataagagcagaagctgacaccttcatgtttgagggccatgacactacagccagtggtctctcctgggtcctataccaccttgcaaagcacccagaataccaggaacagtgccggcaagaagtgcaagagcttctgaaggaccgtgaacctatagagattgaatgggacgacctggcccagctgcccttcctggtccacctctgttcctctccctcctgaccgcagggctttgtctccaacactctccccgaccttcctctgagtcagtcccttccctctgttcactccatctccacctccggcttcgcctctgttggagcacagggatcaggcattacttctgacgtcttgcccaccagct

SEQ ID NO: 17699 - DNA, 1262 bp, Homo sapiens
gggacaagctgcttctgataggagccaggctggcagtggcagggctggagggtcctggcctgggatggggaggggactgcccaaggttggggtgggtcaaggctgctggcctgggagactggtgatttcctggtaactggacccctggcaacctcccagtgattcaggctgggcctttttggattctaatcagcctctctctctctttccctttctgtgtaactggaggccacttggctgctggttttcattgggcatttctggactttagatctcagctcttgtttacccatctcagagccttccctgatctgcctccagcactgcccatccttgcccctttccactgtccttggagcttcctgggcccttccctgggcctcaggatcccaccctccatcccgtctgccctgcaggatgccgcagctgagcctgtcctggctgggcctcgggcccgtggcagcatccccgtggctgcttctgctgctggttgggggctcctggctcctggcccgcgtcctggcctggacctacaccttctatgacaactgccgccgcctccagtgttttcctcaacccccgaaacagaactggttttggggacaccagggcctggtcactcccacggaagagggcatgaagacattgacccagctggtgaccacatatccccagggctttaagttgtggctgggtcctaccttccccctcctcattttatgccaccctgacatcatccggcctatcaccagtgcctcaggtacccgtgcagagcttgtggtagtgggggctgggaaacatcaaaggccttctagcctctcccctccccaagcttctgtgtggcccctgcagggcccaggcccctcttcctgcttctctctcagccatgttcctctttccttcatgtattcacgaaccccccatgtcagcgtctcctccctccactgccatctctctctgcctttgtgttctgggcaccactggggctccaaaaagcctcaatttagggccctgtcctcgagaaagccccgtgcttgaggaaatggatctggacagagacatctcaaacttcgtggagtcaggaattggcaagaaggagatgggtgtgacaactgggagaacaaggtctttcctgggggcagattggaaggcttcctggaggaggagttgctggaaaaatgagtaaaaagattttaaagcaaggggaagggtgatgcagtggacatcattagtatacaggtaccgctgccaggcctggcatc

SEQ ID NO: 17700 - DNA, 712 bp, Homo sapiens
aaaggatggctgaccggggtaaccagaagtgcctttctgaaggcactttctgtgtgtcatagctgggctttgaaggatggggagggggaaagagacagtagacatgaggttgtggaagtagacaggggatagatttcaggacattgaaaatcaggaaaagtggcatgaactttatcaggaggttcccaggaatcttttgaagagggttgggccgatgacagatgtggtcacagctgagctctgtggaggtctgcctgtcatgtagacgctacatggagcagacattgaatgcaagtctgttatggtgggggctgggtcagaaagagctggaagacagtgaggtctgagttttgtgaacagtttttggaaggaaaagagtgcaggctggatactgggtgggagagacgggagagaagcatggtgtccaagctatgctctgggtaccttggtgcatggaggcagctctcagagatggaatgcctcagagaagagagtttggagagtcaagtctcctggctgtttctggatactcaatttcctgatgggcagtagcttctagctgctggtgagaggtgctcctgggactttgcatatgttaagttgttacctccttcatgcaggaagcccagtgaatatattgccgccatcttggagctcagtgcctttgtagaaaagagaaaccagcagattctcttgcacacggacttcctgt

SEQ ID NO: 17701 - DNA, 299 bp, Homo sapiens
gtgtagacttcataagtatgcaaaacaaaaacagctggtatcaagcaccacttgatcacctttaaattcagaaaacacacttgacaaaatgcgacaccccttcaggatgaaaacactcattaaataaggaatagaaagtacttccttgacctgataaagggcatctatgaaaaatccagagctaacatacacaaatgggccataaggacaaatggccaaaagatgtcaacatcattagccatcaggggaaatgtaaatcaaagccacagtgagataccacttcacacccgctaggatgg

SEQ ID NO: 17702 - DNA, 431 bp, Homo sapiens
aatgctgggatttaaacgagggtaagctgactccagaggcatcattcttaactgctgtgcaacactctctgctaagagctaacataggattgaaattttagtaggtgggagatttttcttaatcctcacagcaacctggatgtagtattaccctgttttcacaggtgcagaaactgagtttcaagtagatccagcaacttgcccgagtcgtaaaaccagaaagagtggagccgagaatcaaagcttggatgcctgaccagagtggacctttgaaacactcctctgtatattgtcttcaggctgcctgtatttacaaactctgatattgacctcattacttctccccgttctgcaggcagaagactgctatgagagcacttaggacccaagcgacatcagccttggaacaggcaaataaaaatggaaagcta

SEQ ID NO: 17703 - DNA, 1900 bp, Homo sapiens
ggcgacggcgctgccgccattttgtggggtgtttgtcgcagcggccgaggagggaagacggcagtttggcgacatttctcggccgaagggccatttgcttttgcggagatgcggcattccaaaagaactcactgtcctgattgggatagcagagaaagctggggacatgaaagctatcgtggaagtcacaagcggaagaggagatctcatagtagcacacaagagaacaggcattgtaaaccacatcaccagtttaaagaatctgattgtcattatttagaagcaaggtccttgaatgagcgagattatcgggaccggagatacgttgacgaatacaggaatgactactgtgaaggatatgttcctagacattatcacagagacattgaaagcgggtatcgaatccactgcagtaaatcttcagtccgcagcaggagaagcagtcctaaaaggaagcgcaatagacactgttcaagtcatcagtcacgttcgaagagccaccgaaggaaaagatccaggagtatagaggatgatgaggagggtcacctgatctgtcaaagtggagacgttctaagagcaagatatgaaatcgtggacactttgggtgaaggagcctttggcaaagttgtagagtgcattgatcatggcatggatggcatgcatgtagcagtgaaaatcgtaaaaaatgtaggccgttaccgtgaagcagctcgttcagaaatccaagtattagagcacttaaatagtactgatcccaatagtgtcttccgatgtgtccagatgctagaatggtttgatcatcatggtcatgtttgtattgtgtttgaactactgggacttagtacttacgatttcattaaagaaaacagctttctgccatttcaaattgaccacatcaggcagatggcgtatcagatctgccagtcaataaattttttacatcataataaattaacccatacagatctgaagcctgaaaatattttgtttgtgaagtctgactatgtagtcaaatataattctaaaatgaaacgtgatgaacgcacactgaaaaacacagatatcaaagttgttgactttggaagtgcaacgtatgatgatgaacatcacagtactttggtgtctacccggcactacagagctcccgaggtcattttggctttaggttggtctcagccttgtgatgtttggagcataggttgcattcttattgaatattaccttggtttcacagtctttcagactcatgatagtaaagagcacctggcaatgatggaacgaatattaggacccataccacaacacatgattcagaaaacaagaaaacgcaagtattttcaccataaccagctagattgggatgaacacagttctgctggtagatatgttaggagacgctgcaaaccgttgaaggaatttatgctttgtcatgatgaagaacatgagaaactgtttgacctggttcgaagaatgttagaatatgatccaactcaaagaattaccttggatgaagcattgcagcatcctttctttgacttattaaaaaagaaatgaaatgggaatcagtggtcttactatatacttctctagaagagattacttaagactgtgtcagtcaactaaacattctaatatttttgtaaacattaaattattttgtacagttaagtgtaaatattgtatgttttgtatcaatagcataattaacttgttaagcaagtatggtcttgataatgcattagaaaaattaaaattaatttttctttttgaaattaccatttttaaatacctttgaaatatcctttgtgtccagtgataaatgtgattgatcttgccttttgtacatggaggtcacctctgaagtgattttttttgagtaaaaggaaatcttgactacttt

SEQ ID NO: 17704 - DNA, 2476 bp, Homo sapiens
atttttagataatcattaaagaccacagaaaatgtaacagatcctactcttcaaaataattgctattcagtattaaaacgcagtcagctgcgtgattcccgtgattgcgttacaagctttgtctccttcgacttggagtctttgtccaggacgatgagacactcaaagagaacttactgtcctgattgggatgacaaggattgggattatggaaaatggaggagcagcagcagtcataaaagaaggaagagatcacatagcagtgcccaggagaacaagcgctgcaaatacaatcactctaaaatgtgtgatagccattatttggaaagcaggtctataaatgagaaagattatcatagtcgacgctacattgatgagtacagaaatgactacactcaaggatgtgaacctggacatcgccaaagagaccatgaaagccggtatcagaaccatagtagcaagtcttctggtagaagtggaagaagtagttataaaagcaaacacaggattcaccacagtacttcacatcgtcggtcacatggggatgaaattgttgatactttaggtgaaggagcttttggaaaagttgtggagtgcatcgatcataaagcgggaggtagacatgtagcagtaaaaatagttaaaaatgtggatagatactgtgaagctgctcgctcagaaatacaagttctggaacatctgaatacaacagaccccaacagtactttccgatgtgtccagatgctagaatggtttgatcatcatggtcatgtttgtattgtgtttgaactactgggacttagtacttacgatttcattaaagaaaacagctttctgccatttcaaattgaccacatcaggcagatggcgtatcagatctgccagtcaataaatttgtgaattttttgcacagtaataagttgactcacacagacttaaagcctgaaaacatcttatttgtgcagtctgactacacagaggcgtataatcccaaaataaaacgtgatgaacgcacactgaaaaacacagatatcaaagttgttgactttggaagtgcaacgtatgatgatgaacatcacagtactttggtgtctacccggcactacagagctcccgaggtcattttggctttaggttggtctcagccttgtgatgtttggagcataggttgcattcttattgaatattaccttggtttcacagtctttcagactcatgatagtaaagagcacctggcaatgatggaacgaatattaggacccataccacaacacatgattcagaaaacaagaaaacgcaagtattttcaccataaccagctagattgggatgaacacagttctgctggtagatatgttaggagacgctgcaaaccgttgaaggaatttatgctttgtcatgatgaagaacatgagaaactgtttgacctggttcgaagaatgttagaatatgatccaactcaaagaattaccttggatgaagcattgcagcatcctttctttgacttattaaaaaagaaatgaaatgggaatcagtggtcttactatatacttctctagaagagattacttaagactgtgtcagtcaactaaacattctaatatttttgtaaacattaaattattttgtacagttaagtgtaaatattgtatgttttgtatcaatagcataattaacttgttaagcaagtatggtcttgataatgcattagaaaaattaaaattaatttttctttttgaaattaccatttttaaatacctttgaaatatcctttgtgtccagtgataaatgtgattgatcttgccttttgtacatggaggtcacctctgaagtgattttttttgagtaaaaggaaatcttgactactttatattcttaaaggaatattctttatatacttcaaatttagaacttaactttaaaagtttttcttctgtaattgttgaacgggtgattattattaactctagataagcaggtactagaaaccaaaactcagaaaatgtttactgttagaattctattaaattttaagtgttgtattctttttcattgggtgatgtcagggtgataaccagacattcatggaaaggcatgcagtttgtccattgtgacagtttgtttaataaaaccacatacacactttatttaagattaaaatctaactggaaagtcagcttggaaaatggacatttccaagtatgtttggtgagtcacagatataaaaatagaaattctgatgagaggtttcagtttttaataccaagtccttaggagtcttaacattggccagcatctgtttatcaaatgacataaatacgtaaacctataagaattaagtttattaattaggcaatttatgtctgtgataattcttacgggagaaagaggatttgattggaaagcagtttgggaagaaagtgctgctgaaatttccagaatttaattgattggttacataaactttttgacttca

SEQ ID NO: 17705 - DNA, 2097 bp, Homo sapiens
ggcgacggcgctgccgccattttgtggggtgtttgtcgcagcggccgaggagggaagacggcagtttggcgacatttctcggccgaagggccatttgcttttgcggagatgcggcattccaaaagaactcactgtcctgattgggatagcagagaaagctggggacatgaaagctatcgtggaagtcacaagcggaagaggagatctcatagtagcacacaagagaacaggcattgtaaaccacatcaccagtttaaagaatctgattgtcattatttagaagcaaggtccttgaatgagcgagattatcgggaccggagatacgttgacgaatacaggaatgactactgtgaaggatatgttcctagacattatcacagagacattgaaagcgggtatcgaatccactgcagtaaatcttcagtccgcagcaggagaagcagtcctaaaaggaagcgcaatagacactgttcaagtcatcagtcacgttcgaagagccaccgaaggaaaagatccaggagtatagaggatgatgaggagggtcacctgatctgtcaaagtggagacgttctaagagcaagatatgaaatcgtggacactttgggtgaaggagcctttggcaaagttgtagagtgcattgatcatggcatggatggcatgcatgtagcagtgaaaatcgtaaaaaatgtaggccgttaccgtgaagcagctcgttcagaaatccaagtattagagcacttaaatagtactgatcccaatagtgtcttccgatgtgtccagatgctagaatggtttgatcatcatggtcatgtttgtattgtgtttgaactactgggacttagtacttacgatttcattaaagaaaacagctttctgccatttcaaattgaccacatcaggcagatggcgtatcagatctgccagtcaataaattttttacatcataataaattaacccatacagatctgaagcctgaaaatattttgtttgtgaagtctgactatgtagtcaaatataattctaaaatgaaacgtgatgaacgcacactgaaaaacacagatatcaaagttgttgactttggaagtgcaacgtatgatgatgaacatcacagtactttggtgtctacccggcactacagagctcccgaggtcattttggctttaggttggtctcagccttgtgatgtttggagcataggttgcattcttattgaatattaccttggtttcacagtctttcagactcatgatagtaaagagcacctggcaatgatggaacgaatattaggacccataccacaacacatgattcagaaaacaagaaaacgcaagtattttcaccataaccagctagattgggatgaacacagttctgctggtagatatgttaggagacgctgcaaaccgttgaaggaatttatgctttgtcatgatgaagaacatgagaaactgtttgacctggttcgaagaatgttagaatatgatccaactcaaagaattaccttggatgaagcattgcagcatcctttctttgacttattaaaaaagaaatgaaatgggaatcagtggtcttactatatacttctctagaagagattacttaagactgtgtcagtcaactaaacattctaatatttttgtaaacattaaattattttgtacagttaagtgtaaaaaaaaaaaaaaaaaaaaaaaaaaaaaaaaaaaaaaaaaaaaaaaaaaaaaaaaaaaaaaaaaaaaaaaaaaaaacttgtcggccgcttgggccaagcccattttaaatttggccaggttaagctttgggcccgaattcgaggttaatttgccaaagtcccttattggggagggggtttcaatataaaggcccgtggtttaacaatcacaggctggaaaaacccaaggctttcccaaactaaatcttttggggtaaaaccccctttccctaggggggggtatagtaaaaagggcccgccccgatcgtcttttcaaaacgtgggggaaccctaaatggcaaatggaaatttggaacgcgtaactatttttttttccggtttacttttggttgccacttaagtttttaccctgggccgggtgggt

SEQ ID NO: 17706 - DNA, 447 bp, Homo sapiens
tccttgccatgtttttcttctgtaacataaactgtgccctgtgaatttctggggactgaatttgaaattgctcctgccaactgttcgtggcctggtgcttatctgaatgcctgaatatctccccgctgaatgaattgcgtattctgccctgaattcactctgatatattgattggctggacgatcttggtgctgcccacttgccgttccagaagagccaccgaaggaaaagatccaggagtatagaggatgatgaggagggtcacctgatctgtcaaagtggagacgttctaagagcaagatgtatagaatatttttcaacactttttaaactttgcagaaagaataatctttttaagaatagtttgtcagcggggggctaaagaactcttcattgcttttttattttgctttttgtgggtttgtttgttcttttatatttcttctt

SEQ ID NO: 17707 - DNA, 234 bp, Homo sapiens
gatggggtttcactgtgttagccagaatggtctccatcttctgacctcgtaatccacccacctcagtctcccaaagtgctgggattacaggcgtgagccaccgcacctggccctgtcttttctaatttcttaactatcatttctatccccttagaattgattctccactcagcatgcagaattatccctttgaaaatcagattatattcctacctaaaccacccccaatagctt

SEQ ID NO: 17708 - DNA, 677 bp, Homo sapiens
gcgtgggtgtgagtgtgcctgtgtgtgtgctcgtacagcagttgttatcatgatgtacttactggctgtctaccgatggctttcctttcattctactattttttggttgacttctgtgagctgtgagtcatcggtggtaacattatgcattgaatggattagctggtacctaaaaatagccgaggccctcatgcaggcggcacatgagcctgtagagtcagtccctttgcagccaaggcagacccacttgccaacattgaacatgccgagcttggtggcgatgaatcctaatgtatcaaaaaatagatagttggtgactgccctgtgtgcagagcccagccctggatttgtgccgcagttgttggtaatacacacttcctgtctgttctggtgctggaaaggctccaacagagaaactatgtcaaaccacatttttgtttgtgggtctttgtacctctctaaaaaaaaaaaaaaaggagaaaaatgctctcctttaaactgtatgtgctatatgtgcccccaactgggtcatcttatatgttttgattctctcagactgttgttgtttatagcatttagaaaaaaattaaagactattgtttaaagcagttttaggtgtacagcaagtagagagaggtctcacacacctaacagttttccctgttattaaaatcttg

SEQ ID NO: 17709 - DNA, 428 bp, Homo sapiens
gaaaagagtaggaaatgggtaaggatttaacaggcaattcacagaagacaaagtaaccggcccctaaatgggagcatatcctcaacttcactagtaataaaggaaacgaatttaaaagacgatacatttctcacttcttctctccttatagctgtattccacctttgaccatacagcctgtttttatttatcgtaagcataggttaataaatacagggcttaccatgttaatatcttctttctatggatgcgtaacaacttattttatcattccgtttgtgactgaaattgaatttctttctgtaaacctgaaaatatctgagacaagcctcgatcaacttagaagtttactttgccaagattaaggacacgtcttgggagacaggtctgtgcctttctccaaagatgatttcgagggcttcagtatt

SEQ ID NO: 17710 - DNA, 2023 bp, Homo sapiens
ttaatggcaaattatttaacattatctgataataatctgcagaaggtttaattttcctcctcaatttgaagttcaagatgtttttctcttccagggagattttttcgactgacatctttaacttaccttccaatcatattactaacgtagccttcttcctagattttttaattgtttgatcatgagcgaacacttctactctctgtgatagatttgcaaacagaggaaataacgcatcctcgtgtccctcttcttggtgttccacaggccatgtgtgccctagccctcgttcatgcaaggtctgtgtagggaaggtggacttcagctcagcaacagcatcccttcccacagggatcaggtgggtggcttgagataccccttccatggggcaccacccattcagtgagacggggaagccctgggtgggagggagaacacctccacatgtcttctactctctccataggatggaatgagtgtcccagtcccaggagtatccatttcccactgtgtagcccagtactctggtctcactgtctctgctgaatcctgtctcactgtgcatattattgtggtttatatcagtcagtaaaccaatgtgagtcttcatctcttgcattcttaggttcatagttttgtgtgtctcctgtaatgacccttctctttccctttccaactcctgaaagattgccactatttcctctggaactttgtttcgttaccagcaaaatcctcgacatccatacccgtttcctggctttccctctcctttcctctgaatggtagtcttttatattcagctgtccacttgacatcaaaatagacattttgaactcaatttgcctaaaacttacccacaaatttctccccaagtctctccctaactgcaacaacaaaaaccacaggcttctccctgtcactggatggcaactccattcttttgattgcttaagccaggcatccgattgagtactttcttgattttctccagcccacatccagtccatcggcaagccctgttggtcctaccttcagaatatgtccggggttccagttgtcctggccaccctgctgctgtaaccatggtcagaactccatcctgcccctctggattatgactttcgtttcctcacagtggtcctgcttgggctctaggcccttccactcccattctctctacagcagctgggctgattcctttagcacccaaggatatgttggcatcacagtgacttagataccatcacaaagacctcccattcaacttagagtgaaagtcagaatcctcacagtgaatccccaggccctagaggatgtgaacccccaggccctagaggatctgaacccccatccctcctctgattatctctcccacccccacttccctttgcattctgctccagctgccctggcctcatggctgggtttccaccaaagcaggcacttcccatcacagggccatttccccgcctgtggcttctgcttgacattcccttttccctgatatccccttgactcattattccctttcttccttaactcttctgagatccagcttctcagtgataccacacagccctactccccccagagcccatctagagctcacctttccagtcgcccttgccaggctcagtggaggctctttgttccccatacagtacgtgtcgtcgtactatattgttaggcttatttaatttatgtatgttttgcctttttgtgctaaatgtaaacaccacaaggggaggtatctttgtctgttgacaatgatacattcaatgtttctcaagcacccccaatgctggtttgtatgtggttatcattcaatctgtatttgttgaatgaataaatgattgactatgtggagagcaaaattgatggacctgaaaatgttttgcaaaatgtaatatagtctactgatacaatatttattattattggccaataatgtttaatgccaagtgctaaattagtaaaattttggggatatagagaaaaattgagcagaagtcttaagtttgta

SEQ ID NO: 17711 - DNA, 358 bp, Homo sapiens
cattatatgcacagtatgtacagcttatttaatttatgtatgttttgcctttttgtgctaaatgtaaacaccacaaggggaggtatctttgtctgttgacaatgatacattcaatgtttctcaagcacccccaatgctggtttgtatgtggttatcattcaatctgtatttgttgaatgaataaatgattgactatgtggagagcaaaattgatggacctgaaaatgttttgcaaaatgtaatatagtctactgatacaatatttattattattggccaataatgtttaatgccaagtgctaaattagtaaaattttggggatatagagaaaaattgagcagaagtcttaagtttgta

SEQ ID NO: 17712 - DNA, 506 bp, Homo sapiens
tctttaaacacgctggtaatgggcataagaaaacacttgtgaagtgtaatcagttattagcagctgatcaattatcctcatggatagctgttgggggggagaaaagaagcaataataagccccttgattaactaatttgaatatctttggggaacaaattctgaaatttctttctattttctccctcgctattgtaattgtaacgccggccgcacatctgctggataaagacggatggaaatggtaatgagtgttctgctgtgaacaggccccttgttcgggatccaggaatgaaggcgctggaggtgtgggggctgcgggggctgccggctgggcctggggacctctcactggctggagtgggcagcactgccatgggcttggcctccgcctcctgatgagatgtcaaggtcgggggaagccggctgcgatgggcaaagggcatgcgcagacaggtgcccctctgggaaacattacagattctcctgaagaccctctagggccag

SEQ ID NO: 17713 - DNA, 380 bp, Homo sapiens
ataccagttgtactggaataaggcccaccctaatgacttcatcttaattaatgatatctgcagtgacccaatttcaattcaacacatacagatggataggaagatagctagttttgtgtctctaaaatcttagttaagagtggctgcagtcaagcaacctcagtcaagcaacctacagatttggaattagcacctactgtgcattaaaccattaattaattaattaactaatgatagcctgggcgacagagtgagacattgtctcaaaaaaaaggaaatatatatatatatatatatgtgtgtgtgtgtgtgtgtgtgtgtaaaatagaatgaacgttatagacaagcaggcacactgtagaagcttctactcatctgtg

SEQ ID NO: 17714 - DNA, 708 bp, Homo sapiens
tttgcattagagtatgattctgtctggagtagaggtcaagaactggttcccccagttcgggaaactgttccacagactgcctcacagctttgccacagaaccttctgctcaccacttgtgtttggcaggtgatttcatgtataaatctgctttctgctcgaggatgtcaatctagagtttctggggactgcttaaggcaaattcgtaaataatttggctctcttagtaataaatgagtggctctgcacagactgttgttttgacttggagagaagtctgcccaggattccatcttaatgcacgtgctgatcttctggcatgtcctgagctttagtccatctgttaggggcattgtgcccattgcagaggtagcctgccaacaccaagcatcctgaaatgaagcaagtaaattccattcattgattggtataaaaagtgccatggggtgctcaaagctgcctagtgtgtacccatgtaacagacagtttcattttagaccatgcttagttaataagagaaacattcattcactccctcagaacattttattagtggccaagtgctgtggctcatgcctgtggtcctaggctacttgggaagctgaggttggaggatcacttgagcccaggagattgaggctgcattgaactgtgattgtgccactgaactccagcttggatgacacagtgagaccctgtctcaaaaaaa

SEQ ID NO: 17715 - DNA, 617 bp, Homo sapiens
gacaccaggcccggctaatttttttgtatgtttagtagagatggggtttcaccgtgttagccaggatggtctcaatctcctgaccttgtgatccacccgcctcggcctcccaaagtgctgggattacaggtgtgagccactgcgtccagccccagcaaggaatgttttcatgagataggaggaagatatttttcctttgaagtctgtacagacaaccaacagaagttggggctgtttctctggagagacacaatggagagccagctctcaggttctgtggggactgtcttagctgggcagtgccagggtggctgaccccaaggtggctgacctctggctggggcagcgacccctggccctactgaatcagaagagcccgtatttccaggtctttggccacattttctttggcatatctggtacctcttgaaatcagagctgtgaaacccataaatgaccccagaaggtcatttttattggcatttctgacctctgctgtggggttgaatcctactttgcttgcaagcgttgcagtgacactgttcaccctgactaagtctccatttgattcagagagctgttaaagagtatgaacttggggtacgtgttgtactgga

SEQ ID NO: 17716 - DNA, 451 bp, Homo sapiens
ttttctttcctaaactgaacttcatctgttgtcctaattcacttagagtcctagactcctggatgtgcaatgttctttgagatgatcatgtccaatttccccgttataaagattcaggaagctgaaactcagaaatattagcagacaactcacaaagatgggaataaacttgtaatgctctccagtttaatccctttttttaaatattaaggccattatgcctttgttccaatctctaaaacaatttctatttgtgttttaagcctcggttcttaattgtttcttgttgaagcagaggaatataatataatcctgaaaagaaagacttacttcttttcagtagccttctaatagatttcccagaaatgttgcagttgcattttttagcatatggtaggtatacttttttttttttatagagtcttatatgttctttaagttttaaaaatgg

SEQ ID NO: 17717 - DNA, 530 bp, Homo sapiens
aggttacagtgtaggttttccagagtttttgggctgggcacacacactcttaagttggcagctttctttttaacagtggtggtgagcttctttaaataacgacttcctaaatttgtgaaagagtgtgtgtactgggagggagagaagtgctgttacaaaaccccaaggcttcttgtctgtgggttgagcacagcccgctacggttttggaaagatggatttcctggaagacaactttgctactgagcatcatctagtaaataaagtactaagacacagaagtctataacaaatattggaaattattgttaatccaaacaatctcagatatatttgacatccatatgttttaattgtatagcccagttatgtcaagcagagtcatgtactggcataaagatgttttggtccaatgatccaactgccatatatggatgggtgggtactgtggaggtccttatgggagctgaaaattccctattgcctaatgacatcatagctgtcataacttcatagcacaacatgtcactc

SEQ ID NO: 17718 - DNA, 1358 bp, Homo sapiens
  misc_feature (940)..(940): n is a, c, g, or t
  misc_feature (1014)..(1014): n is a, c, g, or t
  misc_feature (1018)..(1018): n is a, c, g, or t
  misc_feature (1061)..(1061): n is a, c, g, or t
gaaactgggggagggcatggggacgggggactcaacaggacgctgcttatggtggtatcacagctaagacttattgtaatgacagaattcaaagcaaaattagcaaagggaaaaagcaccttgggtgaagtcgggggaggccaggctggagcttccagagtcctcttccagggggttcctacaggatgcacttaatgtctttagcaatgagttgtgacaacatgtaggagatgttgtctagcagggaagctcattagaaattcagtgcccatggtgttttgctaggggccagtcatgtgggcacctctgcctggcaggtaccaaaattctaggctctgggaaggaaagcaggtgctgagcaagaaccatattgtttgtacaaataatttcggcccagtgaactactctcatcagttaggggatggtggggaccctcctgaaatctgggttcccagatgccagcagaattcctaaggagagcagcttcaggcctgtggcgtgaactctgttctactcacgggtgatctcatgcccatcccaccaggctctcgagggcaagcactccccagtcgtgggcgtaagtgaggcctttaatgagctcttctttgccacaggggcctggaaggtcctcagcatgctgggccataatgaagaaaacatcctttccctatagtgtacgtgataataacctaggcatttatggccctgcgtgtggctatcttgcataccttacttttgctcttgcaaaaattctgtcaggtcgggagagttctctctgttttacagatgaggacgcgactctcagttaagaagaaccaactgcagttctctgacctcaaatctagttttatttccactatcatttcctgacttcattctggaaccaccttcctgttgtttttgatgacacatgtgtgtcacttcggttatttacttaaanaaaaaagtctcgttaaaaagagctgggtatagtggctcatggctgtaattccactgctttgggaggctgaggcnggangatcacttgaggctaggagtttgacgccagcctgggcaacatngtgaaactctgtctctacaaaaataataatgataaataggctgggtgtggtggctcacgcctgtaatcccactttgggaggccaaggtgggcagttcgcttgctgccaggagtttgagaccagcctggtcaacatggtgaaaccctgtctttactaaaaatacaaaaattagccgagtgtgctggcgcacacctgtagtcccagctactggggaggctgaggcaggacaatcgcttgaactcaggaggcagaggttgcctgcactccagcctagatgactgagtaagactctgtctc

SEQ ID NO: 17719 - DNA, 237 bp, Homo sapiens
caagctgcccggctctccagccccggcgcctgcctctttatctgtaccttcaaaaacagtaataagcaaacccaggcacctctgggaacagcctctggcctcctgccctgccctgtgtaaccagcctgtcctcacacccaccagggaggaggagtcggcactggttaaccctctggtctaccaggcccggttcccaggttgcagcagggagacaaactgttgctcaagaaaatcctt

SEQ ID NO: 17720 - DNA, 377 bp, Homo sapiens
tccaaaaagtgtttatgcttgaaactaaccaattggtaatatatggataacgtattccctatcatctacctgtgtctttctcttagttgtagttaagtgactggaaggcaaaagagtgaaattgacaatgatggaaatcacatttaattagcatgaaatggtaagcagctgctatgttcaaatcttcctgttatgagattgtcagacttataaaatattatccacatggcgcagttttgaacagtgaaagagaagttgaatcaaaatttaaaagctcagtgcatagaaattttgggtcctaggagacacacaagaatttcccttttaaggaaattggctacgtattgtttgcaaacccctattctggtaaaaaaaaa

SEQ ID NO: 17721 - DNA, 689 bp, Homo sapiens
atagaaagagataaggaagtaaagatagccaatgaagagtgtgttttaagttagttattctgtgtgcaagtagaacttaacctggggaactatgagaagcaatgaaaaatacaagcctcagagttatctcaatcccaataagcaccagttaagggctgagggctgctcttaggagaacttcattccgaagacctgtgaaccacatgggttccagggccaaagaaagcccacaagcaaagagatacaagtgtgggtagttggaagtcagggcaggacactctgagaaagtcaaggccaagggggagatcgatatacagatagataggtagatagatagataggtagatagatagatagatagatagatagatagatagaagatagatagatacagatagatttatatatgtgtgtttgtgtgtgtgcgtgcgtgtgtatatctcaaattattaaagtcttctggtagtttctctggtgataatgtatttaatctttgtagcactttgcctcccaagagcaatgtatgtttgaaatctgccataaataatgtgaaaatgcttgaccaactgatttggttagcaaacgctctctggctaacatccagaagtgctacagttttctgtattttttattttgataaattttgttgtagaacaagaaaaagatatagacacttaaaaaaaaaaaaa

SEQ ID NO: 17722 - DNA, 461 bp, Homo sapiens
tttccatgtttctgtcctgggagtgatttggaggaataaaccaggatggctagggtaattgctctgagcaggtacattgtccttcacctcttcttgaagggctaactcctattcatccttcaagtctcagcatagggatcacctctatggagacatcttccctgacatctgtgaccacgttgcttccccaaggcttccacagccctgggcttcccctgtcacagaactcatcacattatattaaaattaccatatattgcatctgtctctccaactagactgtagggttcactggagtcatgaaccatattctaatcatctttatatcctcagcacttagtacaataactgctcgtagctgctccaccaatgtttatggagctgagctcattctgcttgcaaacgtcattatttgttgtttcttaatttccacaaagaagaaggagaaaaggaaaaaggag

SEQ ID NO: 17723 - DNA, 279 bp, Homo sapiens
gagacggttttcaccatgttggccaggatggtctccatcctctgacctcatgatccgcccacctcggcctcccaaagtgctgggattacaggcgtaagacccgcgccctgccctggagtcccttctatactcgggcatccaagacagaaaacttacctcaaatggaaataaataaatgtttattaagtttggaaccttgagttaggtggactctgctatttcaggaatgatgaacttgaactacacatttggtcttaataatgccctttgactctggac

SEQ ID NO: 17724 - DNA, 311 bp, Homo sapiens
acaagtttttagccgtatctcaaaaaccaataaattttcctgaaaaacccatacattatcattcacaattaaacttatataaagatgtcctaggagagccatttgcaaattatcatcttcatcctatactgtgaaatgtctacttttaaaactctgtctatttttgcctgcatgttcatgatatatattagtgtctgcatatatatactgcaaattcaatattttgaagtaattatctttatattatctttataatataatttatctttatattttatactgttagtgtagttcagtacatgtttattacc

SEQ ID NO: 17725 - DNA, 407 bp, Homo sapiens
atacaaggatgttcatcgcaggtgatggtgctagcaaaaaatgagaaacaccctaaatgtccattgataggagaatgagaattcggtagtggtgagtcccttccagggaatgggatggagtattggaagagatgagctttatgtcattgaactggtaagaaaagatcttcaaaatacatttttagtggaaaaaaagatggagcagaaaatgttcagttgtgagttgatttatgtaatcagatgataagcttgtatatgtatatatacgtgtttataaagtacaagagcaagtcaggaagggcagacatcaacacatatcagtcgttaccatgggtggtgggttgagacttccactctgggttctgggtactgagttctctacagtacccagaatttcttgttagaca

SEQ ID NO: 17726 - DNA, 487 bp, Homo sapiens
aaatggttatgccaatggcagaattagccatggtccatagtgactaattctgtttatgcttattagtcttatatgcttgtattcataattcaaagtcctagaaaagaaaaagaaacaagtgaagaaaactcaaaatgcctaaacatccaaataaaagaaagtttcagaactttgagctcaaagagagctacatgttcaagtgagctctgtgagacaaggcaaaatgccttcctcataatatcttaagccaggaatatgttctttgaatttacgacttcttaaaataggagtcaataaaaaaaatgcagcaagtgtttgcaagttaactggggagaaaaatgtttttctcctaacaccacattcaagttctatgtattgacactaatatgagtatatacaaacttgtaaccagaagaggtagattctctaatcctttatgtaagttaactcatatatgcttaaatttgttatttttatgtaaaacaat

SEQ ID NO: 17727 - DNA, 420 bp, Homo sapiens
gactcagtacaataccaaccaacaaattagcaggcttttttttctttggtagacattaacaaacattctaaaattacatggaaatgtaaaagacctagaatatttttaaaaactgaaaaattagaaccaattggaggactaacattatgtgatttaaagacttaagctttagtcaacaagaccatgtgttattggtgcaaatagaaaaatggaacaaaatagagagcgaagaaatatatggaagcacaaagatgtcaagataactcagtaaaaaagaatattcttttcaacaaatgttgccagaataattggatactcgtaaaaaattaactcttatttataccacttactatatacaaaaatcaactcaaattggatcatggacctacatgtaaaatctaaaacaataaaacgtataaa

SEQ ID NO: 17728 - DNA, 383 bp, Homo sapiens
gaaatcagaacagtggtttcctctggggggataaagattaactgaaagggaatactgggaaactttccagatgacagaatatattttgtctgggtggtggttatgtgggtgtatacacttatccaaatccaaatgtatcttgtatattcaacatacagctgtgtgtttcactgcatgtaaattttaatttactgtataataatgcgtaagtatacaggtgcatacttatatttgtgatggacatcccaacaactgaaaagtaagttctacttaaagatgaaaaaatacgatacatttaactacgtattttatctcctctttttttgaccattgtaaacataggatatcttaaaataaataataaagattttaaaaatgtttat

SEQ ID NO: 17729 - DNA, 311 bp, Homo sapiens
actttctccagaatgaaaatgcaaatcattaaagtaattgctctcttcttcaaaagatcactttactcacaaccctcttttaagattttttttaagagtttctagtttccttcccaacaactctgatcagcagttctcagagtcccactgtttacattcattctcttgttgtattgcagccaagcaaatatttggtctgtgcagccagcagaaaggtgagagcagatgagatgatgaatctaaacggttggatgttatgagtcctcctgccttgttaggaggtacaggcacccagtacatcagctaagcac

SEQ ID NO: 17730 - DNA, 429 bp, Homo sapiens
gcatttcttaactgttttacaatataatatctaatatgtttttccaagccaggattcatattttttcagtatctctgatagttatttctaccttttgctgaatataactttcatgttagcctattaattttttagaaattaagaaactataattttgtatttcttcttgttaatttaatgacactcttctctggtcacagtctcagaattgtgactttagtgtcacctatattgtgaaatattcattttaaaaattagtttttttttttttgagacggagtctcactccgttgcccaggtggagtgcattggcatgatctcgactcactgcaacctccgcctgctgggttcaagcaattctcttgccttagcctcctgagtggctggcactactacaggcacacaccaccatgctcagctaattttttg

SEQ ID NO: 17731 - DNA, 241 bp, Homo sapiens
attctattggtattggaagtaaaatccatcaaggtgctttggttaataaatgaaatatttttcttagagttctgctgagtcagtgacttttgactatttgaatgagtccattctttaactgaagtttaatctctacatattatagacctgaatgctgataggttaatggacatttttttctcaaaaagtgtcttttggacttcaatttgatggttgtgatacgagaaaggggtcctgatct

SEQ ID NO: 17732 - DNA, 466 bp, Homo sapiens
gcgattactttaaaaaatatatggcaatgtcaaaataaatgccaagaatcatatttctaggaatgcaaaagtgcttctcatatactcatatattaggtttcacagtattggttgcttactatatttgtttttatttttattatatatcataattacacatttttatttgcatttgttgcttattgtagtaaaaaggtaaaaaaaaaatgaacttgttaatgattagcttttatttgactaaccagttgaccaattttgctctgttttcaaattgcatatgatggggtattatgctgaaactgctaatatattgggtatttattgatacttaggaatagtcagtatttataaatatttaagaatgtcatggtccttatgttttgatgtttaaaatgttcactttgttgtacgttacatagtgtcttattcaaaattgaaaataataaaggtatttctaatagatgta

SEQ ID NO: 17733 - DNA, 350 bp, Homo sapiens
gtcttcagcttatagaagaatacctggaaatattaggtgtacaatatgttaatttatgttaaatgagtctatgaaatgaacacatacataatgtgaaatagaaactaaggccttaaaggtgactaaaagtcaggattccccacacctcacccaaatatagagtaaggagaattatgagtggttctgaattaagacaagattagtgaaagcaagtttttgctaagattcaaccattgtaagtaaaatttaaatgattaaaatgagagaatcaagatttattatattggaccccttattcttcagatagaaaccaggaatgaaccatctaccttctttgtgtacctaataat

SEQ ID NO: 17734 - DNA, 288 bp, Homo sapiens
tttatcttctctagcttactttattgcaagcgtgtactatataatacatattgacaaaatatgtggaaattgttctcagtgaggcatccagtcaacagtaggctatcagtagttaggtttttggaaagtaaaaagttatacatagatctttgactgcgtgtggggtcagcacccctaacccctgtgttgttcaagggtcaactgtgctcttttgcaagctttgaagcatgtgaacgccagcacctaccctgttcttgaggaaatccagcgttcccttgatacttgacc

SEQ ID NO: 17735 - DNA, 384 bp, Homo sapiens
cctgtaatcccagcactttgagaggccaatgcaggaggatcacttgaggccaggtggttgaggctacagttagctatgatcacaccactgcattcctgtctggacaacagaacaagacccaaactcatttaaataaaaaaaaaaaaaaaggaaagaagaaagaaagagtttaagaaaaatccatttggaggttcattgattgatttattcacttagaaattgtatattgagtgctcactatgtgccaaacattattctaggtactggaggtaaagcaattaacaaagcatatgaaatttctatcctcgtgaaacttatgttttggtgggacaagatagacaataaacagaaaaatagataatttggcaatgaaaatcagtgcta

SEQ ID NO: 17736 - DNA, 1964 bp, Homo sapiens
aagccaggtatgataaacgccatacagcgcttagtgacaaacacataaaactgtagctcctgcctctgtagcagaggtgacagccaagggcagtcctgtgctatccaggcctggtaggggggcagcctcgcctcagttgagggctgagggagagactgaggtgcagcagatggcagtggtaaccaaaccagttcccttgccgtgggtggggacacaggagaagcacggaagcatctggaactgagcaatcaggacaggaggctcaagcctgggtgagtcaggagtccgggggctttcttttcatccaacccattgtctgctggtgtctcggcaaaagccagccagccagccgtggcccttcaccgttcttcagactctagggtgagcccagcccagcgacacaacagaaaccaagtgccacgggggccggtgtcctccaccagcatttctcctctggtcacatctacgtcctgatgggacttctccctcctccttggaccatcagctttacagtccagaccaccctgcagccacccggtggtctcccagctgccccagtctcgggcaggatggcttttgagcctgttgggagagaccttgccaggagaatggtgcccagggcaggcaagaggacacagactctgggagctagaagagttgcggcccaggggccaggcccactcccagaggacaggaggcccaaaagcggggaaaggctccatgttacggtggccccatgctgggagtttgtgctgccttctgtctccctgactgcccaagcgtggggtggtgtggggcaggaggcatcctctggtgttccctagcagcccaggctgtgtgcaggggctcccattttgtgtctcagctgcaagaaggccacaaagggaggaggggctcatgggactgctgagaagaaggtgtgcagaaagggagtgtggccctagatcagtcctttaaaaagcctctgttacctgaaaggaggtcaagcagagaggaatggctgcgtgtgtgtcctaccgggcaggacaggacagagggaggtcattgttacacacacatcccccctcctttcctccttcccctccacttccctgtgaaggcctgaggcaggctgtggccaggctcaggccctgactgtggggtacacaccagggagggccacgcctccccacagacggggtggagtggtcagtggagccagcaccctctgctgcttcagcatctccgcctggagccagctgtcccctctctctcaggctccatccgaacaaaaggaaggcagagcctgagatccggcaccccatccccctccactcagcactgagttagagctgggtgggggcatgtctgccttcacacgctgccttatggcttctgtgtctccaacagccctcagcctctggctgctctccttcccaatagtcacaagatttaccatgataataataggttaagacttgaatggtgttttcatcttctttcatcttcaccctgtctcacgttacgttatttttatcctgatgacagaataggtactacaggtatttttactctggttttacagtcaaagaaactgaggcacaggcaggtttgcccaaggtcacataactgcttaatagcagggtagacaggtgaagtaactggatgtgtatcagccatgccctttccccatgcccccggcactccccatgacagctctctgaatcccaacattttattcttttgcaggattagacccaagcatataaattcctttttccctctctccattcccacattcttttattttcacgtacttactataggccttgtaggggctctgtgaacaagacaaaggccaggtgctgtggctgatgcctgtaatcccaatgctttgggaggctaggcatttgagaccaacctgggtaacaaagcaagacccggtctctataaaaaataaaaattacccgggtatggtggtgtgc

SEQ ID NO: 17737 - DNA, 1885 bp, Homo sapiens
aagccaggtatgataaacgccatacagcgcttagtgacaaacacataaaactgtagctcctgcctctgtagcagaggtgacagccaagggcagtcctgtgctatccaggcctggtaggggggcagcctcgcctcagttgagggctgagggagagactgaggtgcagcagatggcagtggtaaccaaaccagttcccttgccgtgggtggggacacaggagaagcacggaagcatctggaactgagcaatcaggacaggaggctcaagcctgggtgagtcaggagtccgggggctttcttttcatccaacccattgtctgctggtgtctcggcaaaagccagccagccagccgtggcccttcaccgttcttcagactctagggtgagcccagcccagcgacacaacagaaaccaagtgccacgggggccggtgtcctccaccagcatttctcctctggtcacatctacgtcctgatgggacttctccctcctccttggaccatcagctttacagtccagaccaccctgcagccacccggtggtctcccagctgccccagtctcgggcaggatggcttttgagcctgttgggagagaccttgccaggagaatggtgcccagggcaggcaagaggacacagactctgggagctagaagagttgcggcccaggggccaggcccactcccagaggacaggaggcccaaaagcggggaaaggctccatgttacggtggccccatgctgggagtttgtgctgccttctgtctccctgactgcccaagcgtggggtggtgtggggcaggaggcatcctctggtgttccctagcagcccaggctgtgtgcaggggctcccattttgtgtctcagctgcaagaaggccacaaagggaggaggggctcatgggactgctgagaagaaggtgtgcagaaagggagtgtggccctagatcagtcctttaaaaagcctctgttacctgaaaggaggtcaagcagagaggaatggctgcgtgtgtgtcctaccgggcaggacaggacagagggaggtcattgttacacacacatcccccctcctttcctccttcccctccacttccctgtgaaggcctgaggcaggctgtggccaggctcaggccctgactgtggggtacacaccagggagggccacgcctccccacagacggggtggagtggtcagtggagccagcaccctctgctgcttcagcatctccgcctggagccagctgtcccctctctctcaggctccatccgaacaaaaggaaggcagagcctgagatccggcaccccatccccctccactcagcactgagttagagctgggtgggggcatgtctgccttcacacgctgccttatggcttctgtgtctccaacagccctcagcctctggctgctctccttcccaatagtcacaagatttaccatgataataataggttaagacttgaatggtgttttcatcttctttcatcttcaccctgtctcacgttacgttatttttatcctgatgacagaataggtactacaggtatttttactctggttttacagtcaaagaaactgaggcacaggcaggtttgcccaaggtcacataactgcttaatagcagggtagacaggtgaagtaactggatgtgtatcagccatgccctttccccatgcccccggcactcctccattcccacattcttttattttcacgtacttactataggccttgtaggggctctgtgaacaagacaaaggccaggtgctgtggctgatgcctgtaatcccaatgctttgggaggctaggcatttgagaccaacctgggtaacaaagcaagacccggtctctataaaaaataaaaattacccgggtatggtggtgtgc

SEQ ID NO: 17738 - DNA, 388 bp, Homo sapiens
tcagcccacttttgctccccacgtggcaagcacactcccccaaacaagcaatagcctgtggcttcagaggaacctacaaaggcagcatctgtagatttttccttcttcaactctaagacttgaatgtttccctcttccccacacactttttttttaaaccaagaaataaaaaagttttcactcttaaaggtgcaaagcagtttcattcttatgcaacacagccttcctcctactgtcttatagtctgtggatgttaaattatagattccaattgaattttaatactctagagattttacatttgtggttgtcaagaccccgttttggtaaacctagggagctccgcacaaaagcattgatattcagaaaaggcactgacctacaaatt

SEQ ID NO: 17739 - DNA, 229 bp, Homo sapiens
accatgtggggctggaacaagcagccctatccagcagtaaggaggagacctgtcccgcttgagtgtcaacagaggtacagtgggaaatctgaacttctaccttcacctggcagcaatgaaatgacaccccctctcatgccaatgcagtgacagacaaagttagttaaaacaaaagttttaaattaagatccaaagtcttataacataatacaaaaatgtccagatctca

SEQ ID NO: 17740 - DNA, 408 bp, Homo sapiens
cctgtctccccgcttgcctactttctctgtcctcacaccaaccttttggttttgaaaagactcatttctggtcttacaaaatgtagctttagtaagactggtcagatataccaaaattgggataaagtcttagcttaagtaaagaaatatttcagctgtgaattgtgtccccccccgcgctccaccccgccaaactgctacatcgaagtgcttaactctcagtacctcagattgggagagaatgccaagggtgtggctggacagccatgtgctaacgaaattaggtacgtgactcacggatccaatcaacctccacagtagatgccagaaatagagaggtggttatctgaaaaagatccgcggagtgccctcttgtctgactgcttggacccccatgacttgcatggg

SEQ ID NO: 17741 - DNA, 261 bp, Homo sapiens
caactgcagtaaaggcagggcctggcggctggactagtgctcaacttcctacttagtaaatttccatgttcatttgggccccgggaagcacgcttccttccctagccggaagcgaaacgggccctgaatcctcaaaccttaatagtctttagaagagagaagccttgacttcacttttgaggaagggaaccgtgacctggatttagtacgacttaagtttattcacacgtaagaaacggaggtctttcaggataagagcaa

SEQ ID NO: 17742 - DNA, 478 bp, Homo sapiens
ctttaaaaaaaaaaaattttttttaacagagatagggtctttgctgtgtggtccaaactggtccacataactcctggcttcaagcaatcctcccacctcagcttcccaaagtcctgggattacaggcgtgagccactgtgcccacctgcatttttcagactcagttcatcatctgttttagtctactactgttttatattcattcttgtttgtatttcctgtttccttccactttcatacatactgagttaatttttttttaagtcccataaaatcatactgacttcctcctattcttactgggattatctgtaattatatgaccagattttccttgtcagaacctcacagaacttggctgggcgcggtggctcacacctggaatcccagcactttgggaggccaaggcgggtggatcacctgaggtcaggagtccaagaccagcctggccaacatggtgaaacctcgtctctactaa

SEQ ID NO: 17743 - DNA, 237 bp, Homo sapiens
ctggcttctaggtacagctgccagtatttacatataaaagctcctactttgcatgtctatgcctgacttctcaggctgctttctgtttagacaggaaatggttttgagctgctttttatgaaaggaaaattccaccgagaactttcaccctttctagctgcctaaaaattatttcttaataactcttgtattattgtctttttattgtttatttatttatttatttaagatggagtc

SEQ ID NO: 17744 - DNA, 767 bp, Homo sapiens
  misc_feature (758)..(758): n is a, c, g, or t
gacaatgggtgaactctagatggtttgaatagattctctttgaggtaccaattctaaaatgtttgctattccttgaatataggaaatgctaaaaacaatatgtgattaaataccaagtgaatagagtaatagtacagtttgaagtttggggtgttaataaatgatcagaatatcatggcttagcttcctgaaggaggttttttttttttttttttttttgagacaaggtcttgctctgttgcccaggttctagagtgcagtggtgcatgatcacggctcattgcagcctcgatcttgagggtccaagtgattctcccaaagtgctgttactacaggtatgacccaccacgcctggcctctgaaggagatttatataagtagaacaatggcaagtaggaaattagaagtattactttattattaatttgggcttttggccaaaataccaatgtaaatttgtgtagtaaacagggtgacatcatattacttaagctccaggactagtcaagggctctctcatcctcctaaatttcactgtcttactactctttggttgatggctttgcagaagaccccaacaattagtcttttagagtgtgtaagagtgaaatgaccaagaacaagaacacaaactcttacatgtatgtgacttttttttctatcttgcacttgaatcaagatttgtgtaacttttaatcttcattgatcttcatagttgtacacagggtattgaagctcatggtgctagctctctcctngtgccgaat

SEQ ID NO: 17745 - DNA, 2498 bp, Homo sapiens
  misc_feature (1899)..(1899): n is a, c, g, or t
  misc_feature (1922)..(1922): n is a, c, g, or t
  misc_feature (1958)..(1958): n is a, c, g, or t
  misc_feature (2291)..(2291): n is a, c, g, or t
  misc_feature (2333)..(2333): n is a, c, g, or t
  misc_feature (2336)..(2336): n is a, c, g, or t
  misc_feature (2338)..(2338): n is a, c, g, or t
  misc_feature (2351)..(2351): n is a, c, g, or t
  misc_feature (2377)..(2378): n is a, c, g, or t
  misc_feature (2387)..(2387): n is a, c, g, or t
  misc_feature (2450)..(2451): n is a, c, g, or t
  misc_feature (2481)..(2481): n is a, c, g, or t
gacaatgggtgaactctagatggtttgaatagattctctttgaggtaccaattctaaaatgtttgctattccttgaatataggaaatgctaaaaacaatatgtgattaaataccaagtgaatagagtaatagtacagtttgaagtttggggtgttaataaatgatcagaatatcatggcttagcttcctgaaggaggttttttttttttttttttttttgagacaaggtcttgctctgttgcccaggttctagagtgcagtggtgcatgatcacggctcattgcagcctcgatcttgagggtccaagtgattctcccacctcggcctcccaaagtgctgttactacaggtatgacccaccacgcctggcctctgaaggagatttatataagtagaacaatggcaagtaggaaattagaagtattactttattattaatttgggcttttggccaaaataccaatgtaaatttgtgtagtaaacagggtgacatcatattacttaagctccaggactagtcaagggctctctcatcctcctaaatttcactgtcttactactctttggttgatggctttgcagaagaccccaacaattagtcttttagagtgtgtaagagtgaaatgaccaagaacaagaacacaaactcttacatgtatgtgacttttttttctatcttgcacttgaatcaagatttgtgtaacttttaatcttcattgatcttcatagttgtacacagggttcaatcagtactgtggactcttgacccaatccgattagtgttccatcctcttagagagattcaagaagaaaggcaattgagggaaagagcaagacctcttgttggtctggcttcaaatctctaatgaggttgatgtaatggcctgtgaggagtaactaaaaatatttggctatctgcctaagcagccctacattctgacatttttcagtatagtccctgggactgggtggggggcggcggaactgcaaagtatttttcaaatttaaggataaagctggatgtggtggctcacaactgtaatcctagtgctttgggaggtcgaggcaggaggctcccttgagaccaggagtttgagaccagcctgggcaacgtaacaagacccccgtctctgcaaaaaaaattaaaaattagccaggcgtggtagcacgtgcctgtagcccaagctactcagaaggctgaggcgggaggattgtttgagcctaggaggtcaaggctgcagtgagccaatattgtgccattgctttccagcctgggagacagagtgagaccctgtctcaacaacaacaaaatgtaaggataagagaaccccataaggtacagttagggaaagatatcttgtgataaataagatttgccatgtggaaaactgacccaccatcagtgataactgctatggcattttggtaagatgctgatgctaattttggtaacaggagtgtcatctttgaggaatatgattatgtgtgattatattagcagagcaaagctgaagtctagtcacattgtactctcatattgtagcctgaagcaagaatatgatgacagcaggggagtgatgaacttggaggctagagaagagggaagcagaggcttctactgcctcggctgcattgatactggcttgcaaactcccggaggaagaggcccatcatctgctttggtcacttcagtgcaccttgcttgcgaagagtacagtaggcattcatttgttaaatgaatgaataatattaacgtatggtattattgaggtagagataagggagatttggcttaatcgcttgaccccaaggcatacttaggaagttattattattattattattttttgagatggagtctccctctgtcaccaagctggacgatctcagctcactgcancctccgcctcctgggctgaagcnattctgctgtctcagcctcccaaggagctggggttncaggcgatcaccaccacacctggctaaattttgtatttttagtagagatgggttttgccatgttgtccaggcaggtcttgaactcctgacctccggtgatctgcccacctctgcctcccaaagtgctgggggattataggtgtgagccaccgtgcctggccaaaaaattattgataataacaattttatacctcaaatatagtgtagaaaaaacattttagagcttagttatttgaataatcaaaaataagtttgttggccgggtgcagtggctcatgcctgtaatcccagcactttgggaggccaacacgggcggattgcctgaggtcagangtttgagaccagcctggccaacatggtgaaaccccatttctnctnanagtacaaaaattngctgggcatggtggcgaatgcctgtnntctcagctncttgggaggctgagacaggagaatctcttgaacccgggaggcagaggttgcagtgagctgaanncgcgccattgcactccagcctggaaaacangtgtgaaattccgtctc

SEQ ID NO: 17746 - DNA, 780 bp, Homo sapiens
  misc_feature (771)..(771): n is a, c, g, or t
gacaatgggtgaactctagatggtttgaatagattctctttgaggtaccaattctaaaatgtttgctattccttgaatataggaaatgctaaaaacaatatgtgattaaataccaagtgaatagagtaatagtacagtttgaagtttggggtgttaataaatgatcagaatatcatggcttagcttcctgaaggaggttttttttttttttttttttttgagacaaggtcttgctctgttgcccaggttctagagtgcagtggtgcatgatcacggctcattgcagcctcgatcttgagggtccaagtgattctcccacctcggcctcccaaagtgctgttactacaggtatgacccaccacgcctggcctctgaaggagatttatataagtagaacaatggcaagtaggaaattagaagtattactttattattaatttgggcttttggccaaaataccaatgtaaatttgtgtagtaaacagggtgacatcatattacttaagctccaggactagtcaagggctctctcatcctcctaaatttcactgtcttactactctttggttgatggctttgcagaagaccccaacaattagtcttttagagtgtgtaagagtgaaatgaccaagaacaagaacacaaactcttacatgtatgtgacttttttttctatcttgcacttgaatcaagatttgtgtaacttttaatcttcattgatcttcatagttgtacacagggtattgaagctcatggtgctagctctctcctngtgccgaat

SEQ ID NO: 17747 - DNA, 2485 bp, Homo sapiens
  misc_feature (1886)..(1886): n is a, c, g, or t
  misc_feature (1909)..(1909): n is a, c, g, or t
  misc_feature (1945)..(1945): n is a, c, g, or t
  misc_feature (2278)..(2278): n is a, c, g, or t
  misc_feature (2320)..(2320): n is a, c, g, or t
  misc_feature (2323)..(2323): n is a, c, g, or t
  misc_feature (2325)..(2325): n is a, c, g, or t
  misc_feature (2338)..(2338): n is a, c, g, or t
  misc_feature (2364)..(2365): n is a, c, g, or t
  misc_feature (2374)..(2374): n is a, c, g, or t
  misc_feature (2437)..(2438): n is a, c, g, or t
  misc_feature (2468)..(2468): n is a, c, g, or t
gacaatgggtgaactctagatggtttgaatagattctctttgaggtaccaattctaaaatgtttgctattccttgaatataggaaatgctaaaaacaatatgtgattaaataccaagtgaatagagtaatagtacagtttgaagtttggggtgttaataaatgatcagaatatcatggcttagcttcctgaaggaggttttttttttttttttttttttgagacaaggtcttgctctgttgcccaggttctagagtgcagtggtgcatgatcacggctcattgcagcctcgatcttgagggtccaagtgattctcccaaagtgctgttactacaggtatgacccaccacgcctggcctctgaaggagatttatataagtagaacaatggcaagtaggaaattagaagtattactttattattaatttgggcttttggccaaaataccaatgtaaatttgtgtagtaaacagggtgacatcatattacttaagctccaggactagtcaagggctctctcatcctcctaaatttcactgtcttactactctttggttgatggctttgcagaagaccccaacaattagtcttttagagtgtgtaagagtgaaatgaccaagaacaagaacacaaactcttacatgtatgtgacttttttttctatcttgcacttgaatcaagatttgtgtaacttttaatcttcattgatcttcatagttgtacacagggttcaatcagtactgtggactcttgacccaatccgattagtgttccatcctcttagagagattcaagaagaaaggcaattgagggaaagagcaagacctcttgttggtctggcttcaaatctctaatgaggttgatgtaatggcctgtgaggagtaactaaaaatatttggctatctgcctaagcagccctacattctgacatttttcagtatagtccctgggactgggtggggggcggcggaactgcaaagtatttttcaaatttaaggataaagctggatgtggtggctcacaactgtaatcctagtgctttgggaggtcgaggcaggaggctcccttgagaccaggagtttgagaccagcctgggcaacgtaacaagacccccgtctctgcaaaaaaaattaaaaattagccaggcgtggtagcacgtgcctgtagcccaagctactcagaaggctgaggcgggaggattgtttgagcctaggaggtcaaggctgcagtgagccaatattgtgccattgctttccagcctgggagacagagtgagaccctgtctcaacaacaacaaaatgtaaggataagagaaccccataaggtacagttagggaaagatatcttgtgataaataagatttgccatgtggaaaactgacccaccatcagtgataactgctatggcattttggtaagatgctgatgctaattttggtaacaggagtgtcatctttgaggaatatgattatgtgtgattatattagcagagcaaagctgaagtctagtcacattgtactctcatattgtagcctgaagcaagaatatgatgacagcaggggagtgatgaacttggaggctagagaagagggaagcagaggcttctactgcctcggctgcattgatactggcttgcaaactcccggaggaagaggcccatcatctgctttggtcacttcagtgcaccttgcttgcgaagagtacagtaggcattcatttgttaaatgaatgaataatattaacgtatggtattattgaggtagagataagggagatttggcttaatcgcttgaccccaaggcatacttaggaagttattattattattattattttttgagatggagtctccctctgtcaccaagctggacgatctcagctcactgcancctccgcctcctgggctgaagcnattctgctgtctcagcctcccaaggagctggggttncaggcgatcaccaccacacctggctaaattttgtatttttagtagagatgggttttgccatgttgtccaggcaggtcttgaactcctgacctccggtgatctgcccacctctgcctcccaaagtgctgggggattataggtgtgagccaccgtgcctggccaaaaaattattgataataacaattttatacctcaaatatagtgtagaaaaaacattttagagcttagttatttgaataatcaaaaataagtttgttggccgggtgcagtggctcatgcctgtaatcccagcactttgggaggccaacacgggcggattgcctgaggtcagangtttgagaccagcctggccaacatggtgaaaccccatttctnctnanagtacaaaaattngctgggcatggtggcgaatgcctgtnntctcagctncttgggaggctgagacaggagaatctcttgaacccgggaggcagaggttgcagtgagctgaanncgcgccattgcactccagcctggaaaacangtgtgaaattccgtctc

SEQ ID NO: 17748 - DNA, 356 bp, Homo sapiens
gaggccatatttttcttactatttatgtgacttaatgaaattatatctaaactctctatgcctcagtttccttatctgtaagatagagataagaacaacttacagttgttgtgaggagtgattattacctcagaaatgcttgaagggatgcctagcacatcaaagattctcaataaatcaataaattatgacactattacaatgattcccattttctaacatttatattaaaaagcatatgctgggcatagtgactcgcacctgtaatcccagcaccttgggaggccaaagtaagaggatcacttgaacccaggagctcaagaccagccagggcaacataggaagaccctgtctct

SEQ ID NO: 17749 - DNA, 169 bp, Homo sapiens
tatatatatatatatatatatatatatacacacacacacacatatatatacacatatatatacacacacacacgtatatacatatatacatatacacatgtgtatatatatatttctagctataaggctttgggtaaaaaaatgagataaataaaataacaagttattg

SEQ ID NO: 17750 - DNA, 490 bp, Homo sapiens
ggtctgggaggttaaaccgtttcctccagatcacattcccgggaagacgaacccagctgtgcctgactgctcctttcttctcactgcttctgcggaggtggagacgcccgcgtagcccgtgttgtcttcctctgcccactccaggccaagcatcccccttcctgtcacgcgctctttgatggcttcactgtcctggacaccccctcagatctgtgctgtctcagagaaagcaagcgagaatgggcccacggtgctcctcgtctttggaaatggattttacctttataagtgagagctttcagaggcacagagtcctggggctgcataggaacagggggcctggtcggggctcttttcctttccgggacctctttctctataaagaaaataaaaatgcgatttgaggactgttggtacaaatatgaatgtaatctaggctggattcataactgtatattattattatattaaaatttgacttgaaaagaag

SEQ ID NO: 17751 - DNA, 416 bp, Homo sapiens
ttgattcataaagtacctcctcattttaaaaagacattatgatgtaagagagccatttgataactttttagtgagctttgaaaggcaagttacagcctcagctagctagtaagattatctacctgccagaatggcacaaattctacattcaagggtagacgctggcacaacctacttacagattagccctttaaagcaatctgtagcattagaagatggaaccaaggaaatgtttgactgtgggttctggctgttgagaaataatttacacaccgaattagtgaaatgagtcactttctcttaatgtatttatgtacctgagagaatgcttttcaatgttaacctaactcaggtttgactaaattattcaattggaaattgtagaatattatttctgataaaccagaaataagtga

SEQ ID NO: 17752 - DNA, 501 bp, Homo sapiens
cttaagatccagcaacaggggattgctgtttaaaaaaaagactgtggtgcttgtttagaatgcgccgctgtgcagacataaaagtgacaacgtgacagtgtatttatggacatcggaggaagttcacggtggagtaaactttatagaaatgttgtttataaaccagtgtgcctgagatggttcgtgtctttgtaaaatctatttatagaagaggcttaggaaggagccgccctaaccacatttctggaggaataggagagaaacctggagggtgtaggtcttcacatttgcatgatcccggggagtgggggcggggaactgcctggggctgcagcgatcttcatcagtcactggtgaccttgagtgaacgagcctcagttccttcatctgtatagtggggatgaagcaggatttttgtactttttaaaaggcgagaattcatttcaaactcctagaaaagtgcctggcactgtgtgagcccttaataaacatgagcaaata

SEQ ID NO: 17753 - DNA, 776 bp, Homo sapiens
gtcacttccacgggacccaccagcttaaatgccggcagccctgggacttctggcctcacaatggttgagaatgcaagaccatcaaggcaaggatgttaattttcttcaatgaggtatctcctgtgtctggaatgatataaggctcatcccagatgatgaatgaacagtgaatctgtggagcttcagcatcctcacctaagatgggaatagctatgcccatctcccgagattattgtggagatcagatgttatgcgtacaaagcacagggcatgatacctgatacacatcttgctctataaagactggtagaggagtgtgttgttattgttatcaatatcattatcatttttatccataaaatgaagattataaaacctaagttgctgtgaatattgagacaaagtatgaaaagtacctggcaactggagatgtttaataaactggaatttattttctaaaaaaaaaaaagacacaacaaaaaaaaaaaaaaaaaaaaaacaaaaaaaaaaacaacaaagacaaaaccaaacaacccaagagggaaacaggacggcaacataggaaacagagaagatgagcaaacacgggaactcaaagccgaaaaaactagtgccacaacagcatacatagagactgcggaagaacagagacagatacacgatgatacaacagacaaacacgtacaaacacgaccgaggtaccacagctagaaaatgaataaaagatgagagacgataaaaaagagacagcacagtatacagggcccacaaaaaga

SEQ ID NO: 17754 - DNA, 406 bp, Homo sapiens
ggaaaatgacttcaagcttcttagagttcccctaaggcattctctatattcaatgaaaagcagctgtgaagtcataattatgttcacttcccactggcaactggcaagccctttatttttgtgcattcggaactcaccaagaataaataaagtccattccctccttgaggggctattctgccattccatctaggatttaaaagtttgccaattcctaaaacatctattgttatcaatagtcttgtgtctttcacaaagcggactttacaaaataagatgccatgtccagccaaataaatgagactgaacttcatggttgttgtttttacttcatcccggcaaaagaaatgaaattaaatataaaaagcagatgaccaaataaagtccaaatgaattaagtattgct

SEQ ID NO: 17755 - DNA, 6135 bp, Homo sapiens
ggggtcacgggcgaactagaacactgggaaaggggctgcaggttccggaccggaccggccgtgacccggaataatgagcaaggagggtgtggtgggttgaaagccatcctactttactcccgagttagagcatggattcagttttagtcttaagggggaagtgagattggagatttttatttttaattttgggcagaagcaggttgactctagggatctccagagcgagaggatttaacttcatgttgctcccgtgtttgaaggaggacaataaaagtcccaccgggcaaaattttcgtaacctctgcggtagaaaacgtcaggtatcttttaaatcgcgatagttttcgctgtgtcaggctttcttcggtggagctccgagggtagctaggttctaggtttgaaacagatgcagaatccaaaggcagcgcaaaaaacagccaccgattttgctatgtctctgagctgcgagataatcagacagctaaatggagtctgagcagctgttccatagaggctactatagaaacagctacaacagtataacaagtgcaagtagtgatgaggaacttttagatggagcaggtgttattatggactttcaaacatctgaagatgacaatttattagatggtgacactgcagttggaactcattatacaatgacaaatggaggcagcattaacagttctacacatttactggatcttttggatgaaccaattccaggtgttggtacatatgatgatttccatactattgattgggtgcgagaaaaatgtaaagacagagaaaggcatagacggatcaacagcaaaaagaaagaatcagcatgggaaatgacaaaaagtttgtatgatgcgtggtcaggatggctagtagtaacactaacaggattggcatcaggggcactggccggattaatagacattgctgccgattggatgactgacctaaaggagggcatttgccttagtgcgttgtggtacaaccacgaacagtgctgttggggatctaatgaaacaacatttgaagagagggataaatgtccacagtggaaaacatgggcagaattaatcataggtcaagcagagggtcctggttcttatatcatgaactacataatgtacatcttctgggccttgagttttgcctttcttgcagtttccctggtaaaggtatttgctccatatgcctgtggctctggaattccagagattaaaactattttaagtggattcatcatcagaggttacttgggaaaatggactttaatgattaaaaccatcacattagtcctggctgtggcatcaggtttgagtttaggaaaagaaggtcccctggtacatgttgcctgttgctgcggaaatatcttttcctacctctttccaaagtatagcacaaacgaagctaaaaaaagggaggtgctatcagctgcctcagctgcaggggtttctgtagcttttggtgcaccaattggaggagttctttttagcctggaagaggttagctattattttcctctcaaaactttatggagatcattttttgctgctttagtggctgcatttgttttgaggtccatcaatccatttggtaacagccgtctggtccttttttatgtggagtatcatacaccatggtacctttttgaactgtttccttttattcttctaggggtatttggagggctttggggagcctttttcattagggcaaatattgcctggtgtcgtcgacgcaagtccacgaaatttggaaagtatcccgttctggaagtcattattgttgcagccattactgctgtgatagccttccctaatccatacactaggctaaacaccagtgaactgatcaaagagctttttacagactgtggtcccctggaatcctcttctctttgtgactacagaaatgacatgaatgccagtaaaattgtcgatgacattcctgatcgtccagcaggcattggagtatattcagctatatggcagttatgcctggcactcatatttaaaatcataatgacagtattcacttttggcatcaaggttccatcaggcttgttcatccccagcatggccattggagcgatcgcaggaaggattgtggggattgcggtggagcagcttgcctactatcaccacgactggtttatctttaaggagtggtgtgaggtcggggctgattgcattacacctggcctttatgccatggttggtgctgctgcatgcttaggtggtgtgacaagaatgactgtctccctggtggttattgtttttgagcttactggaggcttggaatatattgttccccttatggctgcagtcatgaccagtaaatgggttggagatgcctttggcagggaaggcatttatgaagcacacatccgattaaatggataccctttcttggatgcaaaagaagaattcactcataccaccctggctgctgacgttatgagacctcgaaggaatgatcctcccttagctgtcctgacacaggacaatatgacagtggatgatatagaaaacatgattaatgaaaccagctacaatggatttcctgtcataatgtcaaaagaatctcagagattagtgggatttgccctcagaagagacctgacaattgcaatagaaagtgccaggaaaaaacaagaaggtatcgttggcagttctcgggtgtgttttgcacagcacaccccatctcttccagcagaaagtcctcggccattgaagcttcgaagcattcttgacatgagcccttttacagtgacagaccacaccccaatggagatcgtggtggatattttccgaaagctgggactgaggcagtgccttgtaactcacaatgggcgcctccttggcattataacaaaaaaagatatcctccggcatatggcccagacggcaaaccaagaccccgcttcaataatgttcaactgaatctcacagatgaggagagagaagaaacggaagaggaagtttatttgttgaatagcacaactctttaacctgagggagtcatctacttttttttcctcctttacaaaaaaagaaaggaaatataaaagccgggtttttgcaacatggtttgcaaataatgctggtggaatggaggagttgtttggggagggaaaggagagagaaggaaaggagtgaggtatttcccgtctaacagaaagcagcgtatcaactcctattgttctgcactggatgcattcagctgaggatgtgcctgatagtgcaggcttgcgcctcaacagagatgacagcagagtcctcgagcacctggcctgttgctccaacattgcaaagacacattatcagtccctatttctagagggattactttgaattgagccatctataaaactgcaaggtcttgcccttttttttaatcaaaactgttctgtttaattcatgaattgtatagttaagcattacctttctacattccagaagagcctttatttctctctctctctctctctctctctctctctctctactgagctgtaacaaagcctctttaaatcggtgtatccttttgaagcagtcctttctcatattgagatgtactgtgattttactgaggtttcatcacaagaagggagtgtttcttgtgccattaaccatgtagtttgtaccatcactaaatgcttggaacagtacacatgcaccacaacaaaggctcatcaaacaggtaaagtctcgaaggaagcgagaacgaaatctctcattgtgtgccgtgtggctcaaaaccgaaaacaatgaagcttggttttaaaggataaagttttcttttttgttttcctctcagactttatggataatgtgaccgggtcttatgcaaattttctatttctaaaactactactatgatatacaagtgctgttgagcataattaaataaaatgctgctgctttgacagtaaagagaaggaagtattctgattagctgtatctggtattaattgcatgttaaaacactggaatttttaaaattgaaattagatcagtcattcttttcttttctcaagatgtctcatggctgacactgaagaagaaatgtaattcataacttgcactaaatgtatattttttttcttaaaaatttaccattcttatttatatttttatggattaaaatttataaaatacagatcagttaatattgcacttaagtaattttacctttttaatgtgatttttatagaataattcagacttacaaatacagagatatgaacaaagtttacagtgggaacaaaggtttaaaaaaaggttgtggttctctctctgtgatccagtgtgcacataaacctttctctgatctttcactgccatcctctggattatgtcttctgacctgtccattttgacccattaactggaaagttgaaaaactacattaactggaaagttgaaaaactacattactttggagaataaaaccgaaagttcgtgtataccttcttaaaaaaaaaatcaaaccaaaaatgtgaaaacaatagaattgcaaagatagcagttaaaattttaatctgaaaataacctttgaatctcgggctaggttacgtccatatttgaagtggtcagtgatggtttgaacattttttgcaggatgagttaaaatgcactggattatatttgggatttttgtttttggaattgtctgttttaatcacagccttaattcacaattggcaaaggcagtttactcaaaggactgggctaaatattctgtaattatgcatttttgataggaaaatgaaatttttgcaaacagacattttctttttttttggctggagtgcagtggggcatggtcttggctcactgcagcgttgaccacctgggctcaagtgatactcccgcctcagccacccaagtagctggcactacgggcacacgccaccatgcccagctaatttttttgtatttttagtagagatggggttttgccatgctgcccaggctggtctcaactcctcagctcaagcaatctgcctgcgtgagcctcccaaagtggtggaattacaggcgtgggccactgcgcctggcccagacagacattttctgaaacacaactggcaatgagctgtttttacattttgaaagtgattcttcacttcctagttcttaattatagtatacctattaagatctgtaagatcctgaagacataagatcatgaagccatataagaatgaggattgaaagttgagcaaaattttcgggattttgggaaacattcttagctgtgctatctgcctaaaattattccttattacttctctcctttgacagacttcaagttttcttcatagccctttcaaagttttttgagccatccagagtaaaatcatttctaaatgatagttctgtatatctccaactcgtcttaagtgtatttgcctgtgtgcaacgtattgctagactatgaactcctcagcatggctgctggataacttaattgtcctgagttaatagccttcaaaggacaaatcggtttctttgcagatagcttcgtaaaacttcacatggagtttattttatcatatttcccttttttatttctgctcctcctttaattgcccatcttgcttcagagactgacatttcagggtggatattaattaaagcattaattttgttttttggtatatttctatccctagtatttctatcttactgctaaaatacaggaaaagtgccgtatttttaatgcatttagtggttttctttggtgttatctgttccatttttctttttcatacattgaagtgtgtctccttttcaaccaaaataatgaaatagtggagaccatgaaattgttgtgcctggctaattggcaaattaatttaccaatataataagtgtagcgccttgtttgaataccctttttgagaaggtatgatgagaatgggcaagggtgtcagcatctcttcttcttaataattaattgttttcagttttggttcacgaagaatgcttagttaatctgtaatgttgcctagagctgtatttatctgtttttatttatactagtgtagtaaagctgcatatcattacagtaaaaacgactactgtgatgagttaatcagaaaatctattaaaatctatatgacaa

SEQ ID NO: 17756 - DNA, 6080 bp, Homo sapiens
ggggtcacgggcgaactagaacactgggaaaggggctgcaggttccggaccggaccggccgtgacccggaataatgagcaaggagggtgtggtgggttgaaagccatcctactttactcccgagttagagcatggattcagttttagtcttaagggggaagtgagattggagatttttatttttaattttgggcagaagcaggttgactctagggatctccagagcgagaggatttaacttcatgttgctcccgtgtttgaaggaggacaataaaagtcccaccgggcaaaattttcgtaacctctgcggtagaaaacgtcaggtatcttttaaatcgcgatagttttcgctgtgtcaggctttcttcggtggagctccgagggtagctaggttctaggtttgaaacagatgcagaatccaaaggcagcgcaaaaaacagccaccgattttgctatgtctctgagctgcgagataatcagacagctaaatggagtctgagcagctgttccatagaggctactatagaaacagctacaacagtataacaagtgcaagtagtgatgaggaacttttagatggagcaggtgttattatggactttcaaacatctgaagatgacaatttattagatggtgacactgcagttggaactcattatacaatgacaaatggaggcagcattaacagttctacacatttactggatcttttggatgaaccaattccaggtgttggtacatatgatgatttccatactattgattgggtgcgagaaaaatgtaaagacagagaaaggcatagacggatcaacagcaaaaagaaagaatcagcatgggaaatgacaaaaagtttgtatgatgcgtggtcaggatggctagtagtaacactaacaggattggcatcaggggcactggccggattaatagacattgctgccgattggatgactgacctaaaggagggcatttgccttagtgcgttgtggtacaaccacgaacagtgctgttggggatctaatgaaacaacatttgaagagagggataaatgtccacagtggaaaacatgggcagaattaatcataggtcaagcagagggtcctggttcttatatcatgaactacataatgtacatcttctgggccttgagttttgcctttcttgcagtttccctggtaaaggtatttgctccatatgcctgtggctctggaattccagagattaaaactattttaagtggattcatcatcagaggttacttgggaaaatggactttaatgattaaaaccatcacattagtcctggctgtggcatcaggtttgagtttaggaaaagaaggtcccctggtacatgttgcctgttgctgcggaaatatcttttcctacctctttccaaagtatagcacaaacgaagctaaaaaaagggaggtgctatcagctgcctcagctgcaggggtttctgtagcttttggtgcaccaattggaggagttctttttagcctggaagaggttagctattattttcctctcaaaactttatggagatcattttttgctgctttagtggctgcatttgttttgaggtccatcaatccatttggtaacagccgtctggtccttttttatgtggagtatcatacaccatggtacctttttgaactgtttccttttattcttctaggggtatttggagggctttggggagcctttttcattagggcaaatattgcctggtgtcgtcgacgcaagtccacgaaatttggaaagtatcccgttctggaagtcattattgttgcagccattactgctgtgatagccttccctaatccatacactaggctaaacaccagtgaactgatcaaagagctttttacagactgtggtcccctggaatcctcttctctttgtgactacagaaatgacatgaatgccagtaaaattgtcgatgacattcctgatcgtccagcaggcattggagtatattcagctatatggcagttatgcctggcactcatatttaaaatcataatgacagtattcacttttggcatcaaggttccatcaggcttgttcatccccagcatggccattggagcgatcgcaggaaggattgtggggattgcggtggagcagcttgcctactatcaccacgactggtttatctttaaggagtggtgtgaggtcggggctgattgcattacacctggcctttatgccatggttggtgctgctgcatgcttaggtggtgtgacaagaatgactgtctccctggtggttattgtttttgagcttactggaggcttggaatatattgttccccttatggctgcagtcatgaccagtaaatgggttggagatgcctttggcagggaaggcatttatgaagcacacatccgattaaatggataccctttcttggatgcaaaagaagaattcactcataccaccctggctgctgacgttatgagacctcgaaggaatgatcctcccttagctgtcctgacacaggacaatatgacagtggatgatatagaaaacatgattaatgaaaccagctacaatggatttcctgtcataatgtcaaaagaatctcagagattagtgggatttgccctcagaagagacctgacaattgcaatagaaagtgccaggaaaaaacaagaaggtatcgttggcagttctcgggtgtgttttgcacagcacaccccatctcttccagcagaaagtcctcggccattgaagcttcgaagcattcttgacatgagcccttttacagtgacagaccacaccccaatggagatcgtggtggatattttccgaaagctgggactgaggcagtgccttgtaactcacaatgggcgcctccttggcattataacaaaaaaagatatcctccggcatatggcccagacggcaaaccaagaccccgcttcaataatgttcaactgaatctcacagatgaggagagagaagaaacggaagaggaagtttatttgttgaatagcacaactctttaacctgagggagtcatctacttttttttcctcctttacaaaaaaagaaaggaaatataaaagccgggtttttgcaacatggtttgcaaataatgctggtggaatggaggagttgtttggggagggaaaggagagagaaggaaaggagtgaggtatttcccgtctaacagaaagcagcgtatcaactcctattgttctgcactggatgcattcagctgaggatgtgcctgatagtgcaggcttgcgcctcaacagagatgacagcagagtcctcgagcacctggcctgttgctccaacattgcaaagacacattatcagtccctatttctagagggattactttgaattgagccatctataaaactgcaaggtcttgcccttttttttaatcaaaactgttctgtttaattcatgaattgtatagttaagcattacctttctacattccagaagagcctttatttctctctctctctctctctctctctctctctctctactgagctgtaacaaagcctctttaaatcggtgtatccttttgaagcagtcctttctcatattgagatgtactgtgattttactgaggtttcatcacaagaagggagtgtttcttgtgccattaaccatgtagtttgtaccatcactaaatgcttggaacagtacacatgcaccacaacaaaggctcatcaaacaggtaaagtctcgaaggaagcgagaacgaaatctctcattgtgtgccgtgtggctcaaaaccgaaaacaatgaagcttggttttaaaggataaagttttcttttttgttttcctctcagactttatggataatgtgaccgggtcttatgcaaattttctatttctaaaactactactatgatatacaagtgctgttgagcataattaaataaaatgctgctgctttgacagtaaagagaaggaagtattctgattagctgtatctggtattaattgcatgttaaaacactggaatttttaaaattgaaattagatcagtcattcttttcttttctcaagatgtctcatggctgacactgaagaagaaatgtaattcataacttgcactaaatgtatattttttttcttaaaaatttaccattcttatttatatttttatggattaaaatttataaaatacagatcagttaatattgcacttaagtaattttacctttttaatgtgatttttatagaataattcagacttacaaatacagagatatgaacaaagtttacagtgggaacaaaggtttaaaaaaaggttgtggttctctctctgtgatccagtgtgcacataaacctttctctgatctttcactgccatcctctggattatgtcttctgacctgtccattttgacccattaactggaaagttgaaaaactacattaactggaaagttgaaaaactacattactttggagaataaaaccgaaagttcgtgtataccttcttaaaaaaaaaatcaaaccaaaaatgtgaaaacaatagaattgcaaagatagcagttaaaattttaatctgaaaataacctttgaatctcgggctaggttacgtccatatttgaagtggtcagtgatggtttgaacattttttgcaggatgagttaaaatgcactggattatatttgggatttttgtttttggaattgtctgttttaatcacagccttaattcacaattggcaaaggcagtttactcaaaggactgggctaaatattctgtaattatgcatttttgataggaaaatgaaatttttgcaaacagacattttctttttttttggctggagtgcagtggggcatggtcttggctcactgcagcgttgaccacctgggctcaagtgatactcccgcctcagccacccaagtagctggcactacgggcacacgccaccatgcccagctaatttttttgtatttttagtagagatggggttttgccatgctgcccaggctggtctcaactcctcagctcaagcaatctgcctgcgtgagcctcccaaagtggtggaattacaggcgtgggccactgcgcctggcccagacagacattttctgaaacacaactggcaatgagctgtttttacattttgaaagtgattcttcacttcctagttcttaattatagtatacctattaagatctgtaagatcctgaagacataagatcatgaagccatataagaatgaggattgaaagttgagcaaaattttcgggattttgggaaacattcttagctgtgctatctgcctaaaattattccttattacttctctcctttgacagacttcaagttttcttcatagccctttcaaagttttttgagccatccagagtaaaatcatttctaaatgatagttctgtatatctccaactcgtcttaagtgtatttgcctgtgtgcaacgtattgctagactatgaactcctcagcatggctgctggataacttaattgtcctgagttaatagccttcaaaggacaaatcggtttctttgcagatagcttcgtaaaacttcacatggagtttattttatcatatttcccttttttatttctgctcctcctttaattgcccatcttgcttcagagactgacatttcagggtggatattaattaaagcattaattttgttttttggtatatttctatccctagtatttctatcttactgctaaaatacaggaaaagtgccgtatttttaatgcatttagtggttttctttggtgttatctgttccatttttctttttcatacattgaagtgtgtctccttttcaaccaaaataatgaaatagtggagaccatgaaattgttgtgcctggctaattggcaaattaatttaccaatataataagtgtagcgccttgtttgaataccctttttgagaaggtatgatgagaatgggcaagggtgtcagcatctcttcttcttaataattaattgttttcagttttggttcacgaagaatgcttagttaatctgtaatgttgcctagagctgtatttatctgtttttatttatactagtgtagtaaagctgcatatcattacagt

SEQ ID NO: 17757 - DNA, 5751 bp, Homo sapiens
ggggtcacgggcgaactagaacactgggaaaggggctgcaggttccggaccggaccggccgtgacccggaataatgagcaaggagggtgtggtgggttgaaagccatcctactttactcccgagttagagcatggattcagttttagtcttaagggggaagtgagattggagatttttatttttaattttgggcagaagcaggttgactctagggatctccagagcgagaggatttaacttcatgttgctcccgtgtttgaaggaggacaataaaagtcccaccgggcaaaattttcgtaacctctgcggtagaaaacgtcaggtatcttttaaatcgcgatagttttcgctgtgtcaggctttcttcggtggagctccgagggtagctaggttctaggtttgaaacagatgcagaatccaaaggcagcgcaaaaaacagccaccgattttgctatgtctctgagctgcgagataatcagacagctaaatggagtctgagcagctgttccatagaggctactatagaaacagctacaacagtataacaagtgcaagtagtgatgaggaacttttagatggagcaggtgttattatggactttcaaacatctgaagatgacaatttattagatggtgacactgcagttggaactcattatacaatgacaaatggaggcagcattaacagttctacacatttactggatcttttggatgaaccaattccaggtgttggtacatatgatgatttccatactattgattgggtgcgagaaaaatgtaaagacagagaaaggcatagacggatcaacagcaaaaagaaagaatcagcatgggaaatgacaaaaagtttgtatgatgcgtggtcaggatggctagtagtaacactaacaggattggcatcaggggcactggccggattaatagacattgctgccgattggatgactgacctaaaggagggcatttgccttagtgcgttgtggtacaaccacgaacagtgctgttggggatctaatgaaacaacatttgaagagagggataaatgtccacagtggaaaacatgggcagaattaatcataggtcaagcagagggtcctggttcttatatcatgaactacataatgtacatcttctgggccttgagttttgcctttcttgcagtttccctggtaaaggtatttgctccatatgcctgtggctctggaattccagagattaaaactattttaagtggattcatcatcagaggttacttgggaaaatggactttaatgattaaaaccatcacattagtcctggctgtggcatcaggtttgagtttaggaaaagaaggtcccctggtacatgttgcctgttgctgcggaaatatcttttcctacctctttccaaagtatagcacaaacgaagctaaaaaaagggaggtgctatcagctgcctcagctgcaggggtttctgtagcttttggtgcaccaattggaggagttctttttagcctggaagaggttagctattattttcctctcaaaactttatggagatcattttttgctgctttagtggctgcatttgttttgaggtccatcaatccatttggtaacagccgtctggtccttttttatgtggagtatcatacaccatggtacctttttgaactgtttccttttattcttctaggggtatttggagggctttggggagcctttttcattagggcaaatattgcctggtgtcgtcgacgcaagtccacgaaatttggaaagtatcccgttctggaagtcattattgttgcagccattactgctgtgatagccttccctaatccatacactaggctaaacaccagtgaactgatcaaagagctttttacagactgtggtcccctggaatcctcttctctttgtgactacagaaatgacatgaatgccagtaaaattgtcgatgacattcctgatcgtccagcaggcattggagtatattcagctatatggcagttatgcctggcactcatatttaaaatcataatgacagtattcacttttggcatcaaggttccatcaggcttgttcatccccagcatggccattggagcgatcgcaggaaggattgtggggattgcggtggagcagcttgcctactatcaccacgactggtttatctttaaggagtggtgtgaggtcggggctgattgcattacacctggcctttatgccatggttggtgctgctgcatgcttaggtggtgtgacaagaatgactgtctccctggtggttattgtttttgagcttactggaggcttggaatatattgttccccttatggctgcagtcatgaccagtaaatgggttggagatgcctttggcagggaaggcatttatgaagcacacatccgattaaatggataccctttcttggatgcaaaagaagaattcactcataccaccctggctgctgacgttatgagacctcgaaggaatgatcctcccttagctgtcctgacacaggacaatatgacagtggatgatatagaaaacatgattaatgaaaccagctacaatggatttcctgtcataatgtcaaaagaatctcagagattagtgggatttgccctcagaagagacctgacaattgcaatagaaagtgccaggaaaaaacaagaaggtatcgttggcagttctcgggtgtgttttgcacagcacaccccatctcttccagcagaaagtcctcggccattgaagcttcgaagcattcttgacatgagcccttttacagtgacagaccacaccccaatggagatcgtggtggatattttccgaaagctgggactgaggcagtgccttgtaactcacaatgggcgcctccttggcattataacaaaaaaagatatcctccggcatatggcccagacggcaaaccaagaccccgcttcaataatgttcaactgaatctcacagatgaggagagagaagaaacggaagaggaagtttatttgttgaatagcacaactctttaacctgagggagtcatctacttttttttcctcctttacaaaaaaagaaaggaaatataaaagccgggtttttgcaacatggtttgcaaataatgctggtggaatggaggagttgtttggggagggaaaggagagagaaggaaaggagtgaggtatttcccgtctaacagaaagcagcgtatcaactcctattgttctgcactggatgcattcagctgaggatgtgcctgatagtgcaggcttgcgcctcaacagagatgacagcagagtcctcgagcacctggcctgttgctccaacattgcaaagacacattatcagtccctatttctagagggattactttgaattgagccatctataaaactgcaaggtcttgcccttttttttaatcaaaactgttctgtttaattcatgaattgtatagttaagcattacctttctacattccagaagagcctttatttctctctctctctctctctctctctctctctctctactgagctgtaacaaagcctctttaaatcggtgtatccttttgaagcagtcctttctcatattgagatgtactgtgattttactgaggtttcatcacaagaagggagtgtttcttgtgccattaaccatgtagtttgtaccatcactaaatgcttggaacagtacacatgcaccacaacaaaggctcatcaaacaggtaaagtctcgaaggaagcgagaacgaaatctctcattgtgtgccgtgtggctcaaaaccgaaaacaatgaagcttggttttaaaggataaagttttcttttttgttttcctctcagactttatggataatgtgaccgggtcttatgcaaattttctatttctaaaactactactatgatatacaagtgctgttgagcataattaaataaaatgctgctgctttgacagtaaagagaaggaagtattctgattagctgtatctggtattaattgcatgttaaaacactggaatttttaaaattgaaattagatcagtcattcttttcttttctcaagatgtctcatggctgacactgaagaagaaatgtaattcataacttgcactaaatgtatattttttttcttaaaaatttaccattcttatttatatttttatggattaaaatttataaaatacagatcagttaatattgcacttaagtaattttacctttttaatgtgatttttatagaataattcagacttacaaatacagagatatgaacaaagtttacagtgggaacaaaggtttaaaaaaaggttgtggttctctctctgtgatccagtgtgcacataaacctttctctgatctttcactgccatcctctggattatgtcttctgacctgtccattttgacccattaactggaaagttgaaaaactacattaactggaaagttgaaaaactacattactttggagaataaaaccgaaagttcgtgtataccttcttaaaaaaaaaatcaaaccaaaaatgtgaaaacaatagaattgcaaagatagcagttaaaattttaatctgaaaataacctttgaatctcgggctaggttacgtccatatttgaagtggtcagtgatggtttgaacattttttgcaggatgagttaaaatgcactggattatatttgggatttttgtttttggaattgtctgttttaatcacagccttaattcacaattggcaaaggcagtttactcaaaggactgggctaaatattctgtaattatgcatttttgataggaaaatgaaatttttgcaaacagacattttctttttttttggctggagtgcagtggggcatggtcttggctcactgcagcgttgaccacctgggctcaagtgatactcccgcctcagccacccaagtagctggcactacgggcacacgccaccatgcccagctaatttttttgtatttttagtagagatggggttttgccatgctgcccaggctggtctcaactcctcagctcaagcaatctgcctgcgtgagcctcccaaagtggtggaattacaggcgtgggccactgcgcctggcccagacagacattttctgaaacacaactggcaatgagctgtttttacattttgaaagtgattcttcacttcctagttcttaattatagtatacctattaagatctgtaagatcctgaagacataagatcatgaagccatataagaatgaggattgaaagttgagcaaaattttcgggattttgggaaacattcttagctgtgctatctgcctaaaattattccttattacttctctcctttgacagacttcaagttttcttcatagccctttcaaagttttttgagccatccagagtaaaatcatttctaaatgatagttctgtatatctccaactcgtcttaagtgtatttgcctgtgtgcaacgtattgctagactatgaactcctcagcatggctgctggataacttaattgtcctgagttaatagccttcaaaggacaaatcggtttctttgcagatagcttcgtaaaacttcacatggagtttattttatcatatttcccttttttatttctgctcctcctttaattgcccatcttgcttcagagactgacatttcagggtggatattaattaaagcattaattttgttttttggtatatttctatccctagtatttctatcttactgctaaaatacctggatacaagtgtccgttgttcttcgaacgaggggaacctct

SEQ ID NO: 17758 - DNA, 6151 bp, Homo sapiens
ttctcttccccttccgtgggtcagggccggtccggtccggaacctgcagcccctttcccagtgttctagttcgcccgtgacccggaataatgagcaaggagggtgtggtgggttgaaagccatcctactttactcccgagttagagcatggattcagttttagtcttaagggggaagtgagattggagatttttatttttaattttgggcagaagcaggttgactctagggatctccagagcgagaggatttaacttcatgttgctcccgtgtttgaaggaggacaataaaagtcccaccgggcaaaattttcgtaacctctgcggtagaaaacgtcaggtatcttttaaatcgcgatagttttcgctgtgtcaggctttcttcggtggagctccgagggtagctaggttctaggtttgaaacagatgcagaatccaaaggcagcgcaaaaaacagccaccgattttgctatgtctctgagctgcgagataatcagacagctaaatggagtctgagcagctgttccatagaggctactatagaaacagctacaacagtataacaagtgcaagtagtgatgaggaacttttagatggagcaggtgttattatggactttcaaacatctgaagatgacaatttattagatggtgacactgcagttggaactcattatacaatgacaaatggaggcagcattaacagttctacacatttactggatcttttggatgaaccaattccaggtgttggtacatatgatgatttccatactattgattgggtgcgagaaaaatgtaaagacagagaaaggcatagacggatcaacagcaaaaagaaagaatcagcatgggaaatgacaaaaagtttgtatgatgcgtggtcaggatggctagtagtaacactaacaggattggcatcaggggcactggccggattaatagacattgctgccgattggatgactgacctaaaggagggcatttgccttagtgcgttgtggtacaaccacgaacagtgctgttggggatctaatgaaacaacatttgaagagagggataaatgtccacagtggaaaacatgggcagaattaatcataggtcaagcagagggtcctggttcttatatcatgaactacataatgtacatcttctgggccttgagttttgcctttcttgcagtttccctggtaaaggtatttgctccatatgcctgtggctctggaattccagagattaaaactattttaagtggattcatcatcagaggttacttgggaaaatggactttaatgattaaaaccatcacattagtcctggctgtggcatcaggtttgagtttaggaaaagaaggtcccctggtacatgttgcctgttgctgcggaaatatcttttcctacctctttccaaagtatagcacaaacgaagctaaaaaaagggaggtgctatcagctgcctcagctgcaggggtttctgtagcttttggtgcaccaattggaggagttctttttagcctggaagaggttagctattattttcctctcaaaactttatggagatcattttttgctgctttagtggctgcatttgttttgaggtccatcaatccatttggtaacagccgtctggtccttttttatgtggagtatcatacaccatggtacctttttgaactgtttccttttattcttctaggggtatttggagggctttggggagcctttttcattagggcaaatattgcctggtgtcgtcgacgcaagtccacgaaatttggaaagtatcccgttctggaagtcattattgttgcagccattactgctgtgatagccttccctaatccatacactaggctaaacaccagtgaactgatcaaagagctttttacagactgtggtcccctggaatcctcttctctttgtgactacagaaatgacatgaatgccagtaaaattgtcgatgacattcctgatcgtccagcaggcattggagtatattcagctatatggcagttatgcctggcactcatatttaaaatcataatgacagtattcacttttggcatcaaggttccatcaggcttgttcatccccagcatggccattggagcgatcgcaggaaggattgtggggattgcggtggagcagcttgcctactatcaccacgactggtttatctttaaggagtggtgtgaggtcggggctgattgcattacacctggcctttatgccatggttggtgctgctgcatgcttaggtggtgtgacaagaatgactgtctccctggtggttattgtttttgagcttactggaggcttggaatatattgttccccttatggctgcagtcatgaccagtaaatgggttggagatgcctttggcagggaaggcatttatgaagcacacatccgattaaatggataccctttcttggatgcaaaagaagaattcactcataccaccctggctgctgacgttatgagacctcgaaggaatgatcctcccttagctgtcctgacacaggacaatatgacagtggatgatatagaaaacatgattaatgaaaccagctacaatggatttcctgtcataatgtcaaaagaatctcagagattagtgggatttgccctcagaagagacctgacaattgcaatagaaagtgccaggaaaaaacaagaaggtatcgttggcagttctcgggtgtgttttgcacagcacaccccatctcttccagcagaaagtcctcggccattgaagcttcgaagcattcttgacatgagcccttttacagtgacagaccacaccccaatggagatcgtggtggatattttccgaaagctgggactgaggcagtgccttgtaactcacaatgggcgcctccttggcattataacaaaaaaagatatcctccggcatatggcccagacggcaaaccaagaccccgcttcaataatgttcaactgaatctcacagatgaggagagagaagaaacggaagaggaagtttatttgttgaatagcacaactctttaacctgagggagtcatctacttttttttcctcctttacaaaaaaagaaaggaaatataaaagccgggtttttgcaacatggtttgcaaataatgctggtggaatggaggagttgtttggggagggaaaggagagagaaggaaaggagtgaggtatttcccgtctaacagaaagcagcgtatcaactcctattgttctgcactggatgcattcagctgaggatgtgcctgatagtgcaggcttgcgcctcaacagagatgacagcagagtcctcgagcacctggcctgttgctccaacattgcaaagacacattatcagtccctatttctagagggattactttgaattgagccatctataaaactgcaaggtcttgcccttttttttaatcaaaactgttctgtttaattcatgaattgtatagttaagcattacctttctacattccagaagagcctttatttctctctctctctctctctctctctctctctctctactgagctgtaacaaagcctctttaaatcggtgtatccttttgaagcagtcctttctcatattgagatgtactgtgattttactgaggtttcatcacaagaagggagtgtttcttgtgccattaaccatgtagtttgtaccatcactaaatgcttggaacagtacacatgcaccacaacaaaggctcatcaaacaggtaaagtctcgaaggaagcgagaacgaaatctctcattgtgtgccgtgtggctcaaaaccgaaaacaatgaagcttggttttaaaggataaagttttcttttttgttttcctctcagactttatggataatgtgaccgggtcttatgcaaattttctatttctaaaactactactatgatatacaagtgctgttgagcataattaaataaaatgctgctgctttgacagtaaagagaaggaagtattctgattagctgtatctggtattaattgcatgttaaaacactggaatttttaaaattgaaattagatcagtcattcttttcttttctcaagatgtctcatggctgacactgaagaagaaatgtaattcataacttgcactaaatgtatattttttttcttaaaaatttaccattcttatttatatttttatggattaaaatttataaaatacagatcagttaatattgcacttaagtaattttacctttttaatgtgatttttatagaataattcagacttacaaatacagagatatgaacaaagtttacagtgggaacaaaggtttaaaaaaaggttgtggttctctctctgtgatccagtgtgcacataaacctttctctgatctttcactgccatcctctggattatgtcttctgacctgtccattttgacccattaactggaaagttgaaaaactacattaactggaaagttgaaaaactacattactttggagaataaaaccgaaagttcgtgtataccttcttaaaaaaaaaatcaaaccaaaaatgtgaaaacaatagaattgcaaagatagcagttaaaattttaatctgaaaataacctttgaatctcgggctaggttacgtccatatttgaagtggtcagtgatggtttgaacattttttgcaggatgagttaaaatgcactggattatatttgggatttttgtttttggaattgtctgttttaatcacagccttaattcacaattggcaaaggcagtttactcaaaggactgggctaaatattctgtaattatgcatttttgataggaaaatgaaatttttgcaaacagacattttctttttttttggctggagtgcagtggggcatggtcttggctcactgcagcgttgaccacctgggctcaagtgatactcccgcctcagccacccaagtagctggcactacgggcacacgccaccatgcccagctaatttttttgtatttttagtagagatggggttttgccatgctgcccaggctggtctcaactcctcagctcaagcaatctgcctgcgtgagcctcccaaagtggtggaattacaggcgtgggccactgcgcctggcccagacagacattttctgaaacacaactggcaatgagctgtttttacattttgaaagtgattcttcacttcctagttcttaattatagtatacctattaagatctgtaagatcctgaagacataagatcatgaagccatataagaatgaggattgaaagttgagcaaaattttcgggattttgggaaacattcttagctgtgctatctgcctaaaattattccttattacttctctcctttgacagacttcaagttttcttcatagccctttcaaagttttttgagccatccagagtaaaatcatttctaaatgatagttctgtatatctccaactcgtcttaagtgtatttgcctgtgtgcaacgtattgctagactatgaactcctcagcatggctgctggataacttaattgtcctgagttaatagccttcaaaggacaaatcggtttctttgcagatagcttcgtaaaacttcacatggagtttattttatcatatttcccttttttatttctgctcctcctttaattgcccatcttgcttcagagactgacatttcagggtggatattaattaaagcattaattttgttttttggtatatttctatccctagtatttctatcttactgctaaaatacaggaaaagtgccgtatttttaatgcatttagtggttttctttggtgttatctgttccatttttctttttcatacattgaagtgtgtctccttttcaaccaaaataatgaaatagtggagaccatgaaattgttgtgcctggctaattggcaaattaatttaccaatataataagtgtagcgccttgtttgaataccctttttgagaaggtatgatgagaatgggcaagggtgtcagcatctcttcttcttaataattaattgttttcagttttggttcacgaagaatgcttagttaatctgtaatgttgcctagagctgtatttatctgtttttatttatactagtgtagtaaagctgcatatcattacagtaaaaacgactactgtgatgagttaatcagaaaatctattaaaatctatatgacaa

SEQ ID NO: 17759 - DNA, 4727 bp, Homo sapiens
ggggtcacgggcgaactagaacactgggaaaggggctgcaggttccggaccggaccggccgtgacccggaataatgagcaaggagggtgtggtgggttgaaagccatcctactttactcccgagttagagcatggattcagttttagtcttaagggggaagtgagattggagatttttatttttaattttgggcagaagcaggttgactctagggatctccagagcgagaggatttaacttcatgttgctcccgtgtttgaaggaggacaataaaagtcccaccgggcaaaattttcgtaacctctgcggtagaaaacgtcaggtatcttttaaatcgcgatagttttcgctgtgtcaggctttcttcggtggagctccgagggtagctaggttctaggtttgaaacagatgcagaatccaaaggcagcgcaaaaaacagccaccgattttgctatgtctctgagctgcgagataatcagacagctaaatggagtctgagcagctgttccatagaggctactatagaaacagctacaacagtataacaagtgcaagtagtgatgaggaacttttagatggagcaggtgttattatggactttcaaacatctgaagatgacaatttattagatggtgacactgcagttggaactcattatacaatgacaaatggaggcagcattaacagttctacacatttactggatcttttggatgaaccaattccaggtgttggtacatatgatgatttccatactattgattgggtgcgagaaaaatgtaaagacagagaaaggcatagacggatcaacagcaaaaagaaagaatcagcatgggaaatgacaaaaagtttgtatgatgcgtggtcaggatggctagtagtaacactaacaggattggcatcaggggcactggccggattaatagacattgctgccgattggatgactgacctaaaggagggcatttgccttagtgcgttgtggtacaaccacgaacagtgctgttggggatctaatgaaacaacatttgaagagagggataaatgtccacagtggaaaacatgggcagaattaatcataggtcaagcagagggtcctggttcttatatcatgaactacataatgtacatcttctgggccttgagttttgcctttcttgcagtttccctggtaaaggtatttgctccatatgcctgtggctctggaattccagagattaaaactattttaagtggattcatcatcagaggttacttgggaaaatggactttaatgattaaaaccatcacattagtcctggctgtggcatcaggtttgagtttaggaaaagaaggtcccctggtacatgttgcctgttgctgcggaaatatcttttcctacctctttccaaagtatagcacaaacgaagctaaaaaaagggaggtgctatcagctgcctcagctgcaggggtttctgtagcttttggtgcaccaattggaggagttctttttagcctggaagaggttagctattattttcctctcaaaactttatggagatcattttttgctgctttagtggctgcatttgttttgaggtccatcaatccatttggtaacagccgtctggtccttttttatgtggagtatcatacaccatggtacctttttgaactgtttccttttattcttctaggggtatttggagggctttggggagcctttttcattagggcaaatattgcctggtgtcgtcgacgcaagtccacgaaatttggaaagtatcccgttctggaagtcattattgttgcagccattactgctgtgatagccttccctaatccatacactaggctaaacaccagtgaactgatcaaagagctttttacagactgtggtcccctggaatcctcttctctttgtgactacagaaatgacatgaatgccagtaaaattgtcgatgacattcctgatcgtccagcaggcattggagtatattcagctatatggcagttatgcctggcactcatatttaaaatcataatgacagtattcacttttggcatcaaggttccatcaggcttgttcatccccagcatggccattggagcgatcgcaggaaggattgtggggattgcggtggagcagcttgcctactatcaccacgactggtttatctttaaggagtggtgtgaggtcggggctgattgcattacacctggcctttatgccatggttggtgctgctgcatgcttaggtggtgtgacaagaatgactgtctccctggtggttattgtttttgagcttactggaggcttggaatatattgttccccttatggctgcagtcatgaccagtaaatgggttggagatgcctttggcagggaaggcatttatgaagcacacatccgattaaatggataccctttcttggatgcaaaagaagaattcactcataccaccctggctgctgacgttatgagacctcgaaggaatgatcctcccttagctgtcctgacacaggacaatatgacagtggatgatatagaaaacatgattaatgaaaccagctacaatggatttcctgtcataatgtcaaaagaatctcagagattagtgggatttgccctcagaagagacctgacaattgcaatagaaagtgccaggaaaaaacaagaaggtatcgttggcagttctcgggtgtgttttgcacagcacaccccatctcttccagcagaaagtcctcggccattgaagcttcgaagcattcttgacatgagcccttttacagtgacagaccacaccccaatggagatcgtggtggatattttccgaaagctgggactgaggcagtgccttgtaactcacaatgggcgcctccttggcattataacaaaaaaagatatcctccggcatatggcccagacggcaaaccaagaccccgcttcaataatgttcaactgaatctcacagatgaggagagagaagaaacggaagaggaagtttatttgttgaatagcacaactctttaacctgagggagtcatctacttttttttcctcctttacaaaaaaagaaaggaaatataaaagccgggtttttgcaacatggtttgcaaataatgctggtggaatggaggagttgtttggggagggaaaggagagagaaggaaaggagtgaggtatttcccgtctaacagaaagcagcgtatcaactcctattgttctgcactggatgcattcagctgaggatgtgcctgatagtgcaggcttgcgcctcaacagagatgacagcagagtcctcgagcacctggcctgttgctccaacattgcaaagacacattatcagtccctatttctagagggattactttgaattgagccatctataaaactgcaaggtcttgcccttttttttaatcaaaactgttctgtttaattcatgaattgtatagttaagcattacctttctacattccagaagagcctttatttctctctctctctctctctctctctctctctctctactgagctgtaacaaagcctctttaaatcggtgtatccttttgaagcagtcctttctcatattgagatgtactgtgattttactgaggtttcatcacaagaagggagtgtttcttgtgccattaaccatgtagtttgtaccatcactaaatgcttggaacagtacacatgcaccacaacaaaggctcatcaaacaggtaaagtctcgaaggaagcgagaacgaaatctctcattgtgtgccgtgtggctcaaaaccgaaaacaatgaagcttggttttaaaggataaagttttcttttttgttttcctctcagactttatggataatgtgaccgggtcttatgcaaattttctatttctaaaactactactatgatatacaagtgctgttgagcataattaaataaaatgctgctgctttgacagtaaagagaaggaagtattctgattagctgtatctggtattaattgcatgttaaaacactggaatttttaaaattgaaattagatcagtcattcttttcttttctcaagatgtctcatggctgacactgaagaagaaatgtaattcataacttgcactaaatgtatattttttttcttaaaaatttaccattcttatttatatttttatggattaaaatttataaaatacagatcagttaatattgcacttaagtaattttacctttttaatgtgatttttatagaataattcagacttacaaatacagagatatgaacaaagtttacagtgggaacaaaggtttaaaaaaaggttgtggttctctctctgtgatccagtgtgcacataaacctttctctgatctttcactgccatcctctggattatgtcttctgacctgtccattttgacccattaactggaaagttgaaaaactacattaactggaaagttgaaaaactacattactttggagaataaaaccgaaagttcgtgtataccttcttaaaaaaaaaatcaaaccaaaaatgtgaaaacaatagaattgcaaagatagcagttaaaattttaatctgaaaataacctttgaatctcgggctaggttacgtccatatttgaagtggtcagtgatggtttgaacattttttgcaggatgagttaaaatgcataattacagaatatttagcccagtcctttgagtaaactgcctttgccaattgtgaattaaggctgtgattaaaacagacaattcca

SEQ ID NO: 17760 - DNA, 4481 bp, Homo sapiens
ggggtcacgggcgaactagaacactgggaaaggggctgcaggttccggaccggaccggccgtgacccggaataatgagcaaggagggtgtggtgggttgaaagccatcctactttactcccgagttagagcatggattcagttttagtcttaagggggaagtgagattggagatttttatttttaattttgggcagaagcaggttgactctagggatctccagagcgagaggatttaacttcatgttgctcccgtgtttgaaggaggacaataaaagtcccaccgggcaaaattttcgtaacctctgcggtagaaaacgtcaggtatcttttaaatcgcgatagttttcgctgtgtcaggctttcttcggtggagctccgagggtagctaggttctaggtttgaaacagatgcagaatccaaaggcagcgcaaaaaacagccaccgattttgctatgtctctgagctgcgagataatcagacagctaaatggagtctgagcagctgttccatagaggctactatagaaacagctacaacagtataacaagtgcaagtagtgatgaggaacttttagatggagcaggtgttattatggactttcaaacatctgaagatgacaatttattagatggtgacactgcagttggaactcattatacaatgacaaatggaggcagcattaacagttctacacatttactggatcttttggatgaaccaattccaggtgttggtacatatgatgatttccatactattgattgggtgcgagaaaaatgtaaagacagagaaaggcatagacggatcaacagcaaaaagaaagaatcagcatgggaaatgacaaaaagtttgtatgatgcgtggtcaggatggctagtagtaacactaacaggattggcatcaggggcactggccggattaatagacattgctgccgattggatgactgacctaaaggagggcatttgccttagtgcgttgtggtacaaccacgaacagtgctgttggggatctaatgaaacaacatttgaagagagggataaatgtccacagtggaaaacatgggcagaattaatcataggtcaagcagagggtcctggttcttatatcatgaactacataatgtacatcttctgggccttgagttttgcctttcttgcagtttccctggtaaaggtatttgctccatatgcctgtggctctggaattccagagattaaaactattttaagtggattcatcatcagaggttacttgggaaaatggactttaatgattaaaaccatcacattagtcctggctgtggcatcaggtttgagtttaggaaaagaaggtcccctggtacatgttgcctgttgctgcggaaatatcttttcctacctctttccaaagtatagcacaaacgaagctaaaaaaagggaggtgctatcagctgcctcagctgcaggggtttctgtagcttttggtgcaccaattggaggagttctttttagcctggaagaggttagctattattttcctctcaaaactttatggagatcattttttgctgctttagtggctgcatttgttttgaggtccatcaatccatttggtaacagccgtctggtccttttttatgtggagtatcatacaccatggtacctttttgaactgtttccttttattcttctaggggtatttggagggctttggggagcctttttcattagggcaaatattgcctggtgtcgtcgacgcaagtccacgaaatttggaaagtatcccgttctggaagtcattattgttgcagccattactgctgtgatagccttccctaatccatacactaggctaaacaccagtgaactgatcaaagagctttttacagactgtggtcccctggaatcctcttctctttgtgactacagaaatgacatgaatgccagtaaaattgtcgatgacattcctgatcgtccagcaggcattggagtatattcagctatatggcagttatgcctggcactcatatttaaaatcataatgacagtattcacttttggcatcaaggttccatcaggcttgttcatccccagcatggccattggagcgatcgcaggaaggattgtggggattgcggtggagcagcttgcctactatcaccacgactggtttatctttaaggagtggtgtgaggtcggggctgattgcattacacctggcctttatgccatggttggtgctgctgcatgcttaggtggtgtgacaagaatgactgtctccctggtggttattgtttttgagcttactggaggcttggaatatattgttccccttatggctgcagtcatgaccagtaaatgggttggagatgcctttggcagggaaggcatttatgaagcacacatccgattaaatggataccctttcttggatgcaaaagaagaattcactcataccaccctggctgctgacgttatgagacctcgaaggaatgatcctcccttagctgtcctgacacaggacaatatgacagtggatgatatagaaaacatgattaatgaaaccagctacaatggatttcctgtcataatgtcaaaagaatctcagagattagtgggatttgccctcagaagagacctgacaattgcaatagaaagtgccaggaaaaaacaagaaggtatcgttggcagttctcgggtgtgttttgcacagcacaccccatctcttccagcagaaagtcctcggccattgaagcttcgaagcattcttgacatgagcccttttacagtgacagaccacaccccaatggagatcgtggtggatattttccgaaagctgggactgaggcagtgccttgtaactcacaatgggcgcctccttggcattataacaaaaaaagatatcctccggcatatggcccagacggcaaaccaagaccccgcttcaataatgttcaactgaatctcacagatgaggagagagaagaaacggaagaggaagtttatttgttgaatagcacaactctttaacctgagggagtcatctacttttttttcctcctttacaaaaaaagaaaggaaatataaaagccgggtttttgcaacatggtttgcaaataatgctggtggaatggaggagttgtttggggagggaaaggagagagaaggaaaggagtgaggtatttcccgtctaacagaaagcagcgtatcaactcctattgttctgcactggatgcattcagctgaggatgtgcctgatagtgcaggcttgcgcctcaacagagatgacagcagagtcctcgagcacctggcctgttgctccaacattgcaaagacacattatcagtccctatttctagagggattactttgaattgagccatctataaaactgcaaggtcttgcccttttttttaatcaaaactgttctgtttaattcatgaattgtatagttaagcattacctttctacattccagaagagcctttatttctctctctctctctctctctctctctctctctctactgagctgtaacaaagcctctttaaatcggtgtatccttttgaagcagtcctttctcatattgagatgtactgtgattttactgaggtttcatcacaagaagggagtgtttcttgtgccattaaccatgtagtttgtaccatcactaaatgcttggaacagtacacatgcaccacaacaaaggctcatcaaacaggtaaagtctcgaaggaagcgagaacgaaatctctcattgtgtgccgtgtggctcaaaaccgaaaacaatgaagcttggttttaaaggataaagttttcttttttgttttcctctcagactttatggataatgtgaccgggtcttatgcaaattttctatttctaaaactactactatgatatacaagtgctgttgagcataattaaataaaatgctgctgctttgacagtaaagagaaggaagtattctgattagctgtatctggtattaattgcatgttaaaacactggaatttttaaaattgaaattagatcagtcattcttttcttttctcaagatgtctcatggctgacactgaagaagaaatgtaattcataacttgcactaaatgtatattttttttcttaaaaatttaccattcttatttatatttttatggattaaaatttataaaatacagatcagttaatattgcacttaagtaattttacctttttaatgtgatttttatagaataattcagacttacaaatacagagatatgaacaaagtttacagtgggaacaaaggtttaaaaaaaggttgtggttctctctctgtgatccagtgtgcacataaacctttctctgatctttcactgccatcctctggattatgtcttctgacctgtccattttgacccattaactggaaagttgaaaaactacattaactggaaagttgaaaaactacattactttggagaataaaaccgaaagttcgtgtataccttctta

SEQ ID NO: 17761 - DNA, 6101 bp, Homo sapiens
ttctcttccccttccgtgggtcagggccggtccggtccggaacctgcagcccctttcccagtgttctagttcgcccgtgacccggaataatgagcaaggagggtgtggtgggttgaaagccatcctactttactcccgagttagagcatggattcagttttagtcttaagggggaagtgagattggagatttttatttttaattttgggcagaagcaggttgactctagggatctccagagcgagaggatttaacttcatgttgctcccgtgtttgaaggaggacaataaaagtcccaccgggcaaaattttcgtaacctctgcggtagaaaacgtcaggtatcttttaaatcgcgatagttttcgctgtgtcaggctttcttcggtggagctccgagggtagctaggttctaggtttgaaacagatgcagaatccaaaggcagcgcaaaaaacagccaccgattttgctatgtctctgagctgcgagataatcagacagctaaatggagtctgagcagctgttccatagaggctactatagaaacagctacaacagtataacaagtgcaagtagtgatgaggaacttttagatggagcaggtgttattatggactttcaaacatctgaagatgacaatttattagatggtgacactgcagttggaactcattatacaatgacaaatggaggcagcattaacagttctacacatttactggatcttttggatgaaccaattccaggtgttggtacatatgatgatttccatactattgattgggtgcgagaaaaatgtaaagacagagaaaggcatagacggatcaacagcaaaaagaaagaatcagcatgggaaatgacaaaaagtttgtatgatgcgtggtcaggatggctagtagtaacactaacaggattggcatcaggggcactggccggattaatagacattgctgccgattggatgactgacctaaaggagggcatttgccttagtgcgttgtggtacaaccacgaacagtgctgttggggatctaatgaaacaacatttgaagagagggataaatgtccacagtggaaaacatgggcagaattaatcataggtcaagcagagggtcctggttcttatatcatgaactacataatgtacatcttctgggccttgagttttgcctttcttgcagtttccctggtaaaggtatttgctccatatgcctgtggctctggaattccagagattaaaactattttaagtggattcatcatcagaggttacttgggaaaatggactttaatgattaaaaccatcacattagtcctggctgtggcatcaggtttgagtttaggaaaagaaggtcccctggtacatgttgcctgttgctgcggaaatatcttttcctacctctttccaaagtatagcacaaacgaagctaaaaaaagggaggtgctatcagctgcctcagctgcaggggtttctgtagcttttggtgcaccaattggaggagttctttttagcctggaagaggttagctattattttcctctcaaaactttatggagatcattttttgctgctttagtggctgcatttgttttgaggtccatcaatccatttggtaacagccgtctggtccttttttatgtggagtatcatacaccatggtacctttttgaactgtttccttttattcttctaggggtatttggagggctttggggagcctttttcattagggcaaatattgcctggtgtcgtcgacgcaagtccacgaaatttggaaagtatcccgttctggaagtcattattgttgcagccattactgctgtgatagccttccctaatccatacactaggctaaacaccagtgaactgatcaaagagctttttacagactgtggtcccctggaatcctcttctctttgtgactacagaaatgacatgaatgccagtaaaattgtcgatgacattcctgatcgtccagcaggcattggagtatattcagctatatggcagttatgcctggcactcatatttaaaatcataatgacagtattcacttttggcatcaaggttccatcaggcttgttcatccccagcatggccattggagcgatcgcaggaaggattgtggggattgcggtggagcagcttgcctactatcaccacgactggtttatctttaaggagtggtgtgaggtcggggctgattgcattacacctggcctttatgccatggttggtgctgctgcatgcttaggtggtgtgacaagaatgactgtctccctggtggttattgtttttgagcttactggaggcttggaatatattgttccccttatggctgcagtcatgaccagtaaatgggttggagatgcctttggcagggaaggcatttatgaagcacacatccgattaaatggataccctttcttggatgcaaaagaagaattcactcataccaccctggctgctgacgttatgagacctcgaaggaatgatcctcccttagctgtcctgacacaggacaatatgacagtggatgatatagaaaacatgattaatgaaaccagctacaatggatttcctgtcataatgtcaaaagaatctcagagattagtgggatttgccctcagaagagacctgacaattgcaatagaaagtgccaggaaaaaacaagaaggtatcgttggcagttctcgggtgtgttttgcacagcacaccccatctcttccagcagaaagtcctcggccattgaagcttcgaagcattcttgacatgagcccttttacagtgacagaccacaccccaatggagatcgtggtggatattttccgaaagctgggactgaggcagtgccttgtaactcacaatgggcgcctccttggcattataacaaaaaaagatatcctccggcatatggcccagacggcaaaccaagaccccgcttcaataatgttcaactgaatctcacagatgaggagagagaagaaacggaagaggaagtttatttgttgaatagcacaactctttaacctgagggagtcatctacttttttttcctcctttacaaaaaaagaaaggaaatataaaagccgggtttttgcaacatggtttgcaaataatgctggtggaatggaggagttgtttggggagggaaaggagagagaaggaaaggagtgagtggatgcattcagctgaggatgtgcctgatagtgcaggcttgcgcctcaacagagatgacagcagagtcctcgagcacctggcctgttgctccaacattgcaaagacacattatcagtccctatttctagagggattactttgaattgagccatctataaaactgcaaggtcttgcccttttttttaatcaaaactgttctgtttaattcatgaattgtatagttaagcattacctttctacattccagaagagcctttatttctctctctctctctctctctctctctctctctctactgagctgtaacaaagcctctttaaatcggtgtatccttttgaagcagtcctttctcatattgagatgtactgtgattttactgaggtttcatcacaagaagggagtgtttcttgtgccattaaccatgtagtttgtaccatcactaaatgcttggaacagtacacatgcaccacaacaaaggctcatcaaacaggtaaagtctcgaaggaagcgagaacgaaatctctcattgtgtgccgtgtggctcaaaaccgaaaacaatgaagcttggttttaaaggataaagttttcttttttgttttcctctcagactttatggataatgtgaccgggtcttatgcaaattttctatttctaaaactactactatgatatacaagtgctgttgagcataattaaataaaatgctgctgctttgacagtaaagagaaggaagtattctgattagctgtatctggtattaattgcatgttaaaacactggaatttttaaaattgaaattagatcagtcattcttttcttttctcaagatgtctcatggctgacactgaagaagaaatgtaattcataacttgcactaaatgtatattttttttcttaaaaatttaccattcttatttatatttttatggattaaaatttataaaatacagatcagttaatattgcacttaagtaattttacctttttaatgtgatttttatagaataattcagacttacaaatacagagatatgaacaaagtttacagtgggaacaaaggtttaaaaaaaggttgtggttctctctctgtgatccagtgtgcacataaacctttctctgatctttcactgccatcctctggattatgtcttctgacctgtccattttgacccattaactggaaagttgaaaaactacattaactggaaagttgaaaaactacattactttggagaataaaaccgaaagttcgtgtataccttcttaaaaaaaaaatcaaaccaaaaatgtgaaaacaatagaattgcaaagatagcagttaaaattttaatctgaaaataacctttgaatctcgggctaggttacgtccatatttgaagtggtcagtgatggtttgaacattttttgcaggatgagttaaaatgcactggattatatttgggatttttgtttttggaattgtctgttttaatcacagccttaattcacaattggcaaaggcagtttactcaaaggactgggctaaatattctgtaattatgcatttttgataggaaaatgaaatttttgcaaacagacattttctttttttttggctggagtgcagtggggcatggtcttggctcactgcagcgttgaccacctgggctcaagtgatactcccgcctcagccacccaagtagctggcactacgggcacacgccaccatgcccagctaatttttttgtatttttagtagagatggggttttgccatgctgcccaggctggtctcaactcctcagctcaagcaatctgcctgcgtgagcctcccaaagtggtggaattacaggcgtgggccactgcgcctggcccagacagacattttctgaaacacaactggcaatgagctgtttttacattttgaaagtgattcttcacttcctagttcttaattatagtatacctattaagatctgtaagatcctgaagacataagatcatgaagccatataagaatgaggattgaaagttgagcaaaattttcgggattttgggaaacattcttagctgtgctatctgcctaaaattattccttattacttctctcctttgacagacttcaagttttcttcatagccctttcaaagttttttgagccatccagagtaaaatcatttctaaatgatagttctgtatatctccaactcgtcttaagtgtatttgcctgtgtgcaacgtattgctagactatgaactcctcagcatggctgctggataacttaattgtcctgagttaatagccttcaaaggacaaatcggtttctttgcagatagcttcgtaaaacttcacatggagtttattttatcatatttcccttttttatttctgctcctcctttaattgcccatcttgcttcagagactgacatttcagggtggatattaattaaagcattaattttgttttttggtatatttctatccctagtatttctatcttactgctaaaatacaggaaaagtgccgtatttttaatgcatttagtggttttctttggtgttatctgttccatttttctttttcatacattgaagtgtgtctccttttcaaccaaaataatgaaatagtggagaccatgaaattgttgtgcctggctaattggcaaattaatttaccaatataataagtgtagcgccttgtttgaataccctttttgagaaggtatgatgagaatgggcaagggtgtcagcatctcttcttcttaataattaattgttttcagttttggttcacgaagaatgcttagttaatctgtaatgttgcctagagctgtatttatctgtttttatttatactagtgtagtaaagctgcatatcattacagtaaaaacgactactgtgatgagttaatcagaaaatctattaaaatctatatgacaa

SEQ ID NO: 17762 - DNA, 5600 bp, Homo sapiens
tctggccaacatagcgaggcccagtctcattgaaagaaaaaaaattttttaataaaaaataaaagcagatcttgggtaaagacatgtagtctggtttacaggtattaacaactgtctgtaatgtagtgattttgctccagacttaccttttccattatttagttctgaaattactgttctatgtatggtaaatgagaaaaattgctagattctagaactgtggcttctattcatagttggaaaaatgaagcataaacatttctaatttcagatcaacagcaaaaagaaagaatcagcatgggaaatgacaaaaagtttgtatgatgcgtggtcaggatggctagtagtaacactaacaggattggcatcaggggcactggccggattaatagacattgctgccgattggatgactgacctaaaggagggcatttgccttagtgcgttgtggtacaaccacgaacagtgctgttggggatctaatgaaacaacatttgaagagagggataaatgtccacagtggaaaacatgggcagaattaatcataggtcaagcagagggtcctggttcttatatcatgaactacataatgtacatcttctgggccttgagttttgcctttcttgcagtttccctggtaaaggtatttgctccatatgcctgtggctctggaattccagagattaaaactattttaagtggattcatcatcagaggttacttgggaaaatggactttaatgattaaaaccatcacattagtcctggctgtggcatcaggtttgagtttaggaaaagaaggtcccctggtacatgttgcctgttgctgcggaaatatcttttcctacctctttccaaagtatagcacaaacgaagctaaaaaaagggaggtgctatcagctgcctcagctgcaggggtttctgtagcttttggtgcaccaattggaggagttctttttagcctggaagaggttagctattattttcctctcaaaactttatggagatcattttttgctgctttagtggctgcatttgttttgaggtccatcaatccatttggtaacagccgtctggtccttttttatgtggagtatcatacaccatggtacctttttgaactgtttccttttattcttctaggggtatttggagggctttggggagcctttttcattagggcaaatattgcctggtgtcgtcgacgcaagtccacgaaatttggaaagtatcccgttctggaagtcattattgttgcagccattactgctgtgatagccttccctaatccatacactaggctaaacaccagtgaactgatcaaagagctttttacagactgtggtcccctggaatcctcttctctttgtgactacagaaatgacatgaatgccagtaaaattgtcgatgacattcctgatcgtccagcaggcattggagtatattcagctatatggcagttatgcctggcactcatatttaaaatcataatgacagtattcacttttggcatcaaggttccatcaggcttgttcatccccagcatggccattggagcgatcgcaggaaggattgtggggattgcggtggagcagcttgcctactatcaccacgactggtttatctttaaggagtggtgtgaggtcggggctgattgcattacacctggcctttatgccatggttggtgctgctgcatgcttaggtggtgtgacaagaatgactgtctccctggtggttattgtttttgagcttactggaggcttggaatatattgttccccttatggctgcagtcatgaccagtaaatgggttggagatgcctttggcagggaaggcatttatgaagcacacatccgattaaatggataccctttcttggatgcaaaagaagaattcactcataccaccctggctgctgacgttatgagacctcgaaggaatgatcctcccttagctgtcctgacacaggacaatatgacagtggatgatatagaaaacatgattaatgaaaccagctacaatggatttcctgtcataatgtcaaaagaatctcagagattagtgggatttgccctcagaagagacctgacaattgcaatagaaagtgccaggaaaaaacaagaaggtatcgttggcagttctcgggtgtgttttgcacagcacaccccatctcttccagcagaaagtcctcggccattgaagcttcgaagcattcttgacatgagcccttttacagtgacagaccacaccccaatggagatcgtggtggatattttccgaaagctgggactgaggcagtgccttgtaactcacaatgggcgcctccttggcattataacaaaaaaagatatcctccggcatatggcccagacggcaaaccaagaccccgcttcaataatgttcaactgaatctcacagatgaggagagagaagaaacggaagaggaagtttatttgttgaatagcacaactctttaacctgagggagtcatctacttttttttcctcctttacaaaaaaagaaaggaaatataaaagccgggtttttgcaacatggtttgcaaataatgctggtggaatggaggagttgtttggggagggaaaggagagagaaggaaaggagtgaggtatttcccgtctaacagaaagcagcgtatcaactcctattgttctgcactggatgcattcagctgaggatgtgcctgatagtgcaggcttgcgcctcaacagagatgacagcagagtcctcgagcacctggcctgttgctccaacattgcaaagacacattatcagtccctatttctagagggattactttgaattgagccatctataaaactgcaaggtcttgcccttttttttaatcaaaactgttctgtttaattcatgaattgtatagttaagcattacctttctacattccagaagagcctttatttctctctctctctctctctctctctctctctctctactgagctgtaacaaagcctctttaaatcggtgtatccttttgaagcagtcctttctcatattgagatgtactgtgattttactgaggtttcatcacaagaagggagtgtttcttgtgccattaaccatgtagtttgtaccatcactaaatgcttggaacagtacacatgcaccacaacaaaggctcatcaaacaggtaaagtctcgaaggaagcgagaacgaaatctctcattgtgtgccgtgtggctcaaaaccgaaaacaatgaagcttggttttaaaggataaagttttcttttttgttttcctctcagactttatggataatgtgaccgggtcttatgcaaattttctatttctaaaactactactatgatatacaagtgctgttgagcataattaaataaaatgctgctgctttgacagtaaagagaaggaagtattctgattagctgtatctggtattaattgcatgttaaaacactggaatttttaaaattgaaattagatcagtcattcttttcttttctcaagatgtctcatggctgacactgaagaagaaatgtaattcataacttgcactaaatgtatattttttttcttaaaaatttaccattcttatttatatttttatggattaaaatttataaaatacagatcagttaatattgcacttaagtaattttacctttttaatgtgatttttatagaataattcagacttacaaatacagagatatgaacaaagtttacagtgggaacaaaggtttaaaaaaaggttgtggttctctctctgtgatccagtgtgcacataaacctttctctgatctttcactgccatcctctggattatgtcttctgacctgtccattttgacccattaactggaaagttgaaaaactacattaactggaaagttgaaaaactacattactttggagaataaaaccgaaagttcgtgtataccttcttaaaaaaaaaatcaaaccaaaaatgtgaaaacaatagaattgcaaagatagcagttaaaattttaatctgaaaataacctttgaatctcgggctaggttacgtccatatttgaagtggtcagtgatggtttgaacattttttgcaggatgagttaaaatgcactggattatatttgggatttttgtttttggaattgtctgttttaatcacagccttaattcacaattggcaaaggcagtttactcaaaggactgggctaaatattctgtaattatgcatttttgataggaaaatgaaatttttgcaaacagacattttctttttttttggctggagtgcagtggggcatggtcttggctcactgcagcgttgaccacctgggctcaagtgatactcccgcctcagccacccaagtagctggcactacgggcacacgccaccatgcccagctaatttttttgtatttttagtagagatggggttttgccatgctgcccaggctggtctcaactcctcagctcaagcaatctgcctgcgtgagcctcccaaagtggtggaattacaggcgtgggccactgcgcctggcccagacagacattttctgaaacacaactggcaatgagctgtttttacattttgaaagtgattcttcacttcctagttcttaattatagtatacctattaagatctgtaagatcctgaagacataagatcatgaagccatataagaatgaggattgaaagttgagcaaaattttcgggattttgggaaacattcttagctgtgctatctgcctaaaattattccttattacttctctcctttgacagacttcaagttttcttcatagccctttcaaagttttttgagccatccagagtaaaatcatttctaaatgatagttctgtatatctccaactcgtcttaagtgtatttgcctgtgtgcaacgtattgctagactatgaactcctcagcatggctgctggataacttaattgtcctgagttaatagccttcaaaggacaaatcggtttctttgcagatagcttcgtaaaacttcacatggagtttattttatcatatttcccttttttatttctgctcctcctttaattgcccatcttgcttcagagactgacatttcagggtggatattaattaaagcattaattttgttttttggtatatttctatccctagtatttctatcttactgctaaaatacaggaaaagtgccgtatttttaatgcatttagtggttttctttggtgttatctgttccatttttctttttcatacattgaagtgtgtctccttttcaaccaaaataatgaaatagtggagaccatgaaattgttgtgcctggctaattggcaaattaatttaccaatataataagtgtagcgccttgtttgaataccctttttgagaaggtatgatgagaatgggcaagggtgtcagcatctcttcttcttaataattaattgttttcagttttggttcacgaagaatgcttagttaatctgtaatgttgcctagagctgtatttatctgtttttatttatactagtgtagtaaagctgcatatcattacagtaaaaacgactactgtgatgagttaatcagaaaatctattaaaatctatatgacaa

SEQ ID NO: 17763 - DNA, 5306 bp, Homo sapiens
ctttaatttttttgtagaggtcggttggtgagactgtaccttgaggagctgttgtgtgtgctttcagaatgaggctctctagattatagtattttagcaggatttcagaatgcatagggtagtgaaaatatagggaatcttacaaggtcttcggttccctgcatatcttgctacgatttggaatagagtatttatggtggagcagttagctctaaaatttgaagaaatgatatcctatttaaaaatagctccccatcccagttactgccctcccctcttacctacacaaacatacgttttgaaaattgtctatattcattgcctcctcctctttacaccctattcacattagtatatctggcaaaaattttttttaactgaatggtaaatgcatgactgacctttcaattaaagccaggagaaagaaacaaatcttaatagaagaaatggatagttaccctttgcttagggagcaaggaaacatgcaagttaaattcagaaaatccatttggaaaattcaagtaacatgaagaatttttatttggtatgtttgaatttctatgaaattatgaaataagccatatcctctttctaggtgctatcagctgcctcagctgcaggggtttctgtagcttttggtgcaccaattggaggagttctttttagcctggaagaggttagctattattttcctctcaaaactttatggagatcattttttgctgctttagtggctgcatttgttttgaggtccatcaatccatttggtaacagccgtctggtccttttttatgtggagtatcatacaccatggtacctttttgaactgtttccttttattcttctaggggtatttggagggctttggggagcctttttcattagggcaaatattgcctggtgtcgtcgacgcaagtccacgaaatttggaaagtatcccgttctggaagtcattattgttgcagccattactgctgtgatagccttccctaatccatacactaggctaaacaccagtgaactgatcaaagagctttttacagactgtggtcccctggaatcctcttctctttgtgactacagaaatgacatgaatgccagtaaaattgtcgatgacattcctgatcgtccagcaggcattggagtatattcagctatatggcagttatgcctggcactcatatttaaaatcataatgacagtattcacttttggcatcaaggttccatcaggcttgttcatccccagcatggccattggagcgatcgcaggaaggattgtggggattgcggtggagcagcttgcctactatcaccacgactggtttatctttaaggagtggtgtgaggtcggggctgattgcattacacctggcctttatgccatggttggtgctgctgcatgcttaggtggtgtgacaagaatgactgtctccctggtggttattgtttttgagcttactggaggcttggaatatattgttccccttatggctgcagtcatgaccagtaaatgggttggagatgcctttggcagggaaggcatttatgaagcacacatccgattaaatggataccctttcttggatgcaaaagaagaattcactcataccaccctggctgctgacgttatgagacctcgaaggaatgatcctcccttagctgtcctgacacaggacaatatgacagtggatgatatagaaaacatgattaatgaaaccagctacaatggatttcctgtcataatgtcaaaagaatctcagagattagtgggatttgccctcagaagagacctgacaattgcaatagaaagtgccaggaaaaaacaagaaggtatcgttggcagttctcgggtgtgttttgcacagcacaccccatctcttccagcagaaagtcctcggccattgaagcttcgaagcattcttgacatgagcccttttacagtgacagaccacaccccaatggagatcgtggtggatattttccgaaagctgggactgaggcagtgccttgtaactcacaatgggcgcctccttggcattataacaaaaaaagatatcctccggcatatggcccagacggcaaaccaagaccccgcttcaataatgttcaactgaatctcacagatgaggagagagaagaaacggaagaggaagtttatttgttgaatagcacaactctttaacctgagggagtcatctacttttttttcctcctttacaaaaaaagaaaggaaatataaaagccgggtttttgcaacatggtttgcaaataatgctggtggaatggaggagttgtttggggagggaaaggagagagaaggaaaggagtgaggtatttcccgtctaacagaaagcagcgtatcaactcctattgttctgcactggatgcattcagctgaggatgtgcctgatagtgcaggcttgcgcctcaacagagatgacagcagagtcctcgagcacctggcctgttgctccaacattgcaaagacacattatcagtccctatttctagagggattactttgaattgagccatctataaaactgcaaggtcttgcccttttttttaatcaaaactgttctgtttaattcatgaattgtatagttaagcattacctttctacattccagaagagcctttatttctctctctctctctctctctctctctctctctctactgagctgtaacaaagcctctttaaatcggtgtatccttttgaagcagtcctttctcatattgagatgtactgtgattttactgaggtttcatcacaagaagggagtgtttcttgtgccattaaccatgtagtttgtaccatcactaaatgcttggaacagtacacatgcaccacaacaaaggctcatcaaacaggtaaagtctcgaaggaagcgagaacgaaatctctcattgtgtgccgtgtggctcaaaaccgaaaacaatgaagcttggttttaaaggataaagttttcttttttgttttcctctcagactttatggataatgtgaccgggtcttatgcaaattttctatttctaaaactactactatgatatacaagtgctgttgagcataattaaataaaatgctgctgctttgacagtaaagagaaggaagtattctgattagctgtatctggtattaattgcatgttaaaacactggaatttttaaaattgaaattagatcagtcattcttttcttttctcaagatgtctcatggctgacactgaagaagaaatgtaattcataacttgcactaaatgtatattttttttcttaaaaatttaccattcttatttatatttttatggattaaaatttataaaatacagatcagttaatattgcacttaagtaattttacctttttaatgtgatttttatagaataattcagacttacaaatacagagatatgaacaaagtttacagtgggaacaaaggtttaaaaaaaggttgtggttctctctctgtgatccagtgtgcacataaacctttctctgatctttcactgccatcctctggattatgtcttctgacctgtccattttgacccattaactggaaagttgaaaaactacattaactggaaagttgaaaaactacattactttggagaataaaaccgaaagttcgtgtataccttcttaaaaaaaaaatcaaaccaaaaatgtgaaaacaatagaattgcaaagatagcagttaaaattttaatctgaaaataacctttgaatctcgggctaggttacgtccatatttgaagtggtcagtgatggtttgaacattttttgcaggatgagttaaaatgcactggattatatttgggatttttgtttttggaattgtctgttttaatcacagccttaattcacaattggcaaaggcagtttactcaaaggactgggctaaatattctgtaattatgcatttttgataggaaaatgaaatttttgcaaacagacattttctttttttttggctggagtgcagtggggcatggtcttggctcactgcagcgttgaccacctgggctcaagtgatactcccgcctcagccacccaagtagctggcactacgggcacacgccaccatgcccagctaatttttttgtatttttagtagagatggggttttgccatgctgcccaggctggtctcaactcctcagctcaagcaatctgcctgcgtgagcctcccaaagtggtggaattacaggcgtgggccactgcgcctggcccagacagacattttctgaaacacaactggcaatgagctgtttttacattttgaaagtgattcttcacttcctagttcttaattatagtatacctattaagatctgtaagatcctgaagacataagatcatgaagccatataagaatgaggattgaaagttgagcaaaattttcgggattttgggaaacattcttagctgtgctatctgcctaaaattattccttattacttctctcctttgacagacttcaagttttcttcatagccctttcaaagttttttgagccatccagagtaaaatcatttctaaatgatagttctgtatatctccaactcgtcttaagtgtatttgcctgtgtgcaacgtattgctagactatgaactcctcagcatggctgctggataacttaattgtcctgagttaatagccttcaaaggacaaatcggtttctttgcagatagcttcgtaaaacttcacatggagtttattttatcatatttcccttttttatttctgctcctcctttaattgcccatcttgcttcagagactgacatttcagggtggatattaattaaagcattaattttgttttttggtatatttctatccctagtatttctatcttactgctaaaatacaggaaaagtgccgtatttttaatgcatttagtggttttctttggtgttatctgttccatttttctttttcatacattgaagtgtgtctccttttcaaccaaaataatgaaatagtggagaccatgaaattgttgtgcctggctaattggcaaattaatttaccaatataataagtgtagcgccttgtttgaataccctttttgagaaggtatgatgagaatgggcaagggtgtcagcatctcttcttcttaataattaattgttttcagttttggttcacgaagaatgcttagttaatctgtaatgttgcctagagctgtatttatctgtttttatttatactagtgtagtaaagctgcatatcattacagtaaaaacgactactgtgatgagttaatcagaaaatctattaaaatctatatgacaa

SEQ ID NO: 17764 - DNA, 4408 bp, Homo sapiens
cggacgcgtgggtcgcggacgcgtgggtttggaaagtatcccgttctggaagtcattattgttgcagccattactgctgtgatagccttccctaatccatacactaggctaaacaccagtgaactgatcaaagagctttttacagactgtggtcccctggaatcctcttctctttgtgactacagaaatgacatgaatgccagtaaaattgtcgatgacattcctgatcgtccagcaggcattggagtatattcagctatatggcagttatgcctggcactcatatttaaaatcataatgacagtattcacttttggcatcaaggttccatcaggcttgttcatccccagcatggccattggagcgatcgcaggaaggattgtggggattgcggtggagcagcttgcctactatcaccacgactggtttatctttaaggagtggtgtgaggtcggggctgattgcattacacctggcctttatgccatggttggtgctgctgcatgcttaggtggtgtgacaagaatgactgtctccctggtggttattgtttttgagcttactggaggcttggaatatattgttccccttatggctgcagtcatgaccagtaaatgggttggagatgcctttggcagggaaggcatttatgaagcacacatccgattaaatggataccctttcttggatgcaaaagaagaattcactcataccaccctggctgctgacgttatgagacctcgaaggaatgatcctcccttagctgtcctgacacaggacaatatgacagtggatgatatagaaaacatgattaatgaaaccagctacaatggatttcctgtcataatgtcaaaagaatctcagagattagtgggatttgccctcagaagagacctgacaattgcaatagaaagtgccaggaaaaaacaagaaggtatcgttggcagttctcgggtgtgttttgcacagcacaccccatctcttccagcagaaagtcctcggccattgaagcttcgaagcattcttgacatgagcccttttacagtgacagaccacaccccaatggagatcgtggtggatattttccgaaagctgggactgaggcagtgccttgtaactcacaatgggcgcctccttggcattataacaaaaaaagatatcctccggcatatggcccagacggcaaaccaagaccccgcttcaataatgttcaactgaatctcacagatgaggagagagaagaaacggaagaggaagtttatttgttgaatagcacaactctttaacctgagggagtcatctacttttttttcctcctttacaaaaaaagaaaggaaatataaaagccgggtttttgcaacatggtttgcaaataatgctggtggaatggaggagttgtttggggagggaaaggagagagaaggaaaggagtgaggtatttcccgtctaacagaaagcagcgtatcaactcctattgttctgcactggatgcattcagctgaggatgtgcctgatagtgcaggcttgcgcctcaacagagatgacagcagagtcctcgagcacctggcctgttgctccaacattgcaaagacacattatcagtccctatttctagagggattactttgaattgagccatctataaaactgcaaggtcttgcccttttttttaatcaaaactgttctgtttaattcatgaattgtatagttaagcattacctttctacattccagaagagcctttatttctctctctctctctctctctctctctctctctctactgagctgtaacaaagcctctttaaatcggtgtatccttttgaagcagtcctttctcatattgagatgtactgtgattttactgaggtttcatcacaagaagggagtgtttcttgtgccattaaccatgtagtttgtaccatcactaaatgcttggaacagtacacatgcaccacaacaaaggctcatcaaacaggtaaagtctcgaaggaagcgagaacgaaatctctcattgtgtgccgtgtggctcaaaaccgaaaacaatgaagcttggttttaaaggataaagttttcttttttgttttcctctcagactttatggataatgtgaccgggtcttatgcaaattttctatttctaaaactactactatgatatacaagtgctgttgagcataattaaataaaatgctgctgctttgacagtaaagagaaggaagtattctgattagctgtatctggtattaattgcatgttaaaacactggaatttttaaaattgaaattagatcagtcattcttttcttttctcaagatgtctcatggctgacactgaagaagaaatgtaattcataacttgcactaaatgtatattttttttcttaaaaatttaccattcttatttatatttttatggattaaaatttataaaatacagatcagttaatattgcacttaagtaattttacctttttaatgtgatttttatagaataattcagacttacaaatacagagatatgaacaaagtttacagtgggaacaaaggtttaaaaaaaggttgtggttctctctctgtgatccagtgtgcacataaacctttctctgatctttcactgccatcctctggattatgtcttctgacctgtccattttgacccattaactggaaagttgaaaaactacattaactggaaagttgaaaaactacattactttggagaataaaaccgaaagttcgtgtataccttcttaaaaaaaaaatcaaaccaaaaatgtgaaaacaatagaattgcaaagatagcagttaaaattttaatctgaaaataacctttgaatctcgggctaggttacgtccatatttgaagtggtcagtgatggtttgaacattttttgcaggatgagttaaaatgcactggattatatttgggatttttgtttttggaattgtctgttttaatcacagccttaattcacaattggcaaaggcagtttactcaaaggactgggctaaatattctgtaattatgcatttttgataggaaaatgaaatttttgcaaacagacattttctttttttttggctggagtgcagtggggcatggtcttggctcactgcagcgttgaccacctgggctcaagtgatactcccgcctcagccacccaagtagctggcactacgggcacacgccaccatgcccagctaatttttttgtatttttagtagagatggggttttgccatgctgcccaggctggtctcaactcctcagctcaagcaatctgcctgcgtgagcctcccaaagtggtggaattacaggcgtgggccactgcgcctggcccagacagacattttctgaaacacaactggcaatgagctgtttttacattttgaaagtgattcttcacttcctagttcttaattatagtatacctattaagatctgtaagatcctgaagacataagatcatgaagccatataagaatgaggattgaaagttgagcaaaattttcgggattttgggaaacattcttagctgtgctatctgcctaaaattattccttattacttctctcctttgacagacttcaagttttcttcatagccctttcaaagttttttgagccatccagagtaaaatcatttctaaatgatagttctgtatatctccaactcgtcttaagtgtatttgcctgtgtgcaacgtattgctagactatgaactcctcagcatggctgctggataacttaattgtcctgagttaatagccttcaaaggacaaatcggtttctttgcagatagcttcgtaaaacttcacatggagtttattttatcatatttcccttttttatttctgctcctcctttaattgcccatcttgcttcagagactgacatttcagggtggatattaattaaagcattaattttgttttttggtatatttctatccctagtatttctatcttactgctaaaatacaggaaaagtgccgtatttttaatgcatttagtggttttctttggtgttatctgttccatttttctttttcatacattgaagtgtgtctccttttcaaccaaaataatgaaatagtggagaccatgaaattgttgtgcctggctaattggcaaattaatttaccaatataataagtgtagcgccttgtttgaataccctttttgagaaggtatgatgagaatgggcaagggtgtcagcatctcttcttcttaataattaattgttttcagttttggttcacgaagaatgcttagttaatctgtaatgttgcctagagctgtatttatctgtttttatttatactagtgtagtaaagctgcatatcattacagtaaaaacgactactgtgatgagttaatcagaaaatctattaaaatctatatgacaa

SEQ ID NO: 17765 - DNA, 6221 bp, Homo sapiens
ttctcttccccttccgtgggtcagggccggtccggtccggaacctgcagcccctttcccagtgttctagttcgcccgtgacccggaataatgagcaaggagggtgtggtgggttgaaagccatcctactttactcccgagttagagcatggattcagttttagtcttaagggggaagtgagattggagatttttatttttaattttgggcagaagcaggttgactctagggatctccagagcgagaggatttaacttcatgttgctcccgtgtttgaaggaggacaataaaagtcccaccgggcaaaattttcgtaacctctgcggtagaaaacgtcaggtatcttttaaatcgcgatagttttcgctgtgtcaggctttcttcggtggagctccgagggtagctaggttctaggtttgaaacagatgcagaatccaaaggcagcgcaaaaaacagccaccgattttgctatgtctctgagctgcgagataatcagacagctaaatggagtctgagcagctgttccatagaggctactatagaaacagctacaacagtataacaagtgcaagtagtgatgaggaacttttagatggagcaggtgttattatggactttcaaacatctgaagatgacaatttattagatggtgacactgcagttggaactcattatacaatgacaaatggaggcagcattaacagttctacacatttactggatcttttggatgaaccaattccaggtgttggtacatatgatgatttccatactattgattgggtgcgagaaaaatgtaaagacagagaaaggcatagacggatcaacagcaaaaagaaagaatcagcatgggaaatgacaaaaagtttgtatgatgcgtggtcaggatggctagtagtaacactaacaggattggcatcaggggcactggccggattaatagacattgctgccgattggatgactgacctaaaggagggcatttgccttagtgcgttgtggtacaaccacgaacagtgctgttggggatctaatgaaacaacatttgaagagagggataaatgtccacagtggaaaacatgggcagaattaatcataggtcaagcagagggtcctggttcttatatcatgaactacataatgtacatcttctgggccttgagttttgcctttcttgcagtttccctggtaaaggtatttgctccatatgcctgtggctctggaattccagagattaaaactattttaagtggattcatcatcagaggttacttgggaaaatggactttaatgattaaaaccatcacattagtcctggctgtggcatcaggtttgagtttaggaaaagaaggtcccctggtacatgttgcctgttgctgcggaaatatcttttcctacctctttccaaagtatagcacaaacgaagctaaaaaaagggaggtgctatcagctgcctcagctgcaggggtttctgtagcttttggtgcaccaattggaggagttctttttagcctggaagaggttagctattattttcctctcaaaactttatggagatcattttttgctgctttagtggctgcatttgttttgaggtccatcaatccatttggtaacagccgtctggtccttttttatgtggagtatcatacaccatggtacctttttgaactgtttccttttattcttctaggggtatttggagggctttggggagcctttttcattagggcaaatattgcctggtgtcgtcgacgcaagtccacgaaatttggaaagtatcccgttctggaagtcattattgttgcagccattactgctgtgatagccttccctaatccatacactaggctaaacaccagtgaactgatcaaagagctttttacagactgtggtcccctggaatcctcttctctttgtgactacagaaatgacatgaatgccagtaaaattgtcgatgacattcctgatcgtccagcaggcattggagtatattcagctatatggcagttatgcctggcactcatatttaaaatcataatgacagtattcacttttggcatcaaggttccatcaggcttgttcatccccagcatggccattggagcgatcgcaggaaggattgtggggattgcggtggagcagcttgcctactatcaccacgactggtttatctttaaggagtggtgtgaggtcggggctgattgcattacacctggcctttatgccatggttggtgctgctgcatgcttaggtggtgtgacaagaatgactgtctccctggtggttattgtttttgagcttactggaggcttggaatatattgttccccttatggctgcagtcatgaccagtaaatgggttggagatgcctttggcagggaaggcatttatgaagcacacatccgattaaatggataccctttcttggatgcaaaagaagaattcactcataccaccctggctgctgacgttatgagacctcgaaggaatgatcctcccttagctgtcctgacacaggacaatatgacagtggatgatatagaaaacatgattaatgaaaccagctacaatggatttcctgtcataatgtcaaaagaatctcagagattagtgggatttgccctcagaagagacctgacaattgcaatagaaagtgccaggaaaaaacaagaaggtatcgttggcagttctcgggtgtgttttgcacagcacaccccatctcttccagcagaaagtcctcggccattgaagcttcgaagcattcttgacatgagcccttttacagtgacagaccacaccccaatggagatcgtggtggatattttccgaaagctgggactgaggcagtgccttgtaactcacaatgggattgtcttggggatcatcacaaagaagaacatattagagcatctcgagcaactaaagcagcacgtcgaagcgcctccttggcattataacaaaaaaagatatcctccggcatatggcccagacggcaaaccaagaccccgcttcaataatgttcaactgaatctcacagatgaggagagagaagaaacggaagaggaagtttatttgttgaatagcacaactctttaacctgagggagtcatctacttttttttcctcctttacaaaaaaagaaaggaaatataaaagccgggtttttgcaacatggtttgcaaataatgctggtggaatggaggagttgtttggggagggaaaggagagagaaggaaaggagtgaggtatttcccgtctaacagaaagcagcgtatcaactcctattgttctgcactggatgcattcagctgaggatgtgcctgatagtgcaggcttgcgcctcaacagagatgacagcagagtcctcgagcacctggcctgttgctccaacattgcaaagacacattatcagtccctatttctagagggattactttgaattgagccatctataaaactgcaaggtcttgcccttttttttaatcaaaactgttctgtttaattcatgaattgtatagttaagcattacctttctacattccagaagagcctttatttctctctctctctctctctctctctctctctctctactgagctgtaacaaagcctctttaaatcggtgtatccttttgaagcagtcctttctcatattgagatgtactgtgattttactgaggtttcatcacaagaagggagtgtttcttgtgccattaaccatgtagtttgtaccatcactaaatgcttggaacagtacacatgcaccacaacaaaggctcatcaaacaggtaaagtctcgaaggaagcgagaacgaaatctctcattgtgtgccgtgtggctcaaaaccgaaaacaatgaagcttggttttaaaggataaagttttcttttttgttttcctctcagactttatggataatgtgaccgggtcttatgcaaattttctatttctaaaactactactatgatatacaagtgctgttgagcataattaaataaaatgctgctgctttgacagtaaagagaaggaagtattctgattagctgtatctggtattaattgcatgttaaaacactggaatttttaaaattgaaattagatcagtcattcttttcttttctcaagatgtctcatggctgacactgaagaagaaatgtaattcataacttgcactaaatgtatattttttttcttaaaaatttaccattcttatttatatttttatggattaaaatttataaaatacagatcagttaatattgcacttaagtaattttacctttttaatgtgatttttatagaataattcagacttacaaatacagagatatgaacaaagtttacagtgggaacaaaggtttaaaaaaaggttgtggttctctctctgtgatccagtgtgcacataaacctttctctgatctttcactgccatcctctggattatgtcttctgacctgtccattttgacccattaactggaaagttgaaaaactacattaactggaaagttgaaaaactacattactttggagaataaaaccgaaagttcgtgtataccttcttaaaaaaaaaatcaaaccaaaaatgtgaaaacaatagaattgcaaagatagcagttaaaattttaatctgaaaataacctttgaatctcgggctaggttacgtccatatttgaagtggtcagtgatggtttgaacattttttgcaggatgagttaaaatgcactggattatatttgggatttttgtttttggaattgtctgttttaatcacagccttaattcacaattggcaaaggcagtttactcaaaggactgggctaaatattctgtaattatgcatttttgataggaaaatgaaatttttgcaaacagacattttctttttttttggctggagtgcagtggggcatggtcttggctcactgcagcgttgaccacctgggctcaagtgatactcccgcctcagccacccaagtagctggcactacgggcacacgccaccatgcccagctaatttttttgtatttttagtagagatggggttttgccatgctgcccaggctggtctcaactcctcagctcaagcaatctgcctgcgtgagcctcccaaagtggtggaattacaggcgtgggccactgcgcctggcccagacagacattttctgaaacacaactggcaatgagctgtttttacattttgaaagtgattcttcacttcctagttcttaattatagtatacctattaagatctgtaagatcctgaagacataagatcatgaagccatataagaatgaggattgaaagttgagcaaaattttcgggattttgggaaacattcttagctgtgctatctgcctaaaattattccttattacttctctcctttgacagacttcaagttttcttcatagccctttcaaagttttttgagccatccagagtaaaatcatttctaaatgatagttctgtatatctccaactcgtcttaagtgtatttgcctgtgtgcaacgtattgctagactatgaactcctcagcatggctgctggataacttaattgtcctgagttaatagccttcaaaggacaaatcggtttctttgcagatagcttcgtaaaacttcacatggagtttattttatcatatttcccttttttatttctgctcctcctttaattgcccatcttgcttcagagactgacatttcagggtggatattaattaaagcattaattttgttttttggtatatttctatccctagtatttctatcttactgctaaaatacaggaaaagtgccgtatttttaatgcatttagtggttttctttggtgttatctgttccatttttctttttcatacattgaagtgtgtctccttttcaaccaaaataatgaaatagtggagaccatgaaattgttgtgcctggctaattggcaaattaatttaccaatataataagtgtagcgccttgtttgaataccctttttgagaaggtatgatgagaatgggcaagggtgtcagcatctcttcttcttaataattaattgttttcagttttggttcacgaagaatgcttagttaatctgtaatgttgcctagagctgtatttatctgtttttatttatactagtgtagtaaagctgcatatcattacagtaaaaacgactactgtgatgagttaatcagaaaatctattaaaatctatatgacaa

SEQ ID NO: 17766 - DNA, 3867 bp, Homo sapiens
gtggcacatgcctgtaatcccagctacttgggaagctgaggcaggagaattgcttgaaccggggacccaggaggcggaggttgcagtgagctgagatcgcgccactgcactccagcctgggctacagagcgagactctgtctcaaaaaataaataaataaataaatgaaaaagagaaaatattgagaggatttggtcatcattttactgctctcttcatgtgatggaaatcaattttccttctcaaatgggatcagtatcatttcctagtcatacatccatccagtttttgttacttttttgttggcatacattaatcaaaatagctctgcttcattgaggcatgcagtcctcagactctcggtggaaaggctgtcatactattagtgaccatagtaactttttataccaaaggatggttgctggataattttaatatctttaccaataaagtactttttggaaatacaaaatcaggctgcttgctttgctctattcctgtcaacaaaaaggatttagctatagatttagcttctccttttattttcccttttatttcataggagtcttctgtttattcctttcaggcgcctccttggcattataacaaaaaaagatatcctccggcatatggcccagacggcaaaccaagaccccgcttcaataatgttcaactgaatctcacagatgaggagagagaagaaacggaagaggaagtttatttgttgaatagcacaactctttaacctgagggagtcatctacttttttttcctcctttacaaaaaaagaaaggaaatataaaagccgggtttttgcaacatggtttgcaaataatgctggtggaatggaggagttgtttggggagggaaaggagagagaaggaaaggagtgaggtatttcccgtctaacagaaagcagcgtatcaactcctattgttctgcactggatgcattcagctgaggatgtgcctgatagtgcaggcttgcgcctcaacagagatgacagcagagtcctcgagcacctggcctgttgctccaacattgcaaagacacattatcagtccctatttctagagggattactttgaattgagccatctataaaactgcaaggtcttgcccttttttttaatcaaaactgttctgtttaattcatgaattgtatagttaagcattacctttctacattccagaagagcctttatttctctctctctctctctctctctctctctctctctactgagctgtaacaaagcctctttaaatcggtgtatccttttgaagcagtcctttctcatattgagatgtactgtgattttactgaggtttcatcacaagaagggagtgtttcttgtgccattaaccatgtagtttgtaccatcactaaatgcttggaacagtacacatgcaccacaacaaaggctcatcaaacaggtaaagtctcgaaggaagcgagaacgaaatctctcattgtgtgccgtgtggctcaaaaccgaaaacaatgaagcttggttttaaaggataaagttttcttttttgttttcctctcagactttatggataatgtgaccgggtcttatgcaaattttctatttctaaaactactactatgatatacaagtgctgttgagcataattaaataaaatgctgctgctttgacagtaaagagaaggaagtattctgattagctgtatctggtattaattgcatgttaaaacactggaatttttaaaattgaaattagatcagtcattcttttcttttctcaagatgtctcatggctgacactgaagaagaaatgtaattcataacttgcactaaatgtatattttttttcttaaaaatttaccattcttatttatatttttatggattaaaatttataaaatacagatcagttaatattgcacttaagtaattttacctttttaatgtgatttttatagaataattcagacttacaaatacagagatatgaacaaagtttacagtgggaacaaaggtttaaaaaaaggttgtggttctctctctgtgatccagtgtgcacataaacctttctctgatctttcactgccatcctctggattatgtcttctgacctgtccattttgacccattaactggaaagttgaaaaactacattaactggaaagttgaaaaactacattactttggagaataaaaccgaaagttcgtgtataccttcttaaaaaaaaaatcaaaccaaaaatgtgaaaacaatagaattgcaaagatagcagttaaaattttaatctgaaaataacctttgaatctcgggctaggttacgtccatatttgaagtggtcagtgatggtttgaacattttttgcaggatgagttaaaatgcactggattatatttgggatttttgtttttggaattgtctgttttaatcacagccttaattcacaattggcaaaggcagtttactcaaaggactgggctaaatattctgtaattatgcatttttgataggaaaatgaaatttttgcaaacagacattttctttttttttggctggagtgcagtggggcatggtcttggctcactgcagcgttgaccacctgggctcaagtgatactcccgcctcagccacccaagtagctggcactacgggcacacgccaccatgcccagctaatttttttgtatttttagtagagatggggttttgccatgctgcccaggctggtctcaactcctcagctcaagcaatctgcctgcgtgagcctcccaaagtggtggaattacaggcgtgggccactgcgcctggcccagacagacattttctgaaacacaactggcaatgagctgtttttacattttgaaagtgattcttcacttcctagttcttaattatagtatacctattaagatctgtaagatcctgaagacataagatcatgaagccatataagaatgaggattgaaagttgagcaaaattttcgggattttgggaaacattcttagctgtgctatctgcctaaaattattccttattacttctctcctttgacagacttcaagttttcttcatagccctttcaaagttttttgagccatccagagtaaaatcatttctaaatgatagttctgtatatctccaactcgtcttaagtgtatttgcctgtgtgcaacgtattgctagactatgaactcctcagcatggctgctggataacttaattgtcctgagttaatagccttcaaaggacaaatcggtttctttgcagatagcttcgtaaaacttcacatggagtttattttatcatatttcccttttttatttctgctcctcctttaattgcccatcttgcttcagagactgacatttcagggtggatattaattaaagcattaattttgttttttggtatatttctatccctagtatttctatcttactgctaaaatacaggaaaagtgccgtatttttaatgcatttagtggttttctttggtgttatctgttccatttttctttttcatacattgaagtgtgtctccttttcaaccaaaataatgaaatagtggagaccatgaaattgttgtgcctggctaattggcaaattaatttaccaatataataagtgtagcgccttgtttgaataccctttttgagaaggtatgatgagaatgggcaagggtgtcagcatctcttcttcttaataattaattgttttcagttttggttcacgaagaatgcttagttaatctgtaatgttgcctagagctgtatttatctgtttttatttatactagtgtagtaaagctgcatatcattacagtaaaaacgactactgtgatgagttaatcagaaaatctattaaaatctatatgacaa

SEQ ID NO: 17767 - DNA, 3952 bp, Homo sapiens
ttctcttccccttccgtgggtcagggccggtccggtccggaacctgcagcccctttcccagtgttctagttcgcccgtgacccggaataatgagcaaggagggtgtggtgggttgaaagccatcctactttactcccgagttagagcatggattcagttttagtcttaagggggaagtgagattggagatttttatttttaattttgggcagaagcaggttgactctagggatctccagagcgagaggatttaacttcatgttgctcccgtgtttgaaggaggacaataaaagtcccaccgggcaaaattttcgtaacctctgcggtagaaaacgtcaggtatcttttaaatcgcgatagttttcgctgtgtcaggctttcttcggtggagctccgagggtagctaggttctaggtttgaaacagatgcagaatccaaaggcagcgcaaaaaacagccaccgattttgctatgtctctgagctgcgagataatcagacagctaaatggagtctgagcagctgttccatagaggctactatagaaacagctacaacagtataacaagtgcaagtagtgatgaggaacttttagatggagcaggtgttattatggactttcaaacatctgaagatgacaatttattagatggtgacactgcagttggaactcattatacaatgacaaatggaggcagcattaacagttctacacatttactggatcttttggatgaaccaattccaggtgttggtacatatgatgatttccatactattgattgggtgcgagaaaaatgtaaagacagagaaaggcatagacggatcaacagcaaaaagaaagaatcagcatgggaaatgacaaaaagtttgtatgatgcgtggtcaggatggctagtagtaacactaacaggattggcatcaggggcactggccggattaatagacattgctgccgattggatgactgacctaaaggagggcatttgccttagtgcgttgtggtacaaccacgaacagtgctgttggggatctaatgaaacaacatttgaagagagggataaatgtccacagtggaaaacatgggcagaattaatcataggtcaagcagagggtcctggttcttatatcatgaactacataatgtacatcttctgggccttgagttttgcctttcttgcagtttccctggtaaaggtatttgctccatatgcctgtggctctggaattccagagattaaaactattttaagtggattcatcatcagaggttacttgggaaaatggactttaatgattaaaaccatcacattagtcctggctgtggcatcaggtttgagtttaggaaaagaaggtcccctggtacatgttgcctgttgctgcggaaatatcttttcctacctctttccaaagtatagcacaaacgaagctaaaaaaagggaggtgctatcagctgcctcagctgcaggggtttctgtagcttttggtgcaccaattggaggagttctttttagcctggaagaggttagctattattttcctctcaaaactttatggagatcattttttgctgctttagtggctgcatttgttttgaggtccatcaatccatttggtaacagccgtctggtccttttttatgtggagtatcatacaccatggtacctttttgaactgtttccttttattcttctaggggtatttggagggctttggggagcctttttcattagggcaaatattgcctggtgtcgtcgacgcaagtccacgaaatttggaaagtatcccgttctggaagtcattattgttgcagccattactgctgtgatagccttccctaatccatacactaggctaaacaccagtgaactgatcaaagagctttttacagactgtggtcccctggaatcctcttctctttgtgactacagaaatgacatgaatgccagtaaaattgtcgatgacattcctgatcgtccagcaggcattggagtatattcagctatatggcagttatgcctggcactcatatttaaaatcataatgacagtattcacttttggcatcaaggttccatcaggcttgttcatccccagcatggccattggagcgatcgcaggaaggattgtggggattgcggtggagcagcttgcctactatcaccacgactggtttatctttaaggagtggtgtgaggtcggggctgattgcattacacctggcctttatgccatggttggtgctgctgcatgcttaggtggtgtgacaagaatgactgtctccctggtggttattgtttttgagcttactggaggcttggaatatattgttccccttatggctgcagtcatgaccagtaaatgggttggagatgcctttggcagggaaggcatttatgaagcacacatccgattaaatggataccctttcttggatgcaaaagaagaattcactcataccaccctggctgctgacgttatgagacctcgaaggaatgatcctcccttagctgtcctgacacaggacaatatgacagtggatgatatagaaaacatgattaatgaaaccagctacaatggatttcctgtcataatgtcaaaagaatctcagagattagtgggatttgccctcagaagagacctgacaattgcaatagaaagtgccaggaaaaaacaagaaggtatcgttggcagttctcgggtgtgttttgcacagcacaccccatctcttccagcagaaagtcctcggccattgaagcttcgaagcattcttgacatgagcccttttacagtgacagaccacaccccaatggagatcgtggtggatattttccgaaagctgggactgaggcagtgccttgtaactcacaatgggcgcctccttggcattataacaaaaaaagatatcctccggcatatggcccagacggcaaaccaagaccccgcttcaataatgttcaactgaatctcacagatgaggagagagaagaaacggaagaggaagtttatttgttgaatagcacaactctttaacctgagggagtcatctacttttttttcctcctttacaaaaaaagaaaggaaatataaaagccgggtttttgcaacatggtttgcaaataatgctggtggaatggaggagttgtttggggagggaaaggagagagaaggaaaggagtgaggtatttcccgtctaacagaaagcagcgtatcaactcctattgttctgcactggatgcattcagctgaggatgtgcctgatagtgcaggcttgcgcctcaacagagatgacagcagagtcctcgagcacctggcctgttgctccaacattgcaaagacacattatcagtccctatttctagagggattactttgaattgagccatctataaaactgcaaggtcttgcccttttttttaatcaaaactgttctgtttaattcatgaattgtatagttaagcattacctttctacattccagaagagcctttatttctctctctctctctctctctctctctctctctctactgagctgtaacaaagcctctttaaatcggtgtatccttttgaagcagtcctttctcatattgagatgtactgtgattttactgaggtttcatcacaagaagggagtgtttcttgtgccattaaccatgtagtttgtaccatcactaaatgcttggaacagtacacatgcaccacaacaaaggctcatcaaacaggtaaagtctcgaaggaagcgagaacgaaatctctcattgtgtgccgtgtggctcaaaaccgaaaacaatgaagcttggttttaaaggataaagttttcttttttgttttcctctcagactttatggataatgtgaccgggtcttatgcaaattttctatttctaaaactactactatgatatacaagtgctgttgagcataattaaataaaatgctgctgctttgacagta

SEQ ID NO: 17768 - DNA, 3356 bp, Homo sapiens
ttcggaaaagttcaaaagttgtgacaacaccctggggcctttcggagtcctatctactttcacacacaagtagtctccggttcttctcccaatggagcttgcagtccaccacattgaaccggatagcttgcggcaagctatccgggcttcaataatgttcaactgaatctcacagatgaggagagagaagaaacggaagaggaagtttatttgttgaatagcacaactctttaacctgagggagtcatctacttttttttcctcctttacaaaaaaagaaaggaaatataaaagccgggtttttgcaacatggtttgcaaataatgctggtggaatggaggagttgtttggggagggaaaggagagagaaggaaaggagtgaggtatttcccgtctaacagaaagcagcgtatcaactcctattgttctgcactggatgcattcagctgaggatgtgcctgatagtgcaggcttgcgcctcaacagagatgacagcagagtcctcgagcacctggcctgttgctccaacattgcaaagacacattatcagtccctatttctagagggattactttgaattgagccatctataaaactgcaaggtcttgcccttttttttaatcaaaactgttctgtttaattcatgaattgtatagttaagcattacctttctacattccagaagagcctttatttctctctctctctctctctctctctctctctctctactgagctgtaacaaagcctctttaaatcggtgtatccttttgaagcagtcctttctcatattgagatgtactgtgattttactgaggtttcatcacaagaagggagtgtttcttgtgccattaaccatgtagtttgtaccatcactaaatgcttggaacagtacacatgcaccacaacaaaggctcatcaaacaggtaaagtctcgaaggaagcgagaacgaaatctctcattgtgtgccgtgtggctcaaaaccgaaaacaatgaagcttggttttaaaggataaagttttcttttttgttttcctctcagactttatggataatgtgaccgggtcttatgcaaattttctatttctaaaactactactatgatatacaagtgctgttgagcataattaaataaaatgctgctgctttgacagtaaagagaaggaagtattctgattagctgtatctggtattaattgcatgttaaaacactggaatttttaaaattgaaattagatcagtcattcttttcttttctcaagatgtctcatggctgacactgaagaagaaatgtaattcataacttgcactaaatgtatattttttttcttaaaaatttaccattcttatttatatttttatggattaaaatttataaaatacagatcagttaatattgcacttaagtaattttacctttttaatgtgatttttatagaataattcagacttacaaatacagagatatgaacaaagtttacagtgggaacaaaggtttaaaaaaaggttgtggttctctctctgtgatccagtgtgcacataaacctttctctgatctttcactgccatcctctggattatgtcttctgacctgtccattttgacccattaactggaaagttgaaaaactacattaactggaaagttgaaaaactacattactttggagaataaaaccgaaagttcgtgtataccttcttaaaaaaaaaatcaaaccaaaaatgtgaaaacaatagaattgcaaagatagcagttaaaattttaatctgaaaataacctttgaatctcgggctaggttacgtccatatttgaagtggtcagtgatggtttgaacattttttgcaggatgagttaaaatgcactggattatatttgggatttttgtttttggaattgtctgttttaatcacagccttaattcacaattggcaaaggcagtttactcaaaggactgggctaaatattctgtaattatgcatttttgataggaaaatgaaatttttgcaaacagacattttctttttttttggctggagtgcagtggggcatggtcttggctcactgcagcgttgaccacctgggctcaagtgatactcccgcctcagccacccaagtagctggcactacgggcacacgccaccatgcccagctaatttttttgtatttttagtagagatggggttttgccatgctgcccaggctggtctcaactcctcagctcaagcaatctgcctgcgtgagcctcccaaagtggtggaattacaggcgtgggccactgcgcctggcccagacagacattttctgaaacacaactggcaatgagctgtttttacattttgaaagtgattcttcacttcctagttcttaattatagtatacctattaagatctgtaagatcctgaagacataagatcatgaagccatataagaatgaggattgaaagttgagcaaaattttcgggattttgggaaacattcttagctgtgctatctgcctaaaattattccttattacttctctcctttgacagacttcaagttttcttcatagccctttcaaagttttttgagccatccagagtaaaatcatttctaaatgatagttctgtatatctccaactcgtcttaagtgtatttgcctgtgtgcaacgtattgctagactatgaactcctcagcatggctgctggataacttaattgtcctgagttaatagccttcaaaggacaaatcggtttctttgcagatagcttcgtaaaacttcacatggagtttattttatcatatttcccttttttatttctgctcctcctttaattgcccatcttgcttcagagactgacatttcagggtggatattaattaaagcattaattttgttttttggtatatttctatccctagtatttctatcttactgctaaaatacaggaaaagtgccgtatttttaatgcatttagtggttttctttggtgttatctgttccatttttctttttcatacattgaagtgtgtctccttttcaaccaaaataatgaaatagtggagaccatgaaattgttgtgcctggctaattggcaaattaatttaccaatataataagtgtagcgccttgtttgaataccctttttgagaaggtatgatgagaatgggcaagggtgtcagcatctcttcttcttaataattaattgttttcagttttggttcacgaagaatgcttagttaatctgtaatgttgcctagagctgtatttatctgtttttatttatactagtgtagtaaagctgcatatcattacagtaaaaacgactactgtgatgagttaatcagaaaatctattaaaatctatatgacaa

SEQ ID NO: 17769 - DNA, 3240 bp, Homo sapiens
ggtgatctagaggatcttggagctatcgggcttcaataatgttcaactgaatctcacagatgaggagagagaagaaacggaagaggaagtttatttgttgaatagcacaactctttaacctgagggagtcatctacttttttttcctcctttacaaaaaaagaaaggaaatataaaagccgggtttttgcaacatggtttgcaaataatgctggtggaatggaggagttgtttggggagggaaaggagagagaaggaaaggagtgaggtatttcccgtctaacagaaagcagcgtatcaactcctattgttctgcactggatgcattcagctgaggatgtgcctgatagtgcaggcttgcgcctcaacagagatgacagcagagtcctcgagcacctggcctgttgctccaacattgcaaagacacattatcagtccctatttctagagggattactttgaattgagccatctataaaactgcaaggtcttgcccttttttttaatcaaaactgttctgtttaattcatgaattgtatagttaagcattacctttctacattccagaagagcctttatttctctctctctctctctctctctctctctctctctactgagctgtaacaaagcctctttaaatcggtgtatccttttgaagcagtcctttctcatattgagatgtactgtgattttactgaggtttcatcacaagaagggagtgtttcttgtgccattaaccatgtagtttgtaccatcactaaatgcttggaacagtacacatgcaccacaacaaaggctcatcaaacaggtaaagtctcgaaggaagcgagaacgaaatctctcattgtgtgccgtgtggctcaaaaccgaaaacaatgaagcttggttttaaaggataaagttttcttttttgttttcctctcagactttatggataatgtgaccgggtcttatgcaaattttctatttctaaaactactactatgatatacaagtgctgttgagcataattaaataaaatgctgctgctttgacagtaaagagaaggaagtattctgattagctgtatctggtattaattgcatgttaaaacactggaatttttaaaattgaaattagatcagtcattcttttcttttctcaagatgtctcatggctgacactgaagaagaaatgtaattcataacttgcactaaatgtatattttttttcttaaaaatttaccattcttatttatatttttatggattaaaatttataaaatacagatcagttaatattgcacttaagtaattttacctttttaatgtgatttttatagaataattcagacttacaaatacagagatatgaacaaagtttacagtgggaacaaaggtttaaaaaaaggttgtggttctctctctgtgatccagtgtgcacataaacctttctctgatctttcactgccatcctctggattatgtcttctgacctgtccattttgacccattaactggaaagttgaaaaactacattaactggaaagttgaaaaactacattactttggagaataaaaccgaaagttcgtgtataccttcttaaaaaaaaaatcaaaccaaaaatgtgaaaacaatagaattgcaaagatagcagttaaaattttaatctgaaaataacctttgaatctcgggctaggttacgtccatatttgaagtggtcagtgatggtttgaacattttttgcaggatgagttaaaatgcactggattatatttgggatttttgtttttggaattgtctgttttaatcacagccttaattcacaattggcaaaggcagtttactcaaaggactgggctaaatattctgtaattatgcatttttgataggaaaatgaaatttttgcaaacagacattttctttttttttggctggagtgcagtggggcatggtcttggctcactgcagcgttgaccacctgggctcaagtgatactcccgcctcagccacccaagtagctggcactacgggcacacgccaccatgcccagctaatttttttgtatttttagtagagatggggttttgccatgctgcccaggctggtctcaactcctcagctcaagcaatctgcctgcgtgagcctcccaaagtggtggaattacaggcgtgggccactgcgcctggcccagacagacattttctgaaacacaactggcaatgagctgtttttacattttgaaagtgattcttcacttcctagttcttaattatagtatacctattaagatctgtaagatcctgaagacataagatcatgaagccatataagaatgaggattgaaagttgagcaaaattttcgggattttgggaaacattcttagctgtgctatctgcctaaaattattccttattacttctctcctttgacagacttcaagttttcttcatagccctttcaaagttttttgagccatccagagtaaaatcatttctaaatgatagttctgtatatctccaactcgtcttaagtgtatttgcctgtgtgcaacgtattgctagactatgaactcctcagcatggctgctggataacttaattgtcctgagttaatagccttcaaaggacaaatcggtttctttgcagatagcttcgtaaaacttcacatggagtttattttatcatatttcccttttttatttctgctcctcctttaattgcccatcttgcttcagagactgacatttcagggtggatattaattaaagcattaattttgttttttggtatatttctatccctagtatttctatcttactgctaaaatacaggaaaagtgccgtatttttaatgcatttagtggttttctttggtgttatctgttccatttttctttttcatacattgaagtgtgtctccttttcaaccaaaataatgaaatagtggagaccatgaaattgttgtgcctggctaattggcaaattaatttaccaatataataagtgtagcgccttgtttgaataccctttttgagaaggtatgatgagaatgggcaagggtgtcagcatctcttcttcttaataattaattgttttcagttttggttcacgaagaatgcttagttaatctgtaatgttgcctagagctgtatttatctgtttttatttatactagtgtagtaaagctgcatatcattacagtaaaaacgactactgtgatgagttaatcagaaaatctattaaaatctatatgacaa

SEQ ID NO: 17770 - DNA, 3385 bp, Homo sapiens
  misc_feature (10)..(10): n is a, c, g, or t
  misc_feature (127)..(127): n is a, c, g, or t
ggtgcaagcntccgtgggagatgatgtcctcaggcccatgattaggggcatgatggatgaggaagggaacccagtttgtggcctatttcctgcctgtagaagagacgttgaagaaacgaaagcgggncccaggaaataggccacaaactggctcccttcctctttcctctcttcgcttcaataatgttcaactgaatctcacagatgaggagagagaagaaacggaagaggaagtttatttgttgaatagcacaactctttaacctgagggagtcatctacttttttttcctcctttacaaaaaaagaaaggaaatataaaagccgggtttttgcaacatggtttgcaaataatgctggtggaatggaggagttgtttggggagggaaaggagagagaaggaaaggagtgaggtatttcccgtctaacagaaagcagcgtatcaactcctattgttctgcactggatgcattcagctgaggatgtgcctgatagtgcaggcttgcgcctcaacagagatgacagcagagtcctcgagcacctggcctgttgctccaacattgcaaagacacattatcagtccctatttctagagggattactttgaattgagccatctataaaactgcaaggtcttgcccttttttttaatcaaaactgttctgtttaattcatgaattgtatagttaagcattacctttctacattccagaagagcctttatttctctctctctctctctctctctctctctctctctactgagctgtaacaaagcctctttaaatcggtgtatccttttgaagcagtcctttctcatattgagatgtactgtgattttactgaggtttcatcacaagaagggagtgtttcttgtgccattaaccatgtagtttgtaccatcactaaatgcttggaacagtacacatgcaccacaacaaaggctcatcaaacaggtaaagtctcgaaggaagcgagaacgaaatctctcattgtgtgccgtgtggctcaaaaccgaaaacaatgaagcttggttttaaaggataaagttttcttttttgttttcctctcagactttatggataatgtgaccgggtcttatgcaaattttctatttctaaaactactactatgatatacaagtgctgttgagcataattaaataaaatgctgctgctttgacagtaaagagaaggaagtattctgattagctgtatctggtattaattgcatgttaaaacactggaatttttaaaattgaaattagatcagtcattcttttcttttctcaagatgtctcatggctgacactgaagaagaaatgtaattcataacttgcactaaatgtatattttttttcttaaaaatttaccattcttatttatatttttatggattaaaatttataaaatacagatcagttaatattgcacttaagtaattttacctttttaatgtgatttttatagaataattcagacttacaaatacagagatatgaacaaagtttacagtgggaacaaaggtttaaaaaaaggttgtggttctctctctgtgatccagtgtgcacataaacctttctctgatctttcactgccatcctctggattatgtcttctgacctgtccattttgacccattaactggaaagttgaaaaactacattaactggaaagttgaaaaactacattactttggagaataaaaccgaaagttcgtgtataccttcttaaaaaaaaaatcaaaccaaaaatgtgaaaacaatagaattgcaaagatagcagttaaaattttaatctgaaaataacctttgaatctcgggctaggttacgtccatatttgaagtggtcagtgatggtttgaacattttttgcaggatgagttaaaatgcactggattatatttgggatttttgtttttggaattgtctgttttaatcacagccttaattcacaattggcaaaggcagtttactcaaaggactgggctaaatattctgtaattatgcatttttgataggaaaatgaaatttttgcaaacagacattttctttttttttggctggagtgcagtggggcatggtcttggctcactgcagcgttgaccacctgggctcaagtgatactcccgcctcagccacccaagtagctggcactacgggcacacgccaccatgcccagctaatttttttgtatttttagtagagatggggttttgccatgctgcccaggctggtctcaactcctcagctcaagcaatctgcctgcgtgagcctcccaaagtggtggaattacaggcgtgggccactgcgcctggcccagacagacattttctgaaacacaactggcaatgagctgtttttacattttgaaagtgattcttcacttcctagttcttaattatagtatacctattaagatctgtaagatcctgaagacataagatcatgaagccatataagaatgaggattgaaagttgagcaaaattttcgggattttgggaaacattcttagctgtgctatctgcctaaaattattccttattacttctctcctttgacagacttcaagttttcttcatagccctttcaaagttttttgagccatccagagtaaaatcatttctaaatgatagttctgtatatctccaactcgtcttaagtgtatttgcctgtgtgcaacgtattgctagactatgaactcctcagcatggctgctggataacttaattgtcctgagttaatagccttcaaaggacaaatcggtttctttgcagatagcttcgtaaaacttcacatggagtttattttatcatatttcccttttttatttctgctcctcctttaattgcccatcttgcttcagagactgacatttcagggtggatattaattaaagcattaattttgttttttggtatatttctatccctagtatttctatcttactgctaaaatacaggaaaagtgccgtatttttaatgcatttagtggttttctttggtgttatctgttccatttttctttttcatacattgaagtgtgtctccttttcaaccaaaataatgaaatagtggagaccatgaaattgttgtgcctggctaattggcaaattaatttaccaatataataagtgtagcgccttgtttgaataccctttttgagaaggtatgatgagaatgggcaagggtgtcagcatctcttcttcttaataattaattgttttcagttttggttcacgaagaatgcttagttaatctgtaatgttgcctagagctgtatttatctgtttttatttatactagtgtagtaaagctgcatatcattacagtaaaaacgactactgtgatgagttaatcagaaaatctattaaaatctatatgacaa

SEQ ID NO: 17771 - DNA, 4279 bp, Homo sapiens
ttctcttccccttccgtgggtcagggccggtccggtccggaacctgcagcccctttcccagtgttctagttcgcccgtgacccggaataatgagcaaggagggtgtggtgggttgaaagccatcctactttactcccgagttagagcatggattcagttttagtcttaagggggaagtgagattggagatttttatttttaattttgggcagaagcaggttgactctagggatctccagagcgagaggatttaacttcatgttgctcccgtgtttgaaggaggacaataaaagtcccaccgggcaaaattttcgtaacctctgcggtagaaaacgtcaggtatcttttaaatcgcgatagttttcgctgtgtcaggctttcttcggtggagctccgagggtagctaggttctaggtttgaaacagatgcagaatccaaaggcagcgcaaaaaacagccaccgattttgctatgtctctgagctgcgagataatcagacagctaaatggagtctgagcagctgttccatagaggctactatagaaacagctacaacagtataacaagtgcaagtagtgatgaggaacttttagatggagcaggtgttattatggactttcaaacatctgaagatgacaatttattagatggtgacactgcagttggaactcattatacaatgacaaatggaggcagcattaacagttctacacatttactggatcttttggatgaaccaattccaggtgttggtacatatgatgatttccatactattgattgggtgcgagaaaaatgtaaagacagagaaaggcatagacggatcaacagcaaaaagaaagaatcagcatgggaaatgacaaaaagtttgtatgatgcgtggtcaggatggctagtagtaacactaacaggattggcatcaggggcactggccggattaatagacattgctgccgattggatgactgacctaaaggagggcatttgccttagtgcgttgtggtacaaccacgaacagtgctgttggggatctaatgaaacaacatttgaagagagggataaatgtccacagtggaaaacatgggcagaattaatcataggtcaagcagagggtcctggttcttatatcatgaactacataatgtacatcttctgggccttgagttttgcctttcttgcagtttccctggtaaaggtatttgctccatatgcctgtggctctggaattccagagattaaaactattttaagtggattcatcatcagaggttacttgggaaaatggactttaatgattaaaaccatcacattagtcctggctgtggcatcaggtttgagtttaggaaaagaaggtcccctggtacatgttgcctgttgctgcggaaatatcttttcctacctctttccaaagtatagcacaaacgaagctaaaaaaagggaggtgctatcagctgcctcagctgcaggggtttctgtagcttttggtgcaccaattggaggagttctttttagcctggaagagcaaggtcttgcccttttttttaatcaaaactgttctgtttaattcatgaattgtatagttaagcattacctttctacattccagaagagcctttatttctctctctctctctctctctctctctctctctctactgagctgtaacaaagcctctttaaatcggtgtatccttttgaagcagtcctttctcatattgagatgtactgtgattttactgaggtttcatcacaagaagggagtgtttcttgtgccattaaccatgtagtttgtaccatcactaaatgcttggaacagtacacatgcaccacaacaaaggctcatcaaacaggtaaagtctcgaaggaagcgagaacgaaatctctcattgtgtgccgtgtggctcaaaaccgaaaacaatgaagcttggttttaaaggataaagttttcttttttgttttcctctcagactttatggataatgtgaccgggtcttatgcaaattttctatttctaaaactactactatgatatacaagtgctgttgagcataattaaataaaatgctgctgctttgacagtaaagagaaggaagtattctgattagctgtatctggtattaattgcatgttaaaacactggaatttttaaaattgaaattagatcagtcattcttttcttttctcaagatgtctcatggctgacactgaagaagaaatgtaattcataacttgcactaaatgtatattttttttcttaaaaatttaccattcttatttatatttttatggattaaaatttataaaatacagatcagttaatattgcacttaagtaattttacctttttaatgtgatttttatagaataattcagacttacaaatacagagatatgaacaaagtttacagtgggaacaaaggtttaaaaaaaggttgtggttctctctctgtgatccagtgtgcacataaacctttctctgatctttcactgccatcctctggattatgtcttctgacctgtccattttgacccattaactggaaagttgaaaaactacattaactggaaagttgaaaaactacattactttggagaataaaaccgaaagttcgtgtataccttcttaaaaaaaaaatcaaaccaaaaatgtgaaaacaatagaattgcaaagatagcagttaaaattttaatctgaaaataacctttgaatctcgggctaggttacgtccatatttgaagtggtcagtgatggtttgaacattttttgcaggatgagttaaaatgcactggattatatttgggatttttgtttttggaattgtctgttttaatcacagccttaattcacaattggcaaaggcagtttactcaaaggactgggctaaatattctgtaattatgcatttttgataggaaaatgaaatttttgcaaacagacattttctttttttttggctggagtgcagtggggcatggtcttggctcactgcagcgttgaccacctgggctcaagtgatactcccgcctcagccacccaagtagctggcactacgggcacacgccaccatgcccagctaatttttttgtatttttagtagagatggggttttgccatgctgcccaggctggtctcaactcctcagctcaagcaatctgcctgcgtgagcctcccaaagtggtggaattacaggcgtgggccactgcgcctggcccagacagacattttctgaaacacaactggcaatgagctgtttttacattttgaaagtgattcttcacttcctagttcttaattatagtatacctattaagatctgtaagatcctgaagacataagatcatgaagccatataagaatgaggattgaaagttgagcaaaattttcgggattttgggaaacattcttagctgtgctatctgcctaaaattattccttattacttctctcctttgacagacttcaagttttcttcatagccctttcaaagttttttgagccatccagagtaaaatcatttctaaatgatagttctgtatatctccaactcgtcttaagtgtatttgcctgtgtgcaacgtattgctagactatgaactcctcagcatggctgctggataacttaattgtcctgagttaatagccttcaaaggacaaatcggtttctttgcagatagcttcgtaaaacttcacatggagtttattttatcatatttcccttttttatttctgctcctcctttaattgcccatcttgcttcagagactgacatttcagggtggatattaattaaagcattaattttgttttttggtatatttctatccctagtatttctatcttactgctaaaatacaggaaaagtgccgtatttttaatgcatttagtggttttctttggtgttatctgttccatttttctttttcatacattgaagtgtgtctccttttcaaccaaaataatgaaatagtggagaccatgaaattgttgtgcctggctaattggcaaattaatttaccaatataataagtgtagcgccttgtttgaataccctttttgagaaggtatgatgagaatgggcaagggtgtcagcatctcttcttcttaataattaattgttttcagttttggttcacgaagaatgcttagttaatctgtaatgttgcctagagctgtatttatctgtttttatttatactagtgtagtaaagctgcatatcattacagtaaaaacgactactgtgatgagttaatcagaaaatctattaaaatctatatgacaa

SEQ ID NO: 17772 - DNA, 2562 bp, Homo sapiens
tctagaggatccactattgcatttagacatcacaagaagggagtgtttcttgtgccattaaccatgtagtttgtaccatcactaaatgcttggaacagtacacatgcaccacaacaaaggctcatcaaacaggtaaagtctcgaaggaagcgagaacgaaatctctcattgtgtgccgtgtggctcaaaaccgaaaacaatgaagcttggttttaaaggataaagttttcttttttgttttcctctcagactttatggataatgtgaccgggtcttatgcaaattttctatttctaaaactactactatgatatacaagtgctgttgagcataattaaataaaatgctgctgctttgacagtaaagagaaggaagtattctgattagctgtatctggtattaattgcatgttaaaacactggaatttttaaaattgaaattagatcagtcattcttttcttttctcaagatgtctcatggctgacactgaagaagaaatgtaattcataacttgcactaaatgtatattttttttcttaaaaatttaccattcttatttatatttttatggattaaaatttataaaatacagatcagttaatattgcacttaagtaattttacctttttaatgtgatttttatagaataattcagacttacaaatacagagatatgaacaaagtttacagtgggaacaaaggtttaaaaaaaggttgtggttctctctctgtgatccagtgtgcacataaacctttctctgatctttcactgccatcctctggattatgtcttctgacctgtccattttgacccattaactggaaagttgaaaaactacattaactggaaagttgaaaaactacattactttggagaataaaaccgaaagttcgtgtataccttcttaaaaaaaaaatcaaaccaaaaatgtgaaaacaatagaattgcaaagatagcagttaaaattttaatctgaaaataacctttgaatctcgggctaggttacgtccatatttgaagtggtcagtgatggtttgaacattttttgcaggatgagttaaaatgcactggattatatttgggatttttgtttttggaattgtctgttttaatcacagccttaattcacaattggcaaaggcagtttactcaaaggactgggctaaatattctgtaattatgcatttttgataggaaaatgaaatttttgcaaacagacattttctttttttttggctggagtgcagtggggcatggtcttggctcactgcagcgttgaccacctgggctcaagtgatactcccgcctcagccacccaagtagctggcactacgggcacacgccaccatgcccagctaatttttttgtatttttagtagagatggggttttgccatgctgcccaggctggtctcaactcctcagctcaagcaatctgcctgcgtgagcctcccaaagtggtggaattacaggcgtgggccactgcgcctggcccagacagacattttctgaaacacaactggcaatgagctgtttttacattttgaaagtgattcttcacttcctagttcttaattatagtatacctattaagatctgtaagatcctgaagacataagatcatgaagccatataagaatgaggattgaaagttgagcaaaattttcgggattttgggaaacattcttagctgtgctatctgcctaaaattattccttattacttctctcctttgacagacttcaagttttcttcatagccctttcaaagttttttgagccatccagagtaaaatcatttctaaatgatagttctgtatatctccaactcgtcttaagtgtatttgcctgtgtgcaacgtattgctagactatgaactcctcagcatggctgctggataacttaattgtcctgagttaatagccttcaaaggacaaatcggtttctttgcagatagcttcgtaaaacttcacatggagtttattttatcatatttcccttttttatttctgctcctcctttaattgcccatcttgcttcagagactgacatttcagggtggatattaattaaagcattaattttgttttttggtatatttctatccctagtatttctatcttactgctaaaatacaggaaaagtgccgtatttttaatgcatttagtggttttctttggtgttatctgttccatttttctttttcatacattgaagtgtgtctccttttcaaccaaaataatgaaatagtggagaccatgaaattgttgtgcctggctaattggcaaattaatttaccaatataataagtgtagcgccttgtttgaataccctttttgagaaggtatgatgagaatgggcaagggtgtcagcatctcttcttcttaataattaattgttttcagttttggttcacgaagaatgcttagttaatctgtaatgttgcctagagctgtatttatctgtttttatttatactagtgtagtaaagctgcatatcattacagtaaaaacgactactgtgatgagttaatcagaaaatctattaaaatctatatgacaa

SEQ ID NO: 17773 - DNA, 3356 bp, Homo sapiens
ttctcttccccttccgtgggtcagggccggtccggtccggaacctgcagcccctttcccagtgttctagttcgcccgtgacccggaataatgagcaaggagggtgtggtgggttgaaagccatcctactttactcccgagttagagcatggattcagttttagtcttaagggggaagtgagattggagatttttatttttaattttgggcagaagcaggttgactctagggatctccagagcgagaggatttaacttcatgttgctcccgtgtttgaaggaggacaataaaagtcccaccgggcaaaattttcgtaacctctgcggtagaaaacgtcaggtatcttttaaatcgcgatagttttcgctgtgtcaggctttcttcggtggagctccgagggtagctaggttctaggtttgaaacagatgcagaatccaaaggcagcgcaaaaaacagccaccgattttgctatgtctctgagctgcgagataatcagacagctaaatggagtctgagcagctgttccatagaggctactatagaaacagctacaacagtataacaagtgcaagtagtgatgaggaacttttagatggagcaggtgttattatggactttcaaacatctgaagatgacaatttattagatggtgacactgcagttggaactcattatacaatgacaaatggaggcagcattaacagttctacacatttactggatcttttggatgaaccaattccaggtgttggtacatatgatgatttccatactattgattgggtgcgagaaaaatgtaaagacagagaaaggcatagacggatcaacagcaaaaagaaagaatcagcatgggaaatgacaaaaagtttgtatgatgcgtggtcaggatggctagtagtaacactaacaggattggcatcaggggcactggccggattaatagacattgctgccgattggatgactgacctaaaggagggcatttgccttagtgcgttgtggtacaaccacgaacagtgctgttggggatctaatgaaacaacatttgaagagagggataaatgtccacagtggaaaacatgggcagaattaatcataggtcaagcagagggtcctggttcttatatcatgaactacataatgtacatcttctgggccttgagttttgcctttcttgcagtttccctggtaaaggtatttgctccatatgcctgtggctctggaattccagagattaaaactattttaagtggattcatcatcagaggttacttgggaaaatggactttaatgattaaaaccatcacattagtcctggctgtggcatcaggtttgagtttaggaaaagaaggtcccctggtacatgttgcctgttgctgcggaaatatcttttcctacctctttccaaagtatagcacaaacgaagctaaaaaaagggaggtgctatcagctgcctcagctgcaggggtttctgtagcttttggtgcaccaattggaggagttctttttagcctggaagaggttagctattattttcctctcaaaactttatggagatcattttttgctgctttagtggctgcatttgttttgaggtccatcaatccatttggtaacagccgtctggtccttttttatgtggagtatcatacaccatggtacctttttgaactgtttccttttattcttctaggggtatttggagggctttggggagcctttttcattagggcaaatattgcctggtgtcgtcgacgcaagtccacgaaatttggaaagtatcccgttctggaagtcattattgttgcagccattactgctgtgatagccttccctaatccatacactaggctaaacaccagtgaactgatcaaagagctttttacagactgtggtcccctggaatcctcttctctttgtgactacagaaatgacatgaatgccagtaaaattgtcgatgacattcctgatcgtccagcaggcattggagtatattcagctatatggcagttatgcctggcactcatatttaaaatcataatgacagtattcacttttggcatcaaggttccatcaggcttgttcatccccagcatggccattggagcgatcgcaggaaggattgtggggattgcggtggagcagcttgcctactatcaccacgactggtttatctttaaggagtggtgtgaggtcggggctgattgcattacacctggcctttatgccatggttggtgctgctgcatgcttaggtggtgtgacaagaatgactgtctccctggtggttattgtttttgagcttactggaggcttggaatatattgttccccttatggctgcagtcatgaccagtaaatgggttggagatgcctttggcagggaaggcatttatgaagcacacatccgattaaatggataccctttcttggatgcaaaagaagaattcactcataccaccctggctgctgacgttatgagacctcgaaggaatgatcctcccttagctgtcctgacacaggacaatatgacagtggatgatatagaaaacatgattaatgaaaccagctacaatggatttcctgtcataatgtcaaaagaatctcagagattagtgggatttgccctcagaagagacctgacaattgcaatagaaagtgccaggaaaaaacaagaaggtatcgttggcagttctcgggtgtgttttgcacagcacaccccatctcttccagcagaaagtcctcggccattgaagcttcgaagcattcttgacatgagcccttttacagtgacagaccacaccccaatggagatcgtggtggatattttccgaaagctgggactgaggcagtgccttgtaactcacaatgggcgcctccttggcattataacaaaaaaagatatcctccggcatatggcccagacggcaaaccaagaccccgcttcaataatgttcaactgaatctcacagatgaggagagagaagaaacggaagaggaagtttatttgttgaatagcacaactctttaacctgagggagtcatctacttttttttcctcctttacaaaaaaagaaaggaaatataaaagccgggtttttgcaacatggtttgcaaataatgctggtggaatggaggagttgtttggggagggaaaggagagagaaggaaaggagtgaggtatttcccgtctaacagaaagcagcgtatcaactcctattgttctgcactggatgcattcagctgaggatgtgcctgatagtgcaggcttgcgcctcaacagagatgacagcagagtcctcgagcacctggcctgttgctccaacattgcaacacggtctctcaggggatcctctag

SEQ ID NO: 17774 - DNA, 1504 bp, Homo sapiens
aagcatggtatcatcgcagagtgcccattacggccgggggaattgtctgttttaatcacagccttaattcacaattggcaaaggcagtttactcaaaggactgggctaaatattctgtaattatgcatttttgataggaaaatgaaatttttgcaaacagacattttctttttttttggctggagtgcagtggggcatggtcttggctcactgcagcgttgaccacctgggctcaagtgatactcccgcctcagccacccaagtagctggcactacgggcacacgccaccatgcccagctaatttttttgtatttttagtagagatggggttttgccatgctgcccaggctggtctcaactcctcagctcaagcaatctgcctgcgtgagcctcccaaagtggtggaattacaggcgtgggccactgcgcctggcccagacagacattttctgaaacacaactggcaatgagctgtttttacattttgaaagtgattcttcacttcctagttcttaattatagtatacctattaagatctgtaagatcctgaagacataagatcatgaagccatataagaatgaggattgaaagttgagcaaaattttcgggattttgggaaacattcttagctgtgctatctgcctaaaattattccttattacttctctcctttgacagacttcaagttttcttcatagccctttcaaagttttttgagccatccagagtaaaatcatttctaaatgatagttctgtatatctccaactcgtcttaagtgtatttgcctgtgtgcaacgtattgctagactatgaactcctcagcatggctgctggataacttaattgtcctgagttaatagccttcaaaggacaaatcggtttctttgcagatagcttcgtaaaacttcacatggagtttattttatcatatttcccttttttatttctgctcctcctttaattgcccatcttgcttcagagactgacatttcagggtggatattaattaaagcattaattttgttttttggtatatttctatccctagtatttctatcttactgctaaaatacaggaaaagtgccgtatttttaatgcatttagtggttttctttggtgttatctgttccatttttctttttcatacattgaagtgtgtctccttttcaaccaaaataatgaaatagtggagaccatgaaattgttgtgcctggctaattggcaaattaatttaccaatataataagtgtagcgccttgtttgaataccctttttgagaaggtatgatgagaatgggcaagggtgtcagcatctcttcttcttaataattaattgttttcagttttggttcacgaagaatgcttagttaatctgtaatgttgcctagagctgtatttatctgtttttatttatactagtgtagtaaagctgcatatcattacagtaaaaacgactactgtgatgagttaatcagaaaatctattaaaatctatatgacaa

SEQ ID NO: 17775 - DNA, 1554 bp, Homo sapiens
  misc_feature (10)..(10): n is a, c, g, or t
gcatccctcngacagcggacccctggtttgaacattttttgcaggatgagttaaaatgcactggattatatttgggatttttgtttttggaattgtctgttttaatcacagccttaattcacaattggcaaaggcagtttactcaaaggactgggctaaatattctgtaattatgcatttttgataggaaaatgaaatttttgcaaacagacattttctttttttttggctggagtgcagtggggcatggtcttggctcactgcagcgttgaccacctgggctcaagtgatactcccgcctcagccacccaagtagctggcactacgggcacacgccaccatgcccagctaatttttttgtatttttagtagagatggggttttgccatgctgcccaggctggtctcaactcctcagctcaagcaatctgcctgcgtgagcctcccaaagtggtggaattacaggcgtgggccactgcgcctggcccagacagacattttctgaaacacaactggcaatgagctgtttttacattttgaaagtgattcttcacttcctagttcttaattatagtatacctattaagatctgtaagatcctgaagacataagatcatgaagccatataagaatgaggattgaaagttgagcaaaattttcgggattttgggaaacattcttagctgtgctatctgcctaaaattattccttattacttctctcctttgacagacttcaagttttcttcatagccctttcaaagttttttgagccatccagagtaaaatcatttctaaatgatagttctgtatatctccaactcgtcttaagtgtatttgcctgtgtgcaacgtattgctagactatgaactcctcagcatggctgctggataacttaattgtcctgagttaatagccttcaaaggacaaatcggtttctttgcagatagcttcgtaaaacttcacatggagtttattttatcatatttcccttttttatttctgctcctcctttaattgcccatcttgcttcagagactgacatttcagggtggatattaattaaagcattaattttgttttttggtatatttctatccctagtatttctatcttactgctaaaatacaggaaaagtgccgtatttttaatgcatttagtggttttctttggtgttatctgttccatttttctttttcatacattgaagtgtgtctccttttcaaccaaaataatgaaatagtggagaccatgaaattgttgtgcctggctaattggcaaattaatttaccaatataataagtgtagcgccttgtttgaataccctttttgagaaggtatgatgagaatgggcaagggtgtcagcatctcttcttcttaataattaattgttttcagttttggttcacgaagaatgcttagttaatctgtaatgttgcctagagctgtatttatctgtttttatttatactagtgtagtaaagctgcatatcattacagtaaaaacgactactgtgatgagttaatcagaaaatctattaaaatctatatgacaa

SEQ ID NO: 17776 - DNA, 2967 bp, Homo sapiens
ttctcttccccttccgtgggtcagggccggtccggtccggaacctgcagcccctttcccagtgttctagttcgcccgtgacccggaataatgagcaaggagggtgtggtgggttgaaagccatcctactttactcccgagttagagcatggattcagttttagtcttaagggggaagtgagattggagatttttatttttaattttgggcagaagcaggttgactctagggatctccagagcgagaggatttaacttcatgttgctcccgtgtttgaaggaggacaataaaagtcccaccgggcaaaattttcgtaacctctgcggtagaaaacgtcaggtatcttttaaatcgcgatagttttcgctgtgtcaggctttcttcggtggagctccgagggtagctaggttctaggtttgaaacagatgcagaatccaaaggcagcgcaaaaaacagccaccgattttgctatgtctctgagctgcgagataatcagacagctaaatggagtctgagcagctgttccatagaggctactatagaaacagctacaacagtataacaagtgcaagtagtgatgaggaacttttagatggagcaggtgttattatggactttcaaacatctgaagatgacaatttattagatggtgacactgcagttggaactcattatacaatgacaaatggaggcagcattaacagttctacacatttactggatcttttggatgaaccaattccaggtgttggtacatatgatgatttccatactattgattgggtgcgagaaaaatgtaaagacagagaaaggcatagacggatcaacagcaaaaagaaagaatcagcatgggaaatgacaaaaagtttgtatgatgcgtggtcaggatggctagtagtaacactaacaggattggcatcaggggcactggccggattaatagacattgctgccgattggatgactgacctaaaggagggcatttgccttagtgcgttgtggtacaaccacgaacagtgctgttggggatctaatgaaacaacatttgaagagagggataaatgtccacagtggaaaacatgggcagaattaatcataggtcaagcagagggtcctggttcttatatcatgaactacataatgtacatcttctgggccttgagttttgcctttcttgcagtttccctggtaaaggtatttgctccatatgcctgtggctctggaattccagagattaaaactattttaagtggattcatcatcagaggttacttgggaaaatggactttaatgattaaaaccatcacattagtcctggctgtggcatcaggtttgagtttaggaaaagaaggtcccctggtacatgttgcctgttgctgcggaaatatcttttcctacctctttccaaagtatagcacaaacgaagctaaaaaaagggaggtgctatcagctgcctcagctgcaggggtttctgtagcttttggtgcaccaattggaggagttctttttagcctggaagaggttagctattattttcctctcaaaactttatggagatcattttttgctgctttagtggctgcatttgttttgaggtccatcaatccatttggtaacagccgtctggtccttttttatgtggagtatcatacaccatggtacctttttgaactgtttccttttattcttctaggggtatttggagggctttggggagcctttttcattagggcaaatattgcctggtgtcgtcgacgcaagtccacgaaatttggaaagtatcccgttctggaagtcattattgttgcagccattactgctgtgatagccttccctaatccatacactaggctaaacaccagtgaactgatcaaagagctttttacagactgtggtcccctggaatcctcttctctttgtgactacagaaatgacatgaatgccagtaaaattgtcgatgacattcctgatcgtccagcaggcattggagtatattcagctatatggcagttatgcctggcactcatatttaaaatcataatgacagtattcacttttggcatcaaggttccatcaggcttgttcatccccagcatggccattggagcgatcgcaggaaggattgtggggattgcggtggagcagcttgcctactatcaccacgactggtttatctttaaggagtggtgtgaggtcggggctgattgcattacacctggcctttatgccatggttggtgctgctgcatgcttaggtggtgtgacaagaatgactgtctccctggtggttattgtttttgagcttactggaggcttggaatatattgttccccttatggctgcagtcatgaccagtaaatgggttggagatgcctttggcagggaaggcatttatgaagcacacatccgattaaatggataccctttcttggatgcaaaagaagaattcactcataccaccctggctgctgacgttatgagacctcgaaggaatgatcctcccttagctgtcctgacacaggacaatatgacagtggatgatatagaaaacatgattaatgaaaccagctacaatggatttcctgtcataatgtcaaaagaatctcagagattagtgggatttgccctcagaagagacctgacaattgcaatagaaagtgccaggaaaaaacaagaaggtatcgttggcagttctcgggtgtgttttgcacagcacaccccatctcttccagcagaaagtcctcggccattgaagcttcgaagcattcttgacatgagcccttttacagtgacagaccacaccccaatggagatcgtggtggatattttccgaaagctgggactgaggcagtgccttgtaactcacaatgggattgtcttggggatcatcacaaagaagaacatattagagcatctcgagcaactaaagcagcacgtcgaacaccaggacagctgcaccacccaggac

SEQ ID NO: 17777 - DNA, 3368 bp, Homo sapiens
ttctcttccccttccgtgggtcagggccggtccggtccggaacctgcagcccctttcccagtgttctagttcgcccgtgacccggaataatgagcaaggagggtgtggtgggttgaaagccatcctactttactcccgagttagagcatggattcagttttagtcttaagggggaagtgagattggagatttttatttttaattttgggcagaagcaggttgactctagggatctccagagcgagaggatttaacttcatgttgctcccgtgtttgaaggaggacaataaaagtcccaccgggcaaaattttcgtaacctctgcggtagaaaacgtcaggtatcttttaaatcgcgatagttttcgctgtgtcaggctttcttcggtggagctccgagggtagctaggttctaggtttgaaacagatgcagaatccaaaggcagcgcaaaaaacagccaccgattttgctatgtctctgagctgcgagataatcagacagctaaatggagtctgagcagctgttccatagaggctactatagaaacagctacaacagtataacaagtgcaagtagtgatgaggaacttttagatggagcaggtgttattatggactttcaaacatctgaagatgacaatttattagatggtgacactgcagttggaactcattatacaatgacaaatggaggcagcattaacagttctacacatttactggatcttttggatgaaccaattccaggtgttggtacatatgatgatttccatactattgattgggtgcgagaaaaatgtaaagacagagaaaggcatagacggatcaacagcaaaaagaaagaatcagcatgggaaatgacaaaaagtttgtatgatgcgtggtcaggatggctagtagtaacactaacaggattggcatcaggggcactggccggattaatagacattgctgccgattggatgactgacctaaaggagggcatttgccttagtgcgttgtggtacaaccacgaacagtgctgttggggatctaatgaaacaacatttgaagagagggataaatgtccacagtggaaaacatgggcagaattaatcataggtcaagcagagggtcctggttcttatatcatgaactacataatgtacatcttctgggccttgagttttgcctttcttgcagtttccctggtaaaggtatttgctccatatgcctgtggctctggaattccagagattaaaactattttaagtggattcatcatcagaggttacttgggaaaatggactttaatgattaaaaccatcacattagtcctggctgtggcatcaggtttgagtttaggaaaagaaggtcccctggtacatgttgcctgttgctgcggaaatatcttttcctacctctttccaaagtatagcacaaacgaagctaaaaaaagggaggtgctatcagctgcctcagctgcaggggtttctgtagcttttggtgcaccaattggaggagttctttttagcctggaagaggttagctattattttcctctcaaaactttatggagatcattttttgctgctttagtggctgcatttgttttgaggtccatcaatccatttggtaacagccgtctggtccttttttatgtggagtatcatacaccatggtacctttttgaactgtttccttttattcttctaggggtatttggagggctttggggagcctttttcattagggcaaatattgcctggtgtcgtcgacgcaagtccacgaaatttggaaagtatcccgttctggaagtcattattgttgcagccattactgctgtgatagccttccctaatccatacactaggctaaacaccagtgaactgatcaaagagctttttacagactgtggtcccctggaatcctcttctctttgtgactacagaaatgacatgaatgccagtaaaattgtcgatgacattcctgatcgtccagcaggcattggagtatattcagctatatggcagttatgcctggcactcatatttaaaatcataatgacagtattcacttttggcatcaaggttccatcaggcttgttcatccccagcatggccattggagcgatcgcaggaaggattgtggggattgcggtggagcagcttgcctactatcaccacgactggtttatctttaaggagtggtgtgaggtcggggctgattgcattacacctggcctttatgccatggttggtgctgctgcatgcttaggtggtgtgacaagaatgactgtctccctggtggttattgtttttgagcttactggaggcttggaatatattgttccccttatggctgcagtcatgaccagtaaatgggttggagatgcctttggcagggaaggcatttatgaagcacacatccgattaaatggataccctttcttggatgcaaaagaagaattcactcataccaccctggctgctgacgttatgagacctcgaaggaatgatcctcccttagctgtcctgacacaggacaatatgacagtggatgatatagaaaacatgattaatgaaaccagctacaatggatttcctgtcataatgtcaaaagaatctcagagattagtgggatttgccctcagaagagacctgacaattgcaataggtaccctttcaaaaatatatatatgtatatatgagatggatttctggaagaaaggaaagcaataagcagtaacatttaatgggttggatttgtgggggcaagggacattattttatgtcccttaaaatcttctgttctttaggaaaggaaggtatgcttcagtggatgattttctgctatttagcagaaaatctgtatttcagttttgtcttttgatctggcattgtaccagaaattggagtcagattattttcccactcagataagcctagataagttgatcttggttattcaaaacagcatgtaatataagaccttagctaaatgcattcagtcaaatacattcttgtatttaataaagttggcttattggaatacaagttattgaaaatctcatcttcatcagtctctttcatattagaataacactgttttgctttatcagtctttggggttagaattataatattaatttataatatctgatttaaagtgacaatcactgagatttttatttctgatcaaatgccaggttgaaaaagtataacgtatcagtcctgttgtgttttatgcagactttcctgaaaatactgtttaaaggtattagccatagtgtatttcttggagataaattaaactttctatagttctgtttctctaaaatttgtttttctctttaccttatagtcccgcagtattgatgaggagaccatta

SEQ ID NO: 17778 - DNA, 2704 bp, Homo sapiens
ttctcttccccttccgtgggtcagggccggtccggtccggaacctgcagcccctttcccagtgttctagttcgcccgtgacccggaataatgagcaaggagggtgtggtgggttgaaagccatcctactttactcccgagttagagcatggattcagttttagtcttaagggggaagtgagattggagatttttatttttaattttgggcagaagcaggttgactctagggatctccagagcgagaggatttaacttcatgttgctcccgtgtttgaaggaggacaataaaagtcccaccgggcaaaattttcgtaacctctgcggtagaaaacgtcaggtatcttttaaatcgcgatagttttcgctgtgtcaggctttcttcggtggagctccgagggtagctaggttctaggtttgaaacagatgcagaatccaaaggcagcgcaaaaaacagccaccgattttgctatgtctctgagctgcgagataatcagacagctaaatggagtctgagcagctgttccatagaggctactatagaaacagctacaacagtataacaagtgcaagtagtgatgaggaacttttagatggagcaggtgttattatggactttcaaacatctgaagatgacaatttattagatggtgacactgcagttggaactcattatacaatgacaaatggaggcagcattaacagttctacacatttactggatcttttggatgaaccaattccaggtgttggtacatatgatgatttccatactattgattgggtgcgagaaaaatgtaaagacagagaaaggcatagacggatcaacagcaaaaagaaagaatcagcatgggaaatgacaaaaagtttgtatgatgcgtggtcaggatggctagtagtaacactaacaggattggcatcaggggcactggccggattaatagacattgctgccgattggatgactgacctaaaggagggcatttgccttagtgcgttgtggtacaaccacgaacagtgctgttggggatctaatgaaacaacatttgaagagagggataaatgtccacagtggaaaacatgggcagaattaatcataggtcaagcagagggtcctggttcttatatcatgaactacataatgtacatcttctgggccttgagttttgcctttcttgcagtttccctggtaaaggtatttgctccatatgcctgtggctctggaattccagagattaaaactattttaagtggattcatcatcagaggttacttgggaaaatggactttaatgattaaaaccatcacattagtcctggctgtggcatcaggtttgagtttaggaaaagaaggtcccctggtacatgttgcctgttgctgcggaaatatcttttcctacctctttccaaagtatagcacaaacgaagctaaaaaaagggaggtgctatcagctgcctcagctgcaggggtttctgtagcttttggtgcaccaattggaggagttctttttagcctggaagaggttagctattattttcctctcaaaactttatggagatcattttttgctgctttagtggctgcatttgttttgaggtccatcaatccatttggtaacagccgtctggtccttttttatgtggagtatcatacaccatggtacctttttgaactgtttccttttattcttctaggggtatttggagggctttggggagcctttttcattagggcaaatattgcctggtgtcgtcgacgcaagtccacgaaatttggaaagtatcccgttctggaagtcattattgttgcagccattactgctgtgatagccttccctaatccatacactaggctaaacaccagtgaactgatcaaagagctttttacagactgtggtcccctggaatcctcttctctttgtgactacagaaatgacatgaatgccagtaaaattgtcgatgacattcctgatcgtccagcaggcattggagtatattcagctatatggcagttatgcctggcactcatatttaaaatcataatgacagtattcacttttggcatcaaggttccatcaggcttgttcatccccagcatggccattggagcgatcgcaggaaggattgtggggattgcggtggagcagcttgcctactatcaccacgactggtttatctttaaggagtggtgtgaggtcggggctgattgcattacacctggcctttatgccatggttggtgctgctgcatgcttaggtggtgtgacaagaatgactgtctccctggtggttattgtttttgagcttactggaggcttggaatatattgttccccttatggctgcagtcatgaccagtaaatgggttggagatgcctttggcagggaaggcatttatgaagcacacatccgattaaatggataccctttcttggatgcaaaagaagaattcactcataccaccctggctgctgacgttatgagacctcgaaggaatgatcctcccttagctgtcctgacacaggacaatatgacagtggatgatatagaaaacatgattaatgaaaccagctacaatggatttcctgtcataatgtcaaaagaatctcagagattagtgggtgaattcctgttggtggtcagcaacctcctaattcgggtgttggtgctaggcttgagtggtagaaagctcaaaagaatccagtgaa

SEQ ID NO: 17779 - DNA, 1063 bp, Homo sapiens
ttctcttccccttccgtgggtcagggccggtccggtccggaacctgcagcccctttcccagtgttctagttcgcccgtgacccggaataatgagcaaggagggtgtggtgggttgaaagccatcctactttactcccgagttagagcatggattcagttttagtcttaagggggaagtgagattggagatttttatttttaattttgggcagaagcaggttgactctagggatctccagagcgagaggatttaacttcatgttgctcccgtgtttgaaggaggacaataaaagtcccaccgggcaaaattttcgtaacctctgcggtagaaaacgtcaggtatcttttaaatcgcgatagttttcgctgtgtcaggctttcttcggtggagctccgagggtagctaggttctaggtttgaaacagatgcagaatccaaaggcagcgcaaaaaacagccaccgattttgctatgtctctgagctgcgagataatcagacagctaaatggagtctgagcagctgttccatagaggctactatagaaacagctacaacagtataacaagtgcaagtagtgatgaggaacttttagatggagcaggtgttattatggactttcaaacatctgaagatgacaatttattagatggtgacactgcagttggaactcattatacaatgacaaatggaggcagcattaacagttctacacatttactggatcttttggatgaaccaattccaggtgttggtacatatgatgatttccatactattgattgggtgcgagaaaaatgtaaagacagagaaaggcatagacggatcaacagcaaaaagaaagaatcagcatgggaaatgacaaaaagtttgtatgatgcgtggtcaggatggctagtagtaacactaacaggattggcatcaggggcactggccggatttgcgtaaaacaggataggaatagcaaaatcaggtgtgtacggtgacctgcaaatgaaacaccatctacctggagcagctgtgcaagcacaggctgttacatcatatatgtaatagtttatgctgt

SEQ ID NO: 17780 - DNA, 1177 bp, Homo sapiens
ttctcttccccttccgtgggtcagggccggtccggtccggaacctgcagcccctttcccagtgttctagttcgcccgtgacccggaataatgagcaaggagggtgtggtgggttgaaagccatcctactttactcccgagttagagcatggattcagttttagtcttaagggggaagtgagattggagatttttatttttaattttgggcagaagcaggttgactctagggatctccagagcgagaggatttaacttcatgttgctcccgtgtttgaaggaggacaataaaagtcccaccgggcaaaattttcgtaacctctgcggtagaaaacgtcaggtatcttttaaatcgcgatagttttcgctgtgtcaggctttcttcggtggagctccgagggtagctaggttctaggtttgaaacagatgcagaatccaaaggcagcgcaaaaaacagccaccgattttgctatgtctctgagctgcgagataatcagacagctaaatggagtctgagcagctgttccatagaggctactatagaaacagctacaacagtataacaagtgcaagtagtgatgaggaacttttagatggagcaggtgttattatggactttcaaacatctgaagatgacaatttattagatggtgacactgcagttggaactcattatacaatgacaaatggaggcagcattaacagttctacacatttactggatcttttggatgaaccaattccaggtgttggtacatatgatgatttccatactattgattgggtgcgagaaaaatgtaaagacagagaaaggcatagacggtttacttataccctgtaactttccagaaaggatttcaggtagctaaaaaacaaagaaatacaataagaagacaaaataagaaggaaagggaaaaatacagcacaggagttggggggaagaacaagccaagttccagatatggaggtcagcatgattttgggctttgagcagcccaccagctaaggcaaaaaaggaaactcattgcatagctcttacctatggaaaaagaagaaatctactgggggcagatggtcttgtgggattttgctgttttcttttatctcctttcccagcatttgattctgagatatttctcaatttggctcccaaataaagcttattgagtgttgtaatg

SEQ ID NO: 17781 - DNA, 365 bp, Homo sapiens
tgacattagggcacccttgagctaccttgagctaaaggaaataacccttgaatttttttctgtttggcctaaagaatgtggtttgttttgtaactgaattcatgggattgttaaggtacaaaattttgctttagttttatttgtactaggattttgctatattaatacaatgtgaaaagaatcaaaagtgttagaaataaatgcatagaatgtaagtttcaggcatgtgagtagaggatctctgctccataaagagttctgttgttgttataggttccatcaggcttgttcatccccagcatggccattggagcgatcgcaggaaggattgtggggattgcggtggagcagcttgcctactatca

SEQ ID NO: 17782 - DNA, 325 bp, Homo sapiens
gcaaggagggaaaaggataatttgctttacagccatgggtagatgacagtgtcatcaaaccagatagatttgtttggggccacatacatatgaattcatatttaattatgtattcaaatgtttgttgattaaccttaaaatacttccaccaaacaaagagaaactatgaccaaagtggcattttatttcatatttctttcttgaaaatgaaagaaccatgtactatgctgttttccaaggtaccatctgaaaaatagagtaaaataggatgaggacaatatgtttagtttctgattctctgatttgaaagaaacaatctgccaac

SEQ ID NO: 17783 - DNA, 272 bp, Homo sapiens
ctccagcgagtaaacgcagaaggagtgatgggatccgaagatcaccgttttgcaaaccttcaggaaacgccagagggggaggtctggacaccgtgttgagacagctgtgggatgcatctgcacactgaggagccatgatggctgtgggacgcccagaagctgggggaggcctggagcagcctctcccttacagcctcagggggaatcagcctgctgtgagataataaatgtctgttgtttaagcccccagtgtgtggtggcttattgtgaca

SEQ ID NO: 17784 - DNA, 240 bp, Homo sapiens
ctccagcgagtaaacgcagaaggagtgatgggatccgaagatcaccgttttgcaaaccttcaggaaacgccagagggggaggtctggacaccgtgttgagacagctgtgggatgcatctgcacactgaggagccatgatggctgtgggacgcccagaagctgggggaggcctggagcagcctctcccttacagcctcagggggaatcagcctgctgtgagataataaatgtctgttgttt

SEQ ID NO: 17785 - DNA, 351 bp, Homo sapiens
cgaggctgggcccatcccattttggaacgagtagccaggctgtccctgccaccccggaccccgaagtgtggccgggtggggcccctgaccctctcctgggctccaggtgctgtctcctgtctccatcttgggtgcacatgccaggccccctgggtgccgtgtgctccccaccccttcacgcgtgggcactgtctcatccctgccccagcccccaccctcagaccatcaggtgaagcccctgcacccacctgtctgtctgaacaagagcgtggcccttcccgccctgcctgcagtggctgtggcttcctggggacaggaggcagctgggtggggatctggaggatgctcctc

SEQ ID NO: 17786 - DNA, 283 bp, Homo sapiens
tctgctgcgtgacctcagccctcccgcctgccgatgggagctgggtcatctcttacgcctttcagctttggcttcttccgcagtgtatgtgaaggggtcacacagagcatccagcggtcaccatggtgaacaagaagccaggaaggaaggaagcaatgtcggcaaaagggctcagatgacaaccaaacagaacggtttcccaccctgggcctcctttccacacacacagcatcgtgggtattttaaaataaacaagatcaacgtccaaacctgcactgaggcc

SEQ ID NO: 17787 - DNA, 419 bp, Homo sapiens
catgaaatacagcacttctggccaagaagtctaaatcacagccgatctacacgaggcggatggtccacaacgccaagttcctacccgggcactgagctcaacgctcgcacaactccaaacgagggcgcaaccatattcccactgacatcctccttggggcagcaagacaagctccgaacagcctgtcctgggccaacaagagaagctggcgggcgcccgctgagcactgtgagccatcttgtgcatccagcggtcaccatggtgaacaagaagccaggaaggaaggaagcaatgtcggcaaaagggctcagatgacaaccaaacagaacggtttcccaccctgggcctcctttccacacacacagcatcgtgggtattttaaaataaacaagatcaacgtccaaacctgcactgaggcc

SEQ ID NO: 17788 - DNA, 480 bp, Homo sapiens
aggaagtgaggcaagaagcctcaagattaacttggcatcttgcaagtctttttgaaaaaatccccaacggggttgtcaaaaagccttcctgtgttttcctcagatgcttgtacttgcctcaagcctgcttccttgctggatgtgcaacttgaaccagtccttagatactcaaccttggcagtatttaaagcaaatcatttcttgcttagcacttttccctgggtaggagggaggactcttatgagcgggtgttggcatggttaatgtaaagctatgttcttccaggtaatattttgaggagaaaagcagaatgatgtcattcctgcaggcatgtcccccatcgccaacacacacacacacacacacccctacattgaggtcctgttgaataactgacagactaaatgttcaattctctatttcacttttctattgagatatataaggcttcaaaataaagtgatacttttcagagaaagg

SEQ ID NO: 17789 - DNA, 764 bp, Homo sapiens
  misc_feature (696)..(696): n is a, c, g, or t
  misc_feature (698)..(698): n is a, c, g, or t
  misc_feature (700)..(700): n is a, c, g, or t
  misc_feature (709)..(709): n is a, c, g, or t
  misc_feature (719)..(720): n is a, c, g, or t
  misc_feature (728)..(728): n is a, c, g, or t
taaaccttccctttttcattaatgtttcagtgagtgatcttaactcaagcacttctaattaaaatgtaaagatcattagcatgccccgttaatagaggtttttctttcaactcagaatgctccggatggaggtgccaggcacactcctacacccaccggtgctgaacaattgctgctcttggcaaggtttcagaacagctgggggtttctgtctgttacctgagctgctggtgacaactgcaacttatgtcaggctcaggggcaaggaaacaggaggcagggctggaggagccaggaggagaaaaaaaaactgcaaaggcagcttttcccttcttactgctatcagtctctcagggttggcattgctgaatgagaaagagggagatatatgctaatgctaataagaaaggcattaaataatattttaaaattatttactcaaaaagaaaaataaattgagatgtatactcatatggtacagaccgtcggaattctaccacaggggagcaaaacaaaagaggtaagtcaattttgccttattcagtatgtactcagtagtagccaaggaactggagttaaggagttcaagacctagcttaatcccatcacagaatgactagcagtaagaaagctgtggtagttacgaaagctaatcagttgtgcaaaggagtctgctagcatcagtgttaatccagncngnacaggggangagctggcanncaagcatngagtctactgtgctccaagctgcagatacatatgag

SEQ ID NO: 17790 - DNA, 433 bp, Homo sapiens
gaaaactctgtccccaacatcctccaacattctcttatttctgtcactgtcccagccatgggacagtggaaaggggcaatcttaagaaacagcagagagataagaaaagagagaaatgaacagaataacacctttcattgccttttgtgacatattcccaagctgacctttctgaagctgaaagaaaactattctgtctgaaacaaaaggaaatgaatagtcagttcaaatagcatagttcttaggaggagctccagctgtagatccagacaggcatggctctgattcccagttctgccattcactggctgggggaccctgttactaacctctgtaaacctcagttttctcatccaaaaagtggagataataatgtctccttcctcgcagagctattgtaaacattcaatgagctggctatgaagatggcctc

SEQ ID NO: 17791 - DNA, 209 bp, Homo sapiens
attagtgactatagctgctgttgacttcttttaaaatatttttaagttttatttttaatagatagaatttacatagttcaaaatacacaaaagggccagacacggtggctcatgcctagaatcccagtactttgggaggctgaggcaggagggtcgtttgagcccaggagttggagaccaacttgggcaacatggtaaaattccgtctc

SEQ ID NO: 17792 - DNA, 1249 bp, Homo sapiens
ctgtctgtatgctcccctagaggtttgagcagcgggacactgaagaattgagccacacccccatcacacacctgcaagtgggacaagggaacctttcccatttcactgctgtgacagtgcaaagctattaaaatctgaattgcttagcaggcatgtaaggtcctctctgctctggtctcatttaatctttcaggttctatcttcaccttcatttctgcaggagaaacacatctctgtaccaaaagttcttcggtttggtcaccctttcccctgaaaaaaacgtattaagctctgtaagcataacttagataccattacactgtgaaaccttctcagttttccatagaatacatttctgtgttctgtctgttcctttgaaaacatttttttagtttgtattgtactatatgtggtgcagtgtgcaatgaactatatgtccctggcatatagttatccctgaattatgtggtgaatctataatattaagctaatatgttatgcttgatttctggggaccaagtagatgatcatttggaaaaatataccaccattgtgcatggcagaggaacttcatttggtaaagaattgtgtcacatggttataggttgtaagatactatctttttcctttccgtcttatctttcttattatttattttttgagacagagtcttgctctgtcacccaggttggcatgtagtggtgccatcacggcttactgcagcctcaaactcctgggctcaggcatttctcccacctcagccttccaagtagctggggctacaggcatgcaccaccacactcagctaatttttaaattttttgtagagacagggtttccctgtgttgcctaggctggtcttgaacttgtgacctcaagcaatcctcccaccttggcctcccaatagttttcatttttattgaaattatacactaacatagtttaaaggctttaatatttctttgtttgttaaaaaaaaaaaaaaaaactattcccagcattttgctctctagtggcaactacttgtacctccttgagccgagtactttgttgtttatatcctgtttttaggtatatactcatattactttatatttcagtttttaccaataactcttgattcatgacaatggatgatgacaacttagttctttcctacctagtcacactcttcctttatcctgttttgcttagatcaatgttgataaaatattcactgtttatattatgtgagcattattcacatgtg

SEQ ID NO: 17793 - DNA, 531 bp, Homo sapiens
gcacgagcagatctcatgagacttattcactatcacgagaacagcattgcaaagacttgcccccatgattcaattacctgggtccctcccacaacacgtgggaattcaagatgagatttgggtggggacacagccaaaccatatcagtaggtaatgaaataaagggtagttcttagctgatgtcaaagtaacaattgaatgttgtgcttttttatacttttttttctttgaggcagtggctggtcttttaaaatgccttcattaaagtttctagtacattataccaaatagaaattaaaagacatgcaagttgctgctggctggcatctataatcccagctattcaggagtctgagacaggatgattgcttaaggccaggagtttgagactagcccgggcaacatagtgagactctatctcctaaaaaagttagctgaatgtggtggtgtgctcctgtaatgcccactcctcatagatatttcaaaatagtaatatttattgctgccaatgtgagtaggccaaaaaaaaaa

SEQ ID NO: 17794 - DNA, 573 bp, Homo sapiens
ctggttcatcagttttctgatctcatctcaaatatcatctcctgccttgctaccctatctaaagttgcctctcattctgtctctatcctgttacactgctttatttatttttttcatagaacttacctatatctctatgcttttgtctatttccatttatttccctgtttattttctatttcaggggtttgcagactactgtgggtcaaatcaagcctgcctggttccataaataaagttatattggaaaatggcctggcctgtttgtttatgcattgtcaatggctgctttggctctataagggcattactgaatagtggtgacagagacgatctggactgcaaagcctaaaatatttagtatctggccctttacagaaaaatttactgacacctgctctatctccctccactacttaactgtcttgttcactgctaattccccagcacctagtacagttctgggcacatggtggttctcaataaatacttgtcaactgaacttagtcaatgaaggaacacaggacattgtgactggttttgactctagttgtggatgtcttttgaccctta

SEQ ID NO: 17795 - DNA, 762 bp, Homo sapiens
tcacctccctagagcctctgcttcctcatccaagactgggggtatagctgtgctcacccactaacactgctgtattgtttaacgtaaaggcaagatgagaacatggagtttcaacctgaaaggcattgagcacgttggttgtcattactgttgggtgacttcctactttccctgcgtacctctgaaaggagaactattttgcttattactgagttgcaatttccttctatattctgaatacaaattcatcatcagatatatgtgttgtgaagttttcttcgaggattttccagggttgcatctctgtggcttagacgttggccacttcatcttggcatgactattatataacaggaggatggagaaatggccggggtttgcagactactgtgggtcaaatcaagcctgcctggttccataaataaagttatattggaaaatggcctggcctgtttgtttatgcattgtcaatggctgctttggctctataagggcattactgaatagtggtgacagagacgatctggactgcaaagcctaaaatatttagtatctggccctttacagaaaaatttactgacacctgctctatctccctccactacttaactgtcttgttcactgctaattccccagcacctagtacagttctgggcacatggtggttctcaataaatacttgtcaactgaacttagtcaatgaaggaacacaggacattgtgactggttttgactctagttgtggatgtcttttgaccctta

SEQ ID NO: 17796 - DNA, 380 bp, Homo sapiens
gccttttgccatattattagagtaaatatgctcttggctccagaaacatgggaaaagggtgcaacgaaggggtcaaagtaataatacccaggagcaaagaagcagaggccgggaggagacggtgttcgaggaacacacttgcaaagcagatgctggtgtgtcttgctacacaattgtcagtagcctaagagtaatacacagacatttccatgacctaaaaacttaagagagtgaaatgcaacatagaaatcaactgatttgggccgggagcggcggctcacctgtgtaatcccagcactttggaaggctgaggcgagtggatcacctgaggccaggagttcgagaccagcctgggaaatataccaagaccccaaatctac

SEQ ID NO: 17797 - DNA, 522 bp, Homo sapiens
tgtgaggcaaggtctagcccaggctagagtgcagtggcacaatcacggctcactgcagccttgaccactgaagctcaagcgatcctcccacctcagcctcccaagcagctgggactacaggcatgtgccaccatgcctggctaatttttaaatttttttgtagagataaggtctcgctatgttgctcaggctggtcttaaactcctgacctcaactgatcctcctgccttggcctcccaaagtgctggcattacaggcacgagccaccatacctggccggaagtcatcattttcaatgagacattaaagagaagacagaaccagaataaagtaagaatgtacaaaatcacaagagaaaaaatataaaaaagagaaaggaagaggctttctagagaaacaaaaaaaaaagacagaaaataaatagagaaatggcagaagataaagtgaacatgagtaacaggcaagggacaaagagttaacatcatcttctctctccctttaaggtgggtagctctgttctca

SEQ ID NO: 17798 - DNA, 509 bp, Homo sapiens
tttctagaggctgcctgcattccttggctaatgactttgcatcactctgacgtcttgctcccatggtcgtatcacctactactggccctgatctcactacttgttatatggaacaaagggataaggaagtgacttgcctaagtcactgaggaacctaatattgagattagcactcaatgattcctggctctcagaatgtgtgctgctaccaccaggccacactcttccctccagagagaagatgtgtcagcacggaattgtgctgaagcaaagatgtgaaatagaatgattacatatctacctagtgggaagatctggggaagaatctatcagtgctggcagagaagcaaaccatacgacatcactcatccccagaaagtgaagttaagggaaataaaaaacaatctacaccatttagaaaacacagccaccccatacccttggaaaaaatacactaaaatatcttcatctgatttgacctctaataacatgaataattgtcttataac

SEQ ID NO: 17799 - DNA, 288 bp, Homo sapiens
gagaccagcttgggtgatcttgtttcttaaaagaaaaaggaaaagagactgggtgcactggcttacgcctataatcccagcgttttgggagcccgaggctggtggatcacctgaggtcaggagttcgagaccagcctggccaacatggtgaaaccccaactctactaaaaatacaaaattagccaggagtggttcatacatctgtaatcccagctacttgggaggctgagccaggagaatcacttgaacccaggaggcggagcttgcagtgagctgagatcgcaccac

SEQ ID NO: 17800 - DNA, 436 bp, Homo sapiens
agctatttggaagtgacatagccaaaatgctggaagaacataattactttcactcatcttctcacttcagaacaaaggttaaaacactatgtttcatgtttactctatttgtaaatgtacatataatagtatgttactttatatggatccaagtgattgcaatgaataattcttacaaccttaatattggcataagagggtgtctttacaatatgtatttatgagttaatttctttaaggaagagccgtaagtataagaactgatgcagaagaatataagtatgtttatgaatgagaggaactagtttctgatcttgattctgaactgatacataccacaataaccaataagccaaactacaaccaactagtttgttaacaagattagtgctattggtatgtttcatagaattatttttaatggcacccaaaactt

SEQ ID NO: 17801 - DNA, 355 bp, Homo sapiens
gtagattagtaagtgctacagagataaaagggaggcctgttgcgatttcaccgagggtggtcagtgtagacttctttgtgaagaagagaaaataaaccatgcagatatctgaggggacattggttttctgttgctgtgtaacaaattaccacaggccaggcacggtggcttgtgcctgtaatcccagcactttgggagtctgaagcgagaggatcacttaagcccaggaattagagaccagcctgggcaacatagggagacccaggctctataaaatgtttttaaaaaattagctgggtttgttggcatgcacctgcagtcccagctacttgggaggctgagacaggaagatcac

SEQ ID NO: 17802 - DNA, 149 bp, Homo sapiens
atggacagtagcttatgcgaaataaaacctttggtctttttagtgaactatttttattatgatgaaatgagatcatactaaccttctcccataacttgtaacactaaaatctttaaatcagacagattatctcacaagtacattttttg

SEQ ID NO: 17803 - DNA, 260 bp, Homo sapiens
gatctgcccacctcggcctcccaaagtgctgggattacaggcgtgagctactgcacccagcctttttttaaaatttttaaacaagaactttccctgatttctgtctttgaagtttgtcctagacctagaccatgaacattttataaattctttaacttaaattagtaaattctggagcaagtgtaaaaaccttctttcccatcctattattagggaagaagatcctgtttaacagtccctcagaaatttttattatggag

SEQ ID NO: 17804 - DNA, 590 bp, Homo sapiens
tgcttttatgaatccggtgactgttgacatctgtgagaggagagctggctttcctgctgtgtttatttcagtgtccccctgccacgtcatgcagttgtcttgcttctgtgtctggaacatcccaagttgcaccattctaagaaaattaagtgcaatgaaatatgttaattcaacattatggcttaagaattatatttcctggacctcacgtgtacttaaaagttgaatcgatcaaattttattgcttccttttcccttagagcagcacgttgagagtgatggttttttctgcaatcataactcagtggccttggtgacttttgtcttgtgttaatacttaaaagtagatccatttcctctggggccatgcatattcaaaggggctgaggctgtagtcatccccagagctgctcttgacacttcttgagttcatagcgctctgtcacacagcctctgttgtaactacagagaccgtttttactcttcagcattgatcatgaagagaagagataaggggtttttatgcatagccgtcataccagtaacttctgtgactgaactctccacctgtctgcatcagtaaaaaaaaa

SEQ ID NO: 17805 - DNA, 383 bp, Homo sapiens
aggacaaaaaaaaatgtttaagcaaatgaaaacaaaaccatgacatacccaaactcaggaggaggcaacaaaggcagtgctaaagggaagcttacagccgcagatgcttaaattaaaaagaagaaagatctcaaagccatgctaaagggaagcttatagctgcaggtgattaaattaaaaagaagaaagatctcaaatcaataacctaacattacacctaaaggggaaaaaaaaaaaaaaaactaatgacaaaccaagcaaaaggaagaaaataacagattagaacagagataagcagaataagatcagaaaaaaaggaaaaaaaaaccactgagtttgtttttttaaagatcaataaaaattctaaaactcacagctatatt

SEQ ID NO: 17806 - DNA, 338 bp, Homo sapiens
gatgtgctagccctggcgctggctattgaagagctagcagtggccacatggaagccctggacagcttagtggtgtgctctacaaatgactctgtccagggcatctcccaacacagcagtgggacaagaagacaatgacgggatgttgcatgaactgaccctcagaacccaatgtccaggagaacatgaactgggatcttgaagttcttcagaaagatcagagtgagcggtggccctgagtcactctgtagcagtcatggcagtgagaagagccactctctaatcataatggaattgcaagattgccaaattaagtcacccagttaattgtggccctta

SEQ ID NO: 17807 - DNA, 409 bp, Homo sapiens
acttactcaaaagaattgaaagcagggacttgaacaggtatttgcacacccatgttcacaacagcatcattcatagtaaccaaaaggtggaaacatcctcagtgtccattgatagttgaaaggataaacaaaatgtagcatatacaatggaacattatttagccttaaaaaggagaaaattttgatgcatgttgtaacatggatgaagcttgaagacattatgctaacttagtcataggacaaattttgtataattccttttatatgaggttccttagagtatatgtaaatggatgataagtgtatgaaaagatgctcattatcagtcattcaggaatgaaataccactgcaacccactaaaatataggttgggcaagagtaattgcgttttttgccattgaaagctgc

SEQ ID NO: 17808 - DNA, 453 bp, Homo sapiens
atgtgctgccgtcccctgtgaggtgagggggagtacatttccaaggggcaaaattaggcaaactcttgaatccatccataactgctgttgtggtagatattcctgaatacccaaaaattaaaagtgaatttaaactgtcagtggaaacacagcagtcctgcattttaaaaacttagagctgtcccaggcacatagaaaagttaactgtctgaggggaaatagaatgtggttaagtttaaagaatatgcttagtattataaatgttgagtgatgagttgtttaccatttataataaactgttaaatgtatttctgggaacattccatggcagcatattctgggttgttgtttatgtgttccaatgtagacaaattatatttgccttgggaaaaattctaagtaatcaaaattatatttaaatattaaaaaatcacattgaagttcaaaaaaaat

SEQ ID NO: 17809 - DNA, 965 bp, Homo sapiens
  misc_feature (11)..(11): n is a, c, g, or t
cctcaaaggcnactgccccctgggtgcaaagtgcaagaagaaacacacgctgctgtgccccgactttgcccgcaggggggcgtgtccccgcggcgcccagtgccagctgctccaccgtacccagaaacgccacagtcggcgggcagccacgtcccccgccccagggcccagcgacgcaaccgccaggagcagggtctcggccagccacgggcccaggaagccttcagcatcccagcgccccaccaggcagacgcccagctcggctgccctcactgcggctgccgtggctgcacctccccactgcccaggggggtcagcctctccctcatcctcgaaggcttcctcctcctcctcctcctcctcatcccctcccgcttccttggaccacgaggcaccatctctccaggaggctgccttagcagcagcgtgctccaacaggctctgcaagctgccttccttcatctccctgcagtcctcgccgagcccaggagcccagcccagggtccgggcccctagggcccccctcaccaaggactcagggaagcctctgcacatcaaaccacgtctgtgaggaccccagggaccggcctgcacctacctcagaccctcatccttggagaggaaagaggctctgtccaccactctaccccacaggagggccgcccgccaccaagcctcacctgggggccacagggacactgctctgcctgcctggccctcaaccttccatgaccagcgtgtgcgcagggcctggtcttcctcccccaagccaggcccctgtccccaccccaccaccttccagggtgccaggcagggctggcctccaggcctgtccccgactgccattggcaacagtggccctgcagcccccagccctccccacccaggttttcggcccagtgaagaggccactggccaggcctcccaggcaggtgttttatgttcagcaataaaggttctatccg

SEQ ID NO: 17810 - DNA, 1038 bp, Homo sapiens
  misc_feature (11)..(11): n is a, c, g, or t
cctcaaaggcnactgccccctgggtgcaaagtgcaagaagaaacacacgctgctgtgccccgactttgcccgcaggggggcgtgtccccgcggcgcccagtgccagctgctccaccgtacccagaaacgccacagtcggcgggcagccacgtcccccgccccagggcccagcgacgcaaccgccaggagcagggtctcggccagccacgggcccaggaagccttcagcatcccagcgccccaccaggcagacgcccagctcggctgccctcactgcggctgccgtggctgcacctccccactgcccaggggggtcagcctctccctcatcctcgaaggcttcctcctcctcctcctcctcctcatcccctcccgcttccttggaccacgaggcaccatctctccaggaggctgccttagcagcagcgtgctccaacaggctctgcaagctgccttccttcatctccctgcagtcctcgccgagcccaggagcccagcccagggtccgggcccctagggcccccctcaccaaggactcagggaagcctctgcacatcaaaccacgtctgtgaggaccccagggaccggcctgcacctacctcagaccctcatccttggagaggaaagaggctctgtccaccactctaccccacaggagggccgcccgccaccaagcctcacctgggggccacagggacactgctctgcctgcctggccctcaaccttccatgaccagcgtgtgcgcagggcctggtcttcctcccccaagccaggcccctgtccccaccccaccaccttccagggtgccaggcagggctggcctccaggcctgtccccgactgccattggcaacagtggccctgcagcccccagccctccccacccaggttttcggcccagtgaagaggccactggccaggcctcccaggcaggtgttttatgttcagcaataaaggttctatccgccagaaaaatactaagaaaccccggcggtcgcccacaaattcccaataaagaggcttaattaaagccggaccc

SEQ ID NO: 17811 - DNA, 1102 bp, Homo sapiens
  misc_feature (11)..(11): n is a, c, g, or t
cctcaaaggcnactgccccctgggtgcaaagtgcaagaagaaacacacgctgctgtgccccgactttgcccgcaggggggcgtgtccccgcggcgcccagtgccagctgctccaccgtacccagaaacgccacagtcggcgggcagccacgtcccccgccccagggcccagcgacgcaaccgccaggagcagggtctcggccagccacgggcccaggaagccttcagcatcccagcgccccaccaggcagacgcccagctcggctgccctcactgcggctgccgtggctgcacctccccactgcccaggggggtcagcctctccctcatcctcgaaggcttcctcctcctcctcctcctcctcatcccctcccgcttccttggaccacgaggcaccatctctccaggaggctgccttagcagcagcgtgctccaacaggctctgcaagctgccttccttcatctccctgcagtcctcgccgagcccaggagcccagcccagggtccgggcccctagggcccccctcaccaaggactcagggaagcctctgcacatcaaaccacgtctgtgaggaccccaggggaaccgggcttggaactaacttaaaagacccctctctatcttttgtgggacgagggaagaagagctgcttcgtgctacaactactactcactccctaatgaggaggtgggcccgcccggccaaagaacataccctctagcttgggcgaccccaggaggggatgacttgcgtctagccttggccttgtgcccctctaaccctttccacatagacccaaggcggttggtagcagcaagggggcccttgggatctttccccatcccccaccaaaaaggacacaaggggaccaccctgatccccacaaacgcaccataccaaagacattacacaggagcatcagaccagagggcaaagggatagcaggccacaacacacgagacctagatcaccaaggcacaggccaaagaggcgaacaaaaatagatgggccacagacaagccacgacaggaaagcaagacaaacacaaggagtcctacagcaccaaaacgacagaaggaccacgagacgcacgcgacaacca

SEQ ID NO: 17812 - DNA, 985 bp, Homo sapiens
acttaccaaagacaccctcagagttacggatggtcacaaatccaggtatatggcacccagagaacaagacttgggttgtcagtggtttgcattcaagaataactcaggaagaagaaaaccaatagagaaagtttcagtctgctgtggaccattatttttctcatggcacttaacttcgtttttgatgtgatgccccgtaagcttcgcattggttgggttgtgaaatgccatcctacagaggaggacttacaaggacctcactgcccacattaagcacagcactggctttggctctaaattaggtctcatcaccccttcagacagatgctcacaggagcttagagctcagagggccattagggacacactgaagaaacagaggcaggagaagttaatgacttgctgagttctcttgttactggatgccacgattagaccacacatcctttgtgaaatgcagagaagcttttttgcttttattaatgaataaagtgtttcaaattcatctggtataattgaggacacatgatgaaattgagaggagccagaggttgcacactggctgagctgtgatttcaaagcagtttctctccatttacattaaggctgaccccacaggaccctagacaaggaggcccttcaccaggggactgcagtggtggaaccacagtgagaggtgaggcagaaaagagcaaggacaggccagagcatcttccaagccctgaaaccattcaggcagagtcgagaataccatttgatgaaaacacctctctttaatctgtcggaaccgattctgttcgatttgtcctgaatataatcttgaaccaccctgcatgtattataaaacacccagagtcatcttgtgaagatacgtaagttgtttgcaagctgcgaggggattattttttttttggataagatgtctaggactgtgattcagagggaaccttataacatattgggtgcaatgctctacatctcttaa

SEQ ID NO: 17813 - DNA, 238 bp, Homo sapiens
catatgctgttaaggaatctgatgccagaaatcttactccagttctttttgttgttgttgttgtttgtttttttaaagacaaggtctcactttgttgcccaggctggagtgtagtggtgcaatcacggctcactgcagccttgacctccccaggctcaagcaatcctcccacctcagcctcctgagtagctggcactacaggtgcacaccaccagagctggctaattcttctaatttt

SEQ ID NO: 17814 - DNA, 366 bp, Homo sapiens
gctgctattcgctgccccttctgcctccgaggcggtagcagatgccacgttggcggggtcggtgaaggtcaggactctaggcctccctccgccaagccagagggatgagcaatcacgcctgagagcccactgcgtgccatgcagtccgcacagccgcagcggttttctagatggagaaactgaggctcagtgacttgcccgctgcactctgtccacggccgctgcacacgcccccttgggctgcgctcccggaccttctaatgtgaccacggctcccggcatgcaggccctgccagcggagggagcccggtggtgacccttggtctgcagccctctttggaggtgaataaatgcggtctggagccc

SEQ ID NO: 17815 - DNA, 441 bp, Homo sapiens
taaaatagcaatttttatacataatccatccatgtgctaataggcacctgtatagcacattatattttacaaagtatcgtaggaatttatatttgagattcccagtaacattctgaggttggcattagtattttcttacttttccaaatgagaaaactgggggtcaaaaaagcaaagtgactggtacaagactattcagttggtgaataagaaaccaggatttaaacacagatcttgggactctgaagtttatgctttatcttgtatagagtagctgatcctttcataccaatctccttagggattgccattatcttgccagatttttctattgcttttcaaactgcaggtggcagcccattagaaggttgtgaagtcaatgtaatagattgtaaggtcagtgtaatgagccatgaaagcattaaaaaatcagttagaata

SEQ ID NO: 17816 - DNA, 205 bp, Homo sapiens
ggaacatcaatttagtctcgaaaaacatgtttactacaactccatatgaaacaaaaatctttctgtccttccttgataattcagtcaaaaagccattagcagacctgagaaacaagggactcctaacggagtctgatcccattcaaggaaggtagccaaatgggatagtggcctggtaaggtcgagatcagtcacatacaacagg

SEQ ID NO: 17817 - DNA, 938 bp, Homo sapiens
cctcattgataacctctgctagggcagtgaggaagggaaatgttgggtgggagcccccacacagagtccctactggggtaccgcctggtggacctgtgggaagagggccaccatcctccagacctcagaatgttagatccaccaacaacaccatgtgcctgggaaagccacagacactcaacaccagcccacaaaagcagccagaaggcaggctatatcccgcaaagccacaggggcagagctgcccaataccatgggaacccacctcttgcatctgcatgatcaggatgtgagacatggagtcaaaggagatcattttggagctttaagatttggctgcccctctggatttcggacttgcatggggtcaagaaatgaaaagcataaaaattgaaaagtgaaaagaaaaaatatttttattcacagaacatatatatgtatattgtatatgaagaaaatcctaatatatttatttaaaaagctgtgaataataagaatcaaattcaataatggtgcagaatgtgtagaatgcaaggtcaatacacaaaatacaatatggaaaattaatggaatttctaaatactagaaataaacaattgagaatacatttaaaagtaaaattttaatggtataaaaatagttaagaataatttaagtgaaacctttaaaaatctttcacactaaaactttttaaaatttcttgtagagaaacattacagaagacttaaataaatgtaaagatctaccatgttcttagatttgaagatgcaacattgatgtgaattctctggaagttaatctttagaatcaatgcagtagcggctgggcgcagttgctcatgcctgtaatcccagcactttgggaggccaaggtgggcggatcacaaggtcaggagatcaagactatactggctaacacgataaaaccctgtctctact

SEQ ID NO: 17818 - DNA, 439 bp, Homo sapiens
acaacttgaccaagattgaacttgccaatcctttggttcaagagccaaacaaaatcgttcccttaaaatattgcttcatgggaacagtcttcttcaaacatcttttagcacaggcaagattcccatttatacattaattctgttcaagacaatgagattgggcagaaaaggcattgagttggaagtcaatggatatgagtttttatcccagttttaccacaaattagctgagcataacttccacagatgcatttatcaagtagttttcatggtcattgcaatgccaaaaaactgtagcatttagaaaatttagttttcagacttggaaactatttaaggcatttcatatgaagggtgtgtccttgtaagagtttgcttatgcaagataaggcttctttcagctgcaagtcaggagcgaaccaaaactcaaagcagcagc

SEQ ID NO: 17819 - DNA, 341 bp, Homo sapiens
tgtctttgtgtcatggtgtttactatctataatgtgattagatgttctctaagatcttacagagcattgacattcatattctaattagtttcttgaagccatttttgttttttatggtaacctcttgaattacagtgtcaattcataatgcctccctatgtttactctttgtatacaagcacgcgcgcgcgcacacacacacacacacacacacacaactacctcccgacacacacattgatacatcaggtaacagtagtcttagaaggttgtgcatttggcttagctgtgactagcttttagagattttcacacgtgaccgctaagctgatccacagtta

SEQ ID NO: 17820 - DNA, 730 bp, Homo sapiens
acactttcacaatttattctaataattgaattagtatatgtaaatctcttagcacagttgacgtctgatatggtgtagtaaactctcaataaacattagctatttttattatatcctctccataactgttcaaacaaggtattatattgttacactatagatgaggaaactgaggttctgatgttagttttccaaggcccacagtagtaaaagcaaagtttggatttgaaccaaagattagttccagtttccagagccctcttctctcctcgacaggccttccctaaagcatcaagaagtttatgcaaattagtggttcacctgagtgaacatttaaaaaatttaatagtaccacttcctcttgacctgtttgtaaggagttcctcttaaatgcaatttctgaaaaagagaagcataaactgagacatccacattttttccttatttggccaaatagaagtgagaacctctgaggatagaggaattggatggaggtgcccttcagaactcatggagaaaagcactgctcccagtaaaatatctctcattctaatgaatgggtaagtatcctacaaatctttcacttctgtacaatctaggtctggtaggttacttgcacacactgggtggaggtggaaggggcaaagtattcctgaggtgatggccctgatcctacctcacatctccttggggcctggttggacctggctgagcgtgtttgagcagtggc

SEQ ID NO: 17821 - DNA, 474 bp, Homo sapiens
atgaaaactaagcccacgaagcttgagtcatctggagatgaagcagtcgcagcggagcagtcttggtaatggagaagatcatgtcagcgctgagaaaggcagggagggaggcctgagcaaggaagcttggagaagcctctggaggatgcctggccagggctgaatgctcagaaatggaagggaaagctcaggagattatcactgaatcaaagtgagaacctctgaggatagaggaattggatggaggtgcccttcagaactcatggagaaaagcactgctcccagtaaaatatctctcattctaatgaatgggaggactcttctccaggaggctgtgactaccaaggttgcaaatgctccacctgaacttgggtgcatgagggatctctctctctcacacacacacacccccccaccgcgtaagataaatttctgtttgtgagctgcctacattaaatgctttgctcctgaaaa

SEQ ID NO: 17822 - DNA, 514 bp, Homo sapiens
aactcatggccaagcagattttccagataagacttttattatggggcttatgctcaagtgcaagggagacagcaacggtgagaaagatcctctggctagctcccaaagaaacgccattagggattttttttttttttaattagacaaaacatgggaattgatttcaagactagtgtatgcaggctgggctgggcaaagcatgtgaagggtaggggatgcaggtcagcatgtctggttgtgatggttctcttgagtaatgaaccacctggtggtctggtgggggcagcgaagcagtaatcaatttttcagtttttcttcccaaggaaggacactcgcaaccttgtttgatgtttagctctcctaaggtcagtttctggaattctctaagtaaaaggaatggttgaacattatgagagcacagaagaatggctatttgctttgtgtgacagaagcctcagggttaatgggtataccatccatgaagtagtggtgtgggttttgtgaagagaagaaa

SEQ ID NO: 17823 - DNA, 301 bp, Homo sapiens
ccatatttcagattctgtgccagcggatgatagttttctgtctcattaggtttcataagtttacacaaagcacagggcaagtgttacacgtaactaaaaagttcagattttaatcagattagcagtgaccctggtttctggaagtagggaagttttttgttgttggtgttgctgttcacataagcatttctttatgttcatctgcaagtgaaactgtgtttaattctttaagcttgttttttttttttttctgagaattccataacatttaaattatatactaattataagtgaagcttca

SEQ ID NO: 17824 - DNA, 478 bp, Homo sapiens
ttcattctcttctctccttctgtgaggagcgcttctatactaagaccctgaaggttaactagaaagagacaaactcccaccaagtcatcccagtggtgcacctttgaggacttcccactactcgcctaggttcctatgaggccagtatggagacagagaggtgggggcctgtggggaactggaggctacaggccccacttctaggagatctcccagctccagcccactgtgccatcaggaatgtgggcccatggctgcctggctttcaagagaagctagaaatctgctttctatgtgaaaacctcttgatttttaaatgcttgcaatgaattaaaaatttatcaaaactgtgttgtccaaacaatcatgtatgtgaccaaacatggcctacaaaatgctaatttactacctctgaactagcacaatatcctgaaaaaaggcataaataaaaaaatattggcagaatgcagcatgagca

SEQ ID NO: 17825 - DNA, 414 bp, Homo sapiens
tgcccctaatggtggtttatacccatattaaggaggatgtgtagagtgtggtaatggtagtgactggagtgtggtaagggccttcctctgatgctaataatgtaacagtttctcggccgggagcagtggctcacgcctgtaatcccagcacttcgggaggccgaagcgggcggatcacctgaggtcaggagttccagaccagcctgaacaacatggagaaaccccatctctactaaaatacaacaaaacaaaacaaaaattagctggatgtggtggcacacgcctgtagtcccagctgcttgggaagctgaggcccgagaatcacttgaacctaggaggcggaggttgcagtaaaccgagattgcgccactggactccagtctgggcgacagaatgagactccgtctcaaaaaa

SEQ ID NO: 17826 - DNA, 416 bp, Homo sapiens
aaaatatgagtctgataatattaagtgctgacaagggatattggtcagtggaaattctcatacacagctggcaggactgtaatttggcacaacttttgaaagcaatttattcttacctctattaccacacagttctgccattccactcccaggaacagaccctggtggaaagagaataagctttggagtcagtccaggatttgaatccatcttttaccattttcttttctttctttctttctttctttttttttttgagatggagtctcattctgtctctacttaaaaaaaatacaaaaattagctggatgttgtggcacatgccagtcatctcagctacttgggaggctgaggccagagaatcgcttgaacccaggcagcagagtttgcagtgagccgagatagtgccatggcac

SEQ ID NO: 17827 - DNA, 2855 bp, Homo sapiens
cgctgggggcggggcgacgccggactccggagcgcccgcttacgcagttcctcccggggtcggaggccgattcgccgtgtggcgggttcgagtcccgcctcctgactctggcctctagtccctgagtcccgggcgggctgcattcgtcggggaaacctctcctcgaccaggggcacctctactcgaccaggggcgacggcgtactttgggcttcatcatggaggactacctgcagggttgtcgagctgctctgcaggagtcccgacctctacatgttgtgctgggaaatgaagcctgtgatttggactccacagtgtctgctcttgccctggctttttacctagcaaagaagtgacacagccctagaggaggcagtagcagaggtgctagaccatcgacccatcgagccgaaacactgccctccctgccatgtttcagttgagctggtggggtcctgtgctaccctggtgaccgagagaatcctgcagggggcaccagagatcttggacaggcaaactgcagcccttctgcatggaaccatcatcctggactgtgtcaacatggaccttaaaattggaaaggcaaccccaaaggacagcaaatatgtggagaaactagaggcccttttcccagacctacccaagagaaatgatatatttgattccctacaaaaggcaaagtttgatgtatcaggactgaccactgagcagatgctgagaaaagaccagaagactatctatagacaaggcgtcaaggtggccattagtgcaatatatatggatttggaggcctttctgcagaggtctaacctccttgcagatctccatgctttctgccaggctcacagctatgatgtcctggttgccatgactatctttttcaacactcacaatgagccagtgcggcagttggctattttctgtccccatgtggcactccaaacaacgatctgtgaagtcctggaacgctcccactctccacccctgaagctgacccctgcctcaagtacccaccctaacctccatgcctatcttcaaggcaacacccaggtctctcgaaagaaacttctgcccctgctccaggaagccctgtcagcatattttgactccatgaagatcccttcaggacagcctgagacagcagatgtgtccagggagcaagtggacaaggaattggacagggcaagtaactccctgatttctggactgagtcaagatgaggaggaccctccgctgcccccgacgcccatgaacagcttggtggatgagtgccctctagatcaggggctgcctaaactctctgctgaggccgtcttcgagaagtgcagtcagatctcactgtcacagtctaccacagcctccctgtccaagaagtgactgttgagaggcgaggaggtagtgggtgaggctacctgactcacttcaaatgcatgttttgagatgtttggagattcagcaattctgtcttcattgctccaggatctggtatactgttctcataaaactgagaggagaaaaaaagtgaaagaaagcagctgctttaagaatggttttccaccttttccccctaatctctaccaatcagacacattttattatttaaatctgcacctctctctattttatttgccaggggcacgatgtgacatatctgcagtcccagcacagtgggacaaaaagaatttagaccccaaaagtgtcctcggcatggatcttgaacagaaccagtatctgtcatggaactgaacattcatcgatggtctccatgtattcatttattcacttgttcattcaagtatttattgaatacctgcctcaagctagagagaaaagagagtgcgctttggaaatttattccagttttcagcctacagcagattatcagctcggtgacttttctttctgccaccatttaggtgatggtgtttgattcagagatggctgaatttctattcttagcttattgtgactgtttcagatctagtttgggaacagattagaggccattgtcttctgtcctgatcaggtggcctggctgtttctttggatccctctgtcccagagccacccagaaccctgactcttgagaatcaagaaaacacccagaaaggccttaatgacctcataggcactcttccaaaaagacaacagaactggaatgagaggcctgggtctgtctcctgccttagcaggcctatcaatttcttgtcaatctctttttttccttgctcacattaaaaggaagcatggagttctaatgctcccataaactatgtattttggcaagacacttcactactccaggtctcactttccccatctgtaaaacagggtttggactaggtgttccctggtattctgtgatctgcctcttgctgccattctttctctcctctgcttctctgtatttttcttctgttatccctgggggtgctcaggttcacttgattgtctgtatttctgtgtggttgtagcaaggactcagcctcatgtagcacgaataggggtgtggttcatggcgtgttgacccagcagagcactccctcccactaacttgttctgcatgtgtagagtctccccattttttttaacgcaaccctttcccctttttcctaccccacagctctgttccatgtaagttgccaacagtttcactgaacagtggggtatgtgatggttttggcatgacatcttcagtatgagggggacagtttgacttcactttgagggtgtgatgtctgtagctatgtggaaggtaaaaatagtggtgtgatcatgaaccaaaggaatttatgttttgtaacttgggtactttattttgcattttgttatactattaaataattttttcctgtt

SEQ ID NO: 17828 - DNA, 2900 bp, Homo sapiens
cgctgggggcggggcgacgccggactccggagcgcccgcttacgcagttcctcccggggtcggaggccgattcgccgtgtggcgggttcgagtcccgcctcctgactctggcctctagtccctgagtcccgggcgggctgcattcgtcggggaaacctctcctcgaccaggggcacctctactcgaccaggggcgacggcgtactttgggcttcatcatggaggactacctgcagggttgtcgagctgctctgcaggagtcccgacctctacatgttgtgctgggaaatgaagcctgtgatttggactccacagtgtctgctcttgccctggctttttacctagcaaagacaactgaggctgaggaagtctttgtgccagttttaaatataaaacgttctgaactacctctgcgaggtgacattgtcttctttcttcagaaggttcatattccagagagtatcttgatttttcgggatgagattgacctccatgcattataccaggctggccaactcaccctcatccttgtcgaccatcatatcttatccaaaagtgacacagccctagaggaggcagtagcagaggtgctagaccatcgacccatcgagccgaaacactgccctccctgccatgtttcagttgagctggtggggtcctgtgctaccctggtgaccgagagaatcctgcagggggcaccagagatcttggacaggcaaactgcagcccttctgcatggaaccatcatcctggactgtgtcaacatggaccttaaaattggaaaggcaaccccaaaggacagcaaatatgtggagaaactagaggcccttttcccagacctacccaagagaaatgatatatttgattccctacaaaaggcaaagtttgatgtatcagggactgaccactgagcagatgctgagaaaagaccagaagactatctatagacaaggcgtcaaggtggccattagtgcaatatatatggatttggagatctgtgaagtcctggaacgctcccactctccacccctgaagctgacccctgcctcaagtacccaccctaacctccatgcctatcttcaaggcaacacccaggtctctcgaaagaaacttctgcccctgctccaggaagccctgtcagcatattttgactccatgaagatcccttcaggacagcctgagacagcagatgtgtccagggagcaagtggacaaggaattggacagggcaagtaactccctgatttctggactgagtcaagatgaggaggaccctccgctgcccccgacgcccatgaacagcttggtggatgagtgccctctagatcaggggctgcctaaactctctgctgaggccgtcttcgagaagtgcagtcagatctcactgtcacagtctaccacagcctccctgtccaagaagtgactgttgagaggcgaggaggtagtgggtgaggctacctgactcacttcaaatgcatgttttgagatgtttggagattcagcaattctgtcttcattgctccaggatctggtatactgttctcataaaactgagaggagaaaaaaagtgaaagaaagcagctgctttaagaatggttttccaccttttccccctaatctctaccaatcagacacattttattatttaaatctgcacctctctctattttatttgccaggggcacgatgtgacatatctgcagtcccagcacagtgggacaaaaagaatttagaccccaaaagtgtcctcggcatggatcttgaacagaaccagtatctgtcatggaactgaacattcatcgatggtctccatgtattcatttattcacttgttcattcaagtatttattgaatacctgcctcaagctagagagaaaagagagtgcgctttggaaatttattccagttttcagcctacagcagattatcagctcggtgacttttctttctgccaccatttaggtgatggtgtttgattcagagatggctgaatttctattcttagcttattgtgactgtttcagatctagtttgggaacagattagaggccattgtcttctgtcctgatcaggtggcctggctgtttctttggatccctctgtcccagagccacccagaaccctgactcttgagaatcaagaaaacacccagaaaggccttaatgacctcataggcactcttccaaaaagacaacagaactggaatgagaggcctgggtctgtctcctgccttagcaggcctatcaatttcttgtcaatctctttttttccttgctcacattaaaaggaagcatggagttctaatgctcccataaactatgtattttggcaagacacttcactactccaggtctcactttccccatctgtaaaacagggtttggactaggtgttccctggtattctgtgatctgcctcttgctgccattctttctctcctctgcttctctgtatttttcttctgttatccctgggggtgctcaggttcacttgattgtctgtatttctgtgtggttgtagcaaggactcagcctcatgtagcacgaataggggtgtggttcatggcgtgttgacccagcagagcactccctcccactaacttgttctgcatgtgtagagtctccccattttttttaacgcaaccctttcccctttttcctaccccacagctctgttccatgtaagttgccaacagtttcactgaacagtggggtatgtgatggttttggcatgacatcttcagtatgagggggacagtttgacttcactttgagggtgtgatgtctgtagctatgtggaaggtaaaaatagtggtgtgatcatgaaccaaaggaatttatgttttgtaacttgggtactttattttgcattttgttatactattaaataattttttcctgtt

SEQ ID NO: 17829 - DNA, 3058 bp, Homo sapiens
cgctgggggcggggcgacgccggactccggagcgcccgcttacgcagttcctcccggggtcggaggccgattcgccgtgtggcgggttcgagtcccgcctcctgactctggcctctagtccctgagtcccgggcgggctgcattcgtcggggaaacctctcctcgaccaggggcacctctactcgaccaggggcgacggcgtactttgggcttcatcatggaggactacctgcagggttgtcgagctgctctgcaggagtcccgacctctacatgttgtgctgggaaatgaagcctgtgatttggactccacagtgtctgctcttgccctggctttttacctagcaaagacaactgaggctgaggaagtctttgtgccagttttaaatataaaacgttctgaactacctctgcgaggtgacattgtcttctttcttcagaaggttcatattccagagagtatcttgatttttcgggatgagattgacctccatgcattataccaggctggccaactcaccctcatccttgtcgaccatcatatcttatccaaaagtgacacagccctagaggaggcagtagcagaggtgctagaccatcgacccatcgagccgaaacactgccctccctgccatgtttcagttgagctggtggggtcctgtgctaccctggtgaccgagagaatcctgcagggggcaccagagatcttggacaggcaaactgcagcccttctgcatggaaccatcatcctggactgtgtcaacatggaccttaaaattggaaaggcaaccccaaaggacagcaaatatgtggagaaactagaggcccttttcccagacctacccaagagaaatgatatatttgattccctacaaaaggcaaagtttgatgtatcaggactgaccactgagcagatgctgagaaaagaccagaagactatctatagacaaggcgtcaaggtggccattagtgcaatatatatggatttggaggcctttctgcagaggtctaacctccttgcagatctccatgctttctgccaggctcacagctatgatgtcctggttgccatgactatctttttcaacactcacaatgagccagtgcggcagttggctattttctgtccccatgtggcactccaaacaacgatctgtgaagtcctggaacgctcccactctccacccctgaagctgacccctgcctcaagtacccaccctaacctccatgcctatcttcaaggcaacacccaggtctctcgaaagaaacttctgcccctgctccaggaagccctgtcagcatattttgactccatgaagatcccttcaggacagcctgagacagcagatgtgtccagggagcaagtggacaaggaattggacagggcaagtaactccctgatttctggactgagtcaagatgaggaggaccctccgctgcccccgacgcccatgaacagcttggtggatgagtgccctctagatcaggggctgcctaaactctctgctgaggccgtcttcgagaagtgcagtcagatctcactgtcacagtctaccacagcctccctgtccaagaagtgactgttgagaggcgaggaggtagtgggtgaggctacctgactcacttcaaatgcatgttttgagatgtttggagattcagcaattctgtcttcattgctccaggatctggtatactgttctcataaaactgagaggagaaaaaaagtgaaagaaagcagctgctttaagaatggttttccaccttttccccctaatctctaccaatcagacacattttattatttaaatctgcacctctctctattttatttgccaggggcacgatgtgacatatctgcagtcccagcacagtgggacaaaaagaatttagaccccaaaagtgtcctcggcatggatcttgaacagaaccagtatctgtcatggaactgaacattcatcgatggtctccatgtattcatttattcacttgttcattcaagtatttattgaatacctgcctcaagctagagagaaaagagagtgcgctttggaaatttattccagttttcagcctacagcagattatcagctcggtgacttttctttctgccaccatttaggtgatggtgtttgattcagagatggctgaatttctattcttagcttattgtgactgtttcagatctagtttgggaacagattagaggccattgtcttctgtcctgatcaggtggcctggctgtttctttggatccctctgtcccagagccacccagaaccctgactcttgagaatcaagaaaacacccagaaaggccttaatgacctcataggcactcttccaaaaagacaacagaactggaatgagaggcctgggtctgtctcctgccttagcaggcctatcaatttcttgtcaatctctttttttccttgctcacattaaaaggaagcatggagttctaatgctcccataaactatgtattttggcaagacacttcactactccaggtctcactttccccatctgtaaaacagggtttggactaggtgttccctggtattctgtgatctgcctcttgctgccattctttctctcctctgcttctctgtatttttcttctgttatccctgggggtgctcaggttcacttgattgtctgtatttctgtgtggttgtagcaaggactcagcctcatgtagcacgaataggggtgtggttcatggcgtgttgacccagcagagcactccctcccactaacttgttctgcatgtgtagagtctccccattttttttaacgcaaccctttcccctttttcctaccccacagctctgttccatgtaagttgccaacagtttcactgaacagtggggtatgtgatggttttggcatgacatcttcagtatgagggggacagtttgacttcactttgagggtgtgatgtctgtagctatgtggaaggtaaaaatagtggtgtgatcatgaaccaaaggaatttatgttttgtaacttgggtactttattttgcattttgttatactattaaataattttttcctgtt

SEQ ID NO: 17830 - DNA, 2810 bp, Homo sapiens
cgctgggggcggggcgacgccggactccggagcgcccgcttacgcagttcctcccggggtcggaggccgattcgccgtgtggcgggttcgagtcccgcctcctgactctggcctctagtccctgagtcccgggcgggctgcattcgtcggggaaacctctcctcgaccaggggcacctctactcgaccaggggcgacggcgtactttgggcttcatcatggaggactacctgcagggttgtcgagctgctctgcaggagtcccgacctctacatgttgtgctgggaaatgaagcctgtgatttggactccacagtgtctgctcttgccctggctttttacctagcaaagaaggttcatattccagagagtatcttgatttttcgggatgagattgacctccatgcattataccaggctggccaactcaccctcatccttgtcgaccatcatatcttatccaaaagtgacacagccctagaggaggcagtagcagaggtgctagaccatcgacccatcgagccgaaacactgccctccctgccatgtttcagttgagctggtggggtcctgtgctaccctggtgaccgagagaatcctgcagggggcaccagagatcttggacaggcaaactgcagcccttctgcatggaaccatcatcctggactgtgtcaacatggaccttaaaattggaaaggcaaccccaaaggacagcaaatatgtggagaaactagaggcccttttcccagacctacccaagagaaatgatatatttgattccctacaaaaggcaaagtttgatgtatcagggactgaccactgagcagatgctgagaaaagaccagaagactatctatagacaaggcgtcaaggtggccattagtgcaatatatatggatttggagatctgtgaagtcctggaacgctcccactctccacccctgaagctgacccctgcctcaagtacccaccctaacctccatgcctatcttcaaggcaacacccaggtctctcgaaagaaacttctgcccctgctccaggaagccctgtcagcatattttgactccatgaagatcccttcaggacagcctgagacagcagatgtgtccagggagcaagtggacaaggaattggacagggcaagtaactccctgatttctggactgagtcaagatgaggaggaccctccgctgcccccgacgcccatgaacagcttggtggatgagtgccctctagatcaggggctgcctaaactctctgctgaggccgtcttcgagaagtgcagtcagatctcactgtcacagtctaccacagcctccctgtccaagaagtgactgttgagaggcgaggaggtagtgggtgaggctacctgactcacttcaaatgcatgttttgagatgtttggagattcagcaattctgtcttcattgctccaggatctggtatactgttctcataaaactgagaggagaaaaaaagtgaaagaaagcagctgctttaagaatggttttccaccttttccccctaatctctaccaatcagacacattttattatttaaatctgcacctctctctattttatttgccaggggcacgatgtgacatatctgcagtcccagcacagtgggacaaaaagaatttagaccccaaaagtgtcctcggcatggatcttgaacagaaccagtatctgtcatggaactgaacattcatcgatggtctccatgtattcatttattcacttgttcattcaagtatttattgaatacctgcctcaagctagagagaaaagagagtgcgctttggaaatttattccagttttcagcctacagcagattatcagctcggtgacttttctttctgccaccatttaggtgatggtgtttgattcagagatggctgaatttctattcttagcttattgtgactgtttcagatctagtttgggaacagattagaggccattgtcttctgtcctgatcaggtggcctggctgtttctttggatccctctgtcccagagccacccagaaccctgactcttgagaatcaagaaaacacccagaaaggccttaatgacctcataggcactcttccaaaaagacaacagaactggaatgagaggcctgggtctgtctcctgccttagcaggcctatcaatttcttgtcaatctctttttttccttgctcacattaaaaggaagcatggagttctaatgctcccataaactatgtattttggcaagacacttcactactccaggtctcactttccccatctgtaaaacagggtttggactaggtgttccctggtattctgtgatctgcctcttgctgccattctttctctcctctgcttctctgtatttttcttctgttatccctgggggtgctcaggttcacttgattgtctgtatttctgtgtggttgtagcaaggactcagcctcatgtagcacgaataggggtgtggttcatggcgtgttgacccagcagagcactccctcccactaacttgttctgcatgtgtagagtctccccattttttttaacgcaaccctttcccctttttcctaccccacagctctgttccatgtaagttgccaacagtttcactgaacagtggggtatgtgatggttttggcatgacatcttcagtatgagggggacagtttgacttcactttgagggtgtgatgtctgtagctatgtggaaggtaaaaatagtggtgtgatcatgaaccaaaggaatttatgttttgtaacttgggtactttattttgcattttgttatactattaaataattttttcctgtt

SEQ ID NO: 17831 - DNA, 2676 bp, Homo sapiens
ccggtaagattggacctctccggaagattgacgagtcccgacctctacatgttgtgctgggaaatgaagcctgtgatttggactccacagtgtctgctcttgccctggctttttacctagcaaagacaactgaggctgaggaagtctttgtgccagttttaaatataaaacgttctgaactacctctgcgaggtgacattgtcttctttcttcagaaggttcatattccagagagtatcttgatttttcgggatgagattgacctccatgcattataccaggctggccaactcaccctcatccttgtcgaccatcatatcttatccaaaagtgacacagccctagaggaggcagtagcagaggtgctagaccatcgacccatcgagccgaaacactgccctccctgccatgtttcagttgagctggtggggtcctgtgctaccctggtgaccgagagaatcctgcagggggcaccagagatcttggacaggcaaactgcagcccttctgcatggaaccatcatcctggactgtgtcaacatggaccttaaaattggaaaggcaaccccaaaggacagcaaatatgtggagaaactagaggcccttttcccagacctacccaagagaaatgatatatttgattccctacaaaaggcaaagtttgatgtatcagggactgaccactgagcagatgctgagaaaagaccagaagactatctatagacaaggcgtcaaggtggccattagtgcaatatatatggatttggagatctgtgaagtcctggaacgctcccactctccacccctgaagctgacccctgcctcaagtacccaccctaacctccatgcctatcttcaaggcaacacccaggtctctcgaaagaaacttctgcccctgctccaggaagccctgtcagcatattttgactccatgaagatcccttcaggacagcctgagacagcagatgtgtccagggagcaagtggacaaggaattggacagggcaagtaactccctgatttctggactgagtcaagatgaggaggaccctccgctgcccccgacgcccatgaacagcttggtggatgagtgccctctagatcaggggctgcctaaactctctgctgaggccgtcttcgagaagtgcagtcagatctcactgtcacagtctaccacagcctccctgtccaagaagtgactgttgagaggcgaggaggtagtgggtgaggctacctgactcacttcaaatgcatgttttgagatgtttggagattcagcaattctgtcttcattgctccaggatctggtatactgttctcataaaactgagaggagaaaaaaagtgaaagaaagcagctgctttaagaatggttttccaccttttccccctaatctctaccaatcagacacattttattatttaaatctgcacctctctctattttatttgccaggggcacgatgtgacatatctgcagtcccagcacagtgggacaaaaagaatttagaccccaaaagtgtcctcggcatggatcttgaacagaaccagtatctgtcatggaactgaacattcatcgatggtctccatgtattcatttattcacttgttcattcaagtatttattgaatacctgcctcaagctagagagaaaagagagtgcgctttggaaatttattccagttttcagcctacagcagattatcagctcggtgacttttctttctgccaccatttaggtgatggtgtttgattcagagatggctgaatttctattcttagcttattgtgactgtttcagatctagtttgggaacagattagaggccattgtcttctgtcctgatcaggtggcctggctgtttctttggatccctctgtcccagagccacccagaaccctgactcttgagaatcaagaaaacacccagaaaggccttaatgacctcataggcactcttccaaaaagacaacagaactggaatgagaggcctgggtctgtctcctgccttagcaggcctatcaatttcttgtcaatctctttttttccttgctcacattaaaaggaagcatggagttctaatgctcccataaactatgtattttggcaagacacttcactactccaggtctcactttccccatctgtaaaacagggtttggactaggtgttccctggtattctgtgatctgcctcttgctgccattctttctctcctctgcttctctgtatttttcttctgttatccctgggggtgctcaggttcacttgattgtctgtatttctgtgtggttgtagcaaggactcagcctcatgtagcacgaataggggtgtggttcatggcgtgttgacccagcagagcactccctcccactaacttgttctgcatgtgtagagtctccccattttttttaacgcaaccctttcccctttttcctaccccacagctctgttccatgtaagttgccaacagtttcactgaacagtggggtatgtgatggttttggcatgacatcttcagtatgagggggacagtttgacttcactttgagggtgtgatgtctgtagctatgtggaaggtaaaaatagtggtgtgatcatgaaccaaaggaatttatgttttgtaacttgggtactttattttgcattttgttatactattaaataattttttcctgtt

SEQ ID NO: 17832 - DNA, 2419 bp, Homo sapiens
cgctgggggcggggcgacgccggactccggagcgcccgcttacgcagttcctcccggggtcggaggccgattcgccgtgtggcgggttcgagtcccgcctcctgactctggcctctagtccctgagtcccgggcgggctgcattcgtcggggaaacctctcctcgaccaggggcacctctactcgaccaggggcgacggcgtactttgggcttcatcatggaggactacctgcagggttgtcgagctgctctgcaggaaccatcatcctggactgtgtcaacatggaccttaaaattggaaaggcaaccccaaaggacagcaaatatgtggagaaactagaggcccttttcccagacctacccaagagaaatgatatatttgattccctacaaaaggcaaagtttgatgtatcagggactgaccactgagcagatgctgagaaaagaccagaagactatctatagacaaggcgtcaaggtggccattagtgcaatatatatggatttggagatctgtgaagtcctggaacgctcccactctccacccctgaagctgacccctgcctcaagtacccaccctaacctccatgcctatcttcaaggcaacacccaggtctctcgaaagaaacttctgcccctgctccaggaagccctgtcagcatattttgactccatgaagatcccttcaggacagcctgagacagcagatgtgtccagggagcaagtggacaaggaattggacagggcaagtaactccctgatttctggactgagtcaagatgaggaggaccctccgctgcccccgacgcccatgaacagcttggtggatgagtgccctctagatcaggggctgcctaaactctctgctgaggccgtcttcgagaagtgcagtcagatctcactgtcacagtctaccacagcctccctgtccaagaagtgactgttgagaggcgaggaggtagtgggtgaggctacctgactcacttcaaatgcatgttttgagatgtttggagattcagcaattctgtcttcattgctccaggatctggtatactgttctcataaaactgagaggagaaaaaaagtgaaagaaagcagctgctttaagaatggttttccaccttttccccctaatctctaccaatcagacacattttattatttaaatctgcacctctctctattttatttgccaggggcacgatgtgacatatctgcagtcccagcacagtgggacaaaaagaatttagaccccaaaagtgtcctcggcatggatcttgaacagaaccagtatctgtcatggaactgaacattcatcgatggtctccatgtattcatttattcacttgttcattcaagtatttattgaatacctgcctcaagctagagagaaaagagagtgcgctttggaaatttattccagttttcagcctacagcagattatcagctcggtgacttttctttctgccaccatttaggtgatggtgtttgattcagagatggctgaatttctattcttagcttattgtgactgtttcagatctagtttgggaacagattagaggccattgtcttctgtcctgatcaggtggcctggctgtttctttggatccctctgtcccagagccacccagaaccctgactcttgagaatcaagaaaacacccagaaaggccttaatgacctcataggcactcttccaaaaagacaacagaactggaatgagaggcctgggtctgtctcctgccttagcaggcctatcaatttcttgtcaatctctttttttccttgctcacattaaaaggaagcatggagttctaatgctcccataaactatgtattttggcaagacacttcactactccaggtctcactttccccatctgtaaaacagggtttggactaggtgttccctggtattctgtgatctgcctcttgctgccattctttctctcctctgcttctctgtatttttcttctgttatccctgggggtgctcaggttcacttgattgtctgtatttctgtgtggttgtagcaaggactcagcctcatgtagcacgaataggggtgtggttcatggcgtgttgacccagcagagcactccctcccactaacttgttctgcatgtgtagagtctccccattttttttaacgcaaccctttcccctttttcctaccccacagctctgttccatgtaagttgccaacagtttcactgaacagtggggtatgtgatggttttggcatgacatcttcagtatgagggggacagtttgacttcactttgagggtgtgatgtctgtagctatgtggaaggtaaaaatagtggtgtgatcatgaaccaaaggaatttatgttttgtaacttgggtactttattttgcattttgttatactattaaataattttttcctgtt

SEQ ID NO: 17833 - DNA, 3151 bp, Homo sapiens
cgctgggggcggggcgacgccggactccggagcgcccgcttacgcagttcctcccggggtcggaggccgattcgccgtgtggcgggttcgagtcccgcctcctgactctggcctctagtccctgagtcccgggcgggctgcattcgtcggggaaacctctcctcgaccaggggcacctctactcgaccaggggcgacggcgtactttgggcttcatcatggaggactacctgcagggttgtcgagctgctctgcaggagtcccgacctctacatgttgtgctgggaaatgaagcctgtgatttggactccacagtgtctgctcttgccctggctttttacctagcaaagacaactgaggctgaggaagtctttgtgccagttttaaatataaaacgttctgaactacctctgcgaggtgacattgtcttctttcttcagaaggttcatattccagagagtatcttgatttttcgggatgagattgacctccatgcattataccaggctggccaactcaccctcatccttgtcgaccatcatatcttatccaaaagtgacacagccctagaggaggcagtagcagaggtgctagaccatcgacccatcgagccgaaacactgccctccctgccatgtttcagttgagctggtggggtcctgtgctaccctggtgaccgagagaatcctgcagggggcaccagagatcttggacaggcaaactgcagcccttctgcatggaaccatcatcctggactgtgtcaacatggaccttaaaattggaaaggcaaccccaaaggacagcaaatatgtggagaaactagaggcccttttcccagacctacccaagagaaatgatatatttgattccctacaaaaggcaaagtttgatgtatcaggactgaccactgagcagatgctgagaaaagaccagaagactatctatagacaaggcgtcaaggtggccattagtgcaatatatatggatttggaggcctttctgcagaggtctaacctccttgcagatctccatgctttctgccaggctcacagctatgatgtcctggttgccatgactatctttttcaacactcacaatgagccagtgcggcagttggctattttctgtccccatgtggcactccaaacaacgggacagagtctcgctatgttgcccaggctggtctcgaactcctggactcaagtgatccaccagcctcagcttcccagagttctggaattgcagatctgtgaagtcctggaacgctcccactctccacccctgaagctgacccctgcctcaagtacccaccctaacctccatgcctatcttcaaggcaacacccaggtctctcgaaagaaacttctgcccctgctccaggaagccctgtcagcatattttgactccatgaagatcccttcaggacagcctgagacagcagatgtgtccagggagcaagtggacaaggaattggacagggcaagtaactccctgatttctggactgagtcaagatgaggaggaccctccgctgcccccgacgcccatgaacagcttggtggatgagtgccctctagatcaggggctgcctaaactctctgctgaggccgtcttcgagaagtgcagtcagatctcactgtcacagtctaccacagcctccctgtccaagaagtgactgttgagaggcgaggaggtagtgggtgaggctacctgactcacttcaaatgcatgttttgagatgtttggagattcagcaattctgtcttcattgctccaggatctggtatactgttctcataaaactgagaggagaaaaaaagtgaaagaaagcagctgctttaagaatggttttccaccttttccccctaatctctaccaatcagacacattttattatttaaatctgcacctctctctattttatttgccaggggcacgatgtgacatatctgcagtcccagcacagtgggacaaaaagaatttagaccccaaaagtgtcctcggcatggatcttgaacagaaccagtatctgtcatggaactgaacattcatcgatggtctccatgtattcatttattcacttgttcattcaagtatttattgaatacctgcctcaagctagagagaaaagagagtgcgctttggaaatttattccagttttcagcctacagcagattatcagctcggtgacttttctttctgccaccatttaggtgatggtgtttgattcagagatggctgaatttctattcttagcttattgtgactgtttcagatctagtttgggaacagattagaggccattgtcttctgtcctgatcaggtggcctggctgtttctttggatccctctgtcccagagccacccagaaccctgactcttgagaatcaagaaaacacccagaaaggccttaatgacctcataggcactcttccaaaaagacaacagaactggaatgagaggcctgggtctgtctcctgccttagcaggcctatcaatttcttgtcaatctctttttttccttgctcacattaaaaggaagcatggagttctaatgctcccataaactatgtattttggcaagacacttcactactccaggtctcactttccccatctgtaaaacagggtttggactaggtgttccctggtattctgtgatctgcctcttgctgccattctttctctcctctgcttctctgtatttttcttctgttatccctgggggtgctcaggttcacttgattgtctgtatttctgtgtggttgtagcaaggactcagcctcatgtagcacgaataggggtgtggttcatggcgtgttgacccagcagagcactccctcccactaacttgttctgcatgtgtagagtctccccattttttttaacgcaaccctttcccctttttcctaccccacagctctgttccatgtaagttgccaacagtttcactgaacagtggggtatgtgatggttttggcatgacatcttcagtatgagggggacagtttgacttcactttgagggtgtgatgtctgtagctatgtggaaggtaaaaatagtggtgtgatcatgaaccaaaggaatttatgttttgtaacttgggtactttattttgcattttgttatactattaaataattttttcctgtt

SEQ ID NO: 17834 - DNA, 2968 bp, Homo sapiens
cgctgggggcggggcgacgccggactccggagcgcccgcttacgcagttcctcccggggtcggaggccgattcgccgtgtggcgggttcgagtcccgcctcctgactctggcctctagtccctgagtcccgggcgggctgcattcgtcggggaaacctctcctcgaccaggggcacctctactcgaccaggggcgacggcgtactttgggcttcatcatggaggactacctgcagggttgtcgagctgctctgcaggagtcccgacctctacatgttgtgctgggaaatgaagcctgtgatttggactccacagtgtctgctcttgccctggctttttacctagcaaagaaggttcatattccagagagtatcttgatttttcgggatgagattgacctccatgcattataccaggctggccaactcaccctcatccttgtcgaccatcatatcttatccaaaagtgacacagccctagaggaggcagtagcagaggtgctagaccatcgacccatcgagccgaaacactgccctccctgccatgtttcagttgagctggtggggtcctgtgctaccctggtgaccgagagaatcctgcagggggcaccagagatcttggacaggcaaactgcagcccttctgcatggaaccatcatcctggactgtgtcaacatggaccttaaaattggaaaggcaaccccaaaggacagcaaatatgtggagaaactagaggcccttttcccagacctacccaagagaaatgatatatttgattccctacaaaaggcaaagtttgatgtatcaggactgaccactgagcagatgctgagaaaagaccagaagactatctatagacaaggcgtcaaggtggccattagtgcaatatatatggatttggaggcctttctgcagaggtctaacctccttgcagatctccatgctttctgccaggctcacagctatgatgtcctggttgccatgactatctttttcaacactcacaatgagccagtgcggcagttggctattttctgtccccatgtggcactccaaacaacgatctgtgaagtcctggaacgctcccactctccacccctgaagctgacccctgcctcaagtacccaccctaacctccatgcctatcttcaaggcaacacccaggtctctcgaaagaaacttctgcccctgctccaggaagccctgtcagcatattttgactccatgaagatcccttcaggacagcctgagacagcagatgtgtccagggagcaagtggacaaggaattggacagggcaagtaactccctgatttctggactgagtcaagatgaggaggaccctccgctgcccccgacgcccatgaacagcttggtggatgagtgccctctagatcaggggctgcctaaactctctgctgaggccgtcttcgagaagtgcagtcagatctcactgtcacagtctaccacagcctccctgtccaagaagtgactgttgagaggcgaggaggtagtgggtgaggctacctgactcacttcaaatgcatgttttgagatgtttggagattcagcaattctgtcttcattgctccaggatctggtatactgttctcataaaactgagaggagaaaaaaagtgaaagaaagcagctgctttaagaatggttttccaccttttccccctaatctctaccaatcagacacattttattatttaaatctgcacctctctctattttatttgccaggggcacgatgtgacatatctgcagtcccagcacagtgggacaaaaagaatttagaccccaaaagtgtcctcggcatggatcttgaacagaaccagtatctgtcatggaactgaacattcatcgatggtctccatgtattcatttattcacttgttcattcaagtatttattgaatacctgcctcaagctagagagaaaagagagtgcgctttggaaatttattccagttttcagcctacagcagattatcagctcggtgacttttctttctgccaccatttaggtgatggtgtttgattcagagatggctgaatttctattcttagcttattgtgactgtttcagatctagtttgggaacagattagaggccattgtcttctgtcctgatcaggtggcctggctgtttctttggatccctctgtcccagagccacccagaaccctgactcttgagaatcaagaaaacacccagaaaggccttaatgacctcataggcactcttccaaaaagacaacagaactggaatgagaggcctgggtctgtctcctgccttagcaggcctatcaatttcttgtcaatctctttttttccttgctcacattaaaaggaagcatggagttctaatgctcccataaactatgtattttggcaagacacttcactactccaggtctcactttccccatctgtaaaacagggtttggactaggtgttccctggtattctgtgatctgcctcttgctgccattctttctctcctctgcttctctgtatttttcttctgttatccctgggggtgctcaggttcacttgattgtctgtatttctgtgtggttgtagcaaggactcagcctcatgtagcacgaataggggtgtggttcatggcgtgttgacccagcagagcactccctcccactaacttgttctgcatgtgtagagtctccccattttttttaacgcaaccctttcccctttttcctaccccacagctctgttccatgtaagttgccaacagtttcactgaacagtggggtatgtgatggttttggcatgacatcttcagtatgagggggacagtttgacttcactttgagggtgtgatgtctgtagctatgtggaaggtaaaaatagtggtgtgatcatgaaccaaaggaatttatgttttgtaacttgggtactttattttgcattttgttatactattaaataattttttcctgtt

SEQ ID NO: 17835 - DNA, 2462 bp, Homo sapiens
cacacgaagtatgtaccaggccggtcaccgtttttatttccatgaccgggacggggcttagttgtagattcctggccccgggccgtacatgttattcgtcggggaaacctctcctcgaccaggggcacctctactcgaccaggggcgacggcgtactttgggcttcatcatggaggactacctgcagggttgtcgagctgctctgcaggagtcccgacctctacatgttgtgctgggaaatgaagcctgtgatttggactccacagtgtctgctcttgccctggctttttacctagcaaagactgaccactgagcagatgctgagaaaagaccagaagactatctatagacaaggcgtcaaggtggccattagtgcaatatatatggatttggaggcctttctgcagaggtctaacctccttgcagatctccatgctttctgccaggctcacagctatgatgtcctggttgccatgactatctttttcaacactcacaatgagccagtgcggcagttggctattttctgtccccatgtggcactccaaacaacgatctgtgaagtcctggaacgctcccactctccacccctgaagctgacccctgcctcaagtacccaccctaacctccatgcctatcttcaaggcaacacccaggtctctcgaaagaaacttctgcccctgctccaggaagccctgtcagcatattttgactccatgaagatcccttcaggacagcctgagacagcagatgtgtccagggagcaagtggacaaggaattggacagggcaagtaactccctgatttctggactgagtcaagatgaggaggaccctccgctgcccccgacgcccatgaacagcttggtggatgagtgccctctagatcaggggctgcctaaactctctgctgaggccgtcttcgagaagtgcagtcagatctcactgtcacagtctaccacagcctccctgtccaagaagtgactgttgagaggcgaggaggtagtgggtgaggctacctgactcacttcaaatgcatgttttgagatgtttggagattcagcaattctgtcttcattgctccaggatctggtatactgttctcataaaactgagaggagaaaaaaagtgaaagaaagcagctgctttaagaatggttttccaccttttccccctaatctctaccaatcagacacattttattatttaaatctgcacctctctctattttatttgccaggggcacgatgtgacatatctgcagtcccagcacagtgggacaaaaagaatttagaccccaaaagtgtcctcggcatggatcttgaacagaaccagtatctgtcatggaactgaacattcatcgatggtctccatgtattcatttattcacttgttcattcaagtatttattgaatacctgcctcaagctagagagaaaagagagtgcgctttggaaatttattccagttttcagcctacagcagattatcagctcggtgacttttctttctgccaccatttaggtgatggtgtttgattcagagatggctgaatttctattcttagcttattgtgactgtttcagatctagtttgggaacagattagaggccattgtcttctgtcctgatcaggtggcctggctgtttctttggatccctctgtcccagagccacccagaaccctgactcttgagaatcaagaaaacacccagaaaggccttaatgacctcataggcactcttccaaaaagacaacagaactggaatgagaggcctgggtctgtctcctgccttagcaggcctatcaatttcttgtcaatctctttttttccttgctcacattaaaaggaagcatggagttctaatgctcccataaactatgtattttggcaagacacttcactactccaggtctcactttccccatctgtaaaacagggtttggactaggtgttccctggtattctgtgatctgcctcttgctgccattctttctctcctctgcttctctgtatttttcttctgttatccctgggggtgctcaggttcacttgattgtctgtatttctgtgtggttgtagcaaggactcagcctcatgtagcacgaataggggtgtggttcatggcgtgttgacccagcagagcactccctcccactaacttgttctgcatgtgtagagtctccccattttttttaacgcaaccctttcccctttttcctaccccacagctctgttccatgtaagttgccaacagtttcactgaacagtggggtatgtgatggttttggcatgacatcttcagtatgagggggacagtttgacttcactttgagggtgtgatgtctgtagctatgtggaaggtaaaaatagtggtgtgatcatgaaccaaaggaatttatgttttgtaacttgggtactttattttgcattttgttatactattaaataattttttcctgtt

SEQ ID NO: 17836 - DNA, 2623 bp, Homo sapiens
cgctgggggcggggcgacgccggactccggagcgcccgcttacgcagttcctcccggggtcggaggccgattcgccgtgtggcgggttcgagtcccgcctcctgactctggcctctagtccctgagtcccgggcgggctgcattcgtcggggaaacctctcctcgaccaggggcacctctactcgaccaggggcgacggcgtactttgggcttcatcatggaggactacctgcagggttgtcgagctgctctgcaggagtcccgacctctacatgttgtgctgggaaatgaagcctgtgatttggactccacagtgtctgctcttgccctggctttttacctagcaaagaaggttcatattccagagagtatcttgatttttcgggatgagattgacctccatgcattataccaggctggccaactcaccctcatccttgtcgaccatcatatcttatccaaactgaccactgagcagatgctgagaaaagaccagaagactatctatagacaaggcgtcaaggtggccattagtgcaatatatatggatttggaggcctttctgcagaggtctaacctccttgcagatctccatgctttctgccaggctcacagctatgatgtcctggttgccatgactatctttttcaacactcacaatgagccagtgcggcagttggctattttctgtccccatgtggcactccaaacaacgatctgtgaagtcctggaacgctcccactctccacccctgaagctgacccctgcctcaagtacccaccctaacctccatgcctatcttcaaggcaacacccaggtctctcgaaagaaacttctgcccctgctccaggaagccctgtcagcatattttgactccatgaagatcccttcaggacagcctgagacagcagatgtgtccagggagcaagtggacaaggaattggacagggcaagtaactccctgatttctggactgagtcaagatgaggaggaccctccgctgcccccgacgcccatgaacagcttggtggatgagtgccctctagatcaggggctgcctaaactctctgctgaggccgtcttcgagaagtgcagtcagatctcactgtcacagtctaccacagcctccctgtccaagaagtgactgttgagaggcgaggaggtagtgggtgaggctacctgactcacttcaaatgcatgttttgagatgtttggagattcagcaattctgtcttcattgctccaggatctggtatactgttctcataaaactgagaggagaaaaaaagtgaaagaaagcagctgctttaagaatggttttccaccttttccccctaatctctaccaatcagacacattttattatttaaatctgcacctctctctattttatttgccaggggcacgatgtgacatatctgcagtcccagcacagtgggacaaaaagaatttagaccccaaaagtgtcctcggcatggatcttgaacagaaccagtatctgtcatggaactgaacattcatcgatggtctccatgtattcatttattcacttgttcattcaagtatttattgaatacctgcctcaagctagagagaaaagagagtgcgctttggaaatttattccagttttcagcctacagcagattatcagctcggtgacttttctttctgccaccatttaggtgatggtgtttgattcagagatggctgaatttctattcttagcttattgtgactgtttcagatctagtttgggaacagattagaggccattgtcttctgtcctgatcaggtggcctggctgtttctttggatccctctgtcccagagccacccagaaccctgactcttgagaatcaagaaaacacccagaaaggccttaatgacctcataggcactcttccaaaaagacaacagaactggaatgagaggcctgggtctgtctcctgccttagcaggcctatcaatttcttgtcaatctctttttttccttgctcacattaaaaggaagcatggagttctaatgctcccataaactatgtattttggcaagacacttcactactccaggtctcactttccccatctgtaaaacagggtttggactaggtgttccctggtattctgtgatctgcctcttgctgccattctttctctcctctgcttctctgtatttttcttctgttatccctgggggtgctcaggttcacttgattgtctgtatttctgtgtggttgtagcaaggactcagcctcatgtagcacgaataggggtgtggttcatggcgtgttgacccagcagagcactccctcccactaacttgttctgcatgtgtagagtctccccattttttttaacgcaaccctttcccctttttcctaccccacagctctgttccatgtaagttgccaacagtttcactgaacagtggggtatgtgatggttttggcatgacatcttcagtatgagggggacagtttgacttcactttgagggtgtgatgtctgtagctatgtggaaggtaaaaatagtggtgtgatcatgaaccaaaggaatttatgttttgtaacttgggtactttattttgcattttgttatactattaaataattttttcctgtt

SEQ ID NO: 17837 - DNA, 2510 bp, Homo sapiens
cgctgggggcggggcgacgccggactccggagcgcccgcttacgcagttcctcccggggtcggaggccgattcgccgtgtggcgggttcgagtcccgcctcctgactctggcctctagtccctgagtcccgggcgggctgcattcgtcggggaaacctctcctcgaccaggggcacctctactcgaccaggggcgacggcgtactttgggcttcatcatggaggactacctgcagggttgtcgagctgctctgcaggagtcccgacctctacatgttgtgctgggaaatgaagcctgtgatttggactccacagtgtctgctcttgccctggctttttacctagcaaagactgaccactgagcagatgctgagaaaagaccagaagactatctatagacaaggcgtcaaggtggccattagtgcaatatatatggatttggaggcctttctgcagaggtctaacctccttgcagatctccatgctttctgccaggctcacagctatgatgtcctggttgccatgactatctttttcaacactcacaatgagccagtgcggcagttggctattttctgtccccatgtggcactccaaacaacgatctgtgaagtcctggaacgctcccactctccacccctgaagctgacccctgcctcaagtacccaccctaacctccatgcctatcttcaaggcaacacccaggtctctcgaaagaaacttctgcccctgctccaggaagccctgtcagcatattttgactccatgaagatcccttcaggacagcctgagacagcagatgtgtccagggagcaagtggacaaggaattggacagggcaagtaactccctgatttctggactgagtcaagatgaggaggaccctccgctgcccccgacgcccatgaacagcttggtggatgagtgccctctagatcaggggctgcctaaactctctgctgaggccgtcttcgagaagtgcagtcagatctcactgtcacagtctaccacagcctccctgtccaagaagtgactgttgagaggcgaggaggtagtgggtgaggctacctgactcacttcaaatgcatgttttgagatgtttggagattcagcaattctgtcttcattgctccaggatctggtatactgttctcataaaactgagaggagaaaaaaagtgaaagaaagcagctgctttaagaatggttttccaccttttccccctaatctctaccaatcagacacattttattatttaaatctgcacctctctctattttatttgccaggggcacgatgtgacatatctgcagtcccagcacagtgggacaaaaagaatttagaccccaaaagtgtcctcggcatggatcttgaacagaaccagtatctgtcatggaactgaacattcatcgatggtctccatgtattcatttattcacttgttcattcaagtatttattgaatacctgcctcaagctagagagaaaagagagtgcgctttggaaatttattccagttttcagcctacagcagattatcagctcggtgacttttctttctgccaccatttaggtgatggtgtttgattcagagatggctgaatttctattcttagcttattgtgactgtttcagatctagtttgggaacagattagaggccattgtcttctgtcctgatcaggtggcctggctgtttctttggatccctctgtcccagagccacccagaaccctgactcttgagaatcaagaaaacacccagaaaggccttaatgacctcataggcactcttccaaaaagacaacagaactggaatgagaggcctgggtctgtctcctgccttagcaggcctatcaatttcttgtcaatctctttttttccttgctcacattaaaaggaagcatggagttctaatgctcccataaactatgtattttggcaagacacttcactactccaggtctcactttccccatctgtaaaacagggtttggactaggtgttccctggtattctgtgatctgcctcttgctgccattctttctctcctctgcttctctgtatttttcttctgttatccctgggggtgctcaggttcacttgattgtctgtatttctgtgtggttgtagcaaggactcagcctcatgtagcacgaataggggtgtggttcatggcgtgttgacccagcagagcactccctcccactaacttgttctgcatgtgtagagtctccccattttttttaacgcaaccctttcccctttttcctaccccacagctctgttccatgtaagttgccaacagtttcactgaacagtggggtatgtgatggttttggcatgacatcttcagtatgagggggacagtttgacttcactttgagggtgtgatgtctgtagctatgtggaaggtaaaaatagtggtgtgatcatgaaccaaaggaatttatgttttgtaacttgggtactttattttgcattttgttatactattaaataattttttcctgtt

SEQ ID NO: 17838 - DNA, 2206 bp, Homo sapiens
ccaagctgaattctactcccaaaggccaaagtttgatgtatcaggactgaccactgagcagatgctgagaaaagaccagaagactatctatagacaaggcgtcaaggtggccattagtgcaatatatatggatttggaggcctttctgcagaggtctaacctccttgcagatctccatgctttctgccaggctcacagctatgatgtcctggttgccatgactatctttttcaacactcacaatgagccagtgcggcagttggctattttctgtccccatgtggcactccaaacaacgatctgtgaagtcctggaacgctcccactctccacccctgaagctgacccctgcctcaagtacccaccctaacctccatgcctatcttcaaggcaacacccaggtctctcgaaagaaacttctgcccctgctccaggaagccctgtcagcatattttgactccatgaagatcccttcaggacagcctgagacagcagatgtgtccagggagcaagtggacaaggaattggacagggcaagtaactccctgatttctggactgagtcaagatgaggaggaccctccgctgcccccgacgcccatgaacagcttggtggatgagtgccctctagatcaggggctgcctaaactctctgctgaggccgtcttcgagaagtgcagtcagatctcactgtcacagtctaccacagcctccctgtccaagaagtgactgttgagaggcgaggaggtagtgggtgaggctacctgactcacttcaaatgcatgttttgagatgtttggagattcagcaattctgtcttcattgctccaggatctggtatactgttctcataaaactgagaggagaaaaaaagtgaaagaaagcagctgctttaagaatggttttccaccttttccccctaatctctaccaatcagacacattttattatttaaatctgcacctctctctattttatttgccaggggcacgatgtgacatatctgcagtcccagcacagtgggacaaaaagaatttagaccccaaaagtgtcctcggcatggatcttgaacagaaccagtatctgtcatggaactgaacattcatcgatggtctccatgtattcatttattcacttgttcattcaagtatttattgaatacctgcctcaagctagagagaaaagagagtgcgctttggaaatttattccagttttcagcctacagcagattatcagctcggtgacttttctttctgccaccatttaggtgatggtgtttgattcagagatggctgaatttctattcttagcttattgtgactgtttcagatctagtttgggaacagattagaggccattgtcttctgtcctgatcaggtggcctggctgtttctttggatccctctgtcccagagccacccagaaccctgactcttgagaatcaagaaaacacccagaaaggccttaatgacctcataggcactcttccaaaaagacaacagaactggaatgagaggcctgggtctgtctcctgccttagcaggcctatcaatttcttgtcaatctctttttttccttgctcacattaaaaggaagcatggagttctaatgctcccataaactatgtattttggcaagacacttcactactccaggtctcactttccccatctgtaaaacagggtttggactaggtgttccctggtattctgtgatctgcctcttgctgccattctttctctcctctgcttctctgtatttttcttctgttatccctgggggtgctcaggttcacttgattgtctgtatttctgtgtggttgtagcaaggactcagcctcatgtagcacgaataggggtgtggttcatggcgtgttgacccagcagagcactccctcccactaacttgttctgcatgtgtagagtctccccattttttttaacgcaaccctttcccctttttcctaccccacagctctgttccatgtaagttgccaacagtttcactgaacagtggggtatgtgatggttttggcatgacatcttcagtatgagggggacagtttgacttcactttgagggtgtgatgtctgtagctatgtggaaggtaaaaatagtggtgtgatcatgaaccaaaggaatttatgttttgtaacttgggtactttattttgcattttgttatactattaaataattttttcctgtt

SEQ ID NO: 17839 - DNA, 2555 bp, Homo sapiens
cgctgggggcggggcgacgccggactccggagcgcccgcttacgcagttcctcccggggtcggaggccgattcgccgtgtggcgggttcgagtcccgcctcctgactctggcctctagtccctgagtcccgggcgggctgcattcgtcggggaaacctctcctcgaccaggggcacctctactcgaccaggggcgacggcgtactttgggcttcatcatggaggactacctgcagggttgtcgagctgctctgcaggagtcccgacctctacatgttgtgctgggaaatgaagcctgtgatttggactccacagtgtctgctcttgccctggctttttacctagcaaagacaactgaggctgaggaagtctttgtgccagttttaaatataaaacgttctgaactacctctgcgaggtgacattgtcttctttcttcagaaggttcatattccagagagtatcttgatttttcgggatgagattgacctccatgcattataccaggctggccaactcaccctcatccttgtcgaccatcatatcttatccaagactgaccactgagcagatgctgagaaaagaccagaagactatctatagacaaggcgtcaaggtggccattagtgcaatatatatggatttggagatctgtgaagtcctggaacgctcccactctccacccctgaagctgacccctgcctcaagtacccaccctaacctccatgcctatcttcaaggcaacacccaggtctctcgaaagaaacttctgcccctgctccaggaagccctgtcagcatattttgactccatgaagatcccttcaggacagcctgagacagcagatgtgtccagggagcaagtggacaaggaattggacagggcaagtaactccctgatttctggactgagtcaagatgaggaggaccctccgctgcccccgacgcccatgaacagcttggtggatgagtgccctctagatcaggggctgcctaaactctctgctgaggccgtcttcgagaagtgcagtcagatctcactgtcacagtctaccacagcctccctgtccaagaagtgactgttgagaggcgaggaggtagtgggtgaggctacctgactcacttcaaatgcatgttttgagatgtttggagattcagcaattctgtcttcattgctccaggatctggtatactgttctcataaaactgagaggagaaaaaaagtgaaagaaagcagctgctttaagaatggttttccaccttttccccctaatctctaccaatcagacacattttattatttaaatctgcacctctctctattttatttgccaggggcacgatgtgacatatctgcagtcccagcacagtgggacaaaaagaatttagaccccaaaagtgtcctcggcatggatcttgaacagaaccagtatctgtcatggaactgaacattcatcgatggtctccatgtattcatttattcacttgttcattcaagtatttattgaatacctgcctcaagctagagagaaaagagagtgcgctttggaaatttattccagttttcagcctacagcagattatcagctcggtgacttttctttctgccaccatttaggtgatggtgtttgattcagagatggctgaatttctattcttagcttattgtgactgtttcagatctagtttgggaacagattagaggccattgtcttctgtcctgatcaggtggcctggctgtttctttggatccctctgtcccagagccacccagaaccctgactcttgagaatcaagaaaacacccagaaaggccttaatgacctcataggcactcttccaaaaagacaacagaactggaatgagaggcctgggtctgtctcctgccttagcaggcctatcaatttcttgtcaatctctttttttccttgctcacattaaaaggaagcatggagttctaatgctcccataaactatgtattttggcaagacacttcactactccaggtctcactttccccatctgtaaaacagggtttggactaggtgttccctggtattctgtgatctgcctcttgctgccattctttctctcctctgcttctctgtatttttcttctgttatccctgggggtgctcaggttcacttgattgtctgtatttctgtgtggttgtagcaaggactcagcctcatgtagcacgaataggggtgtggttcatggcgtgttgacccagcagagcactccctcccactaacttgttctgcatgtgtagagtctccccattttttttaacgcaaccctttcccctttttcctaccccacagctctgttccatgtaagttgccaacagtttcactgaacagtggggtatgtgatggttttggcatgacatcttcagtatgagggggacagtttgacttcactttgagggtgtgatgtctgtagctatgtggaaggtaaaaatagtggtgtgatcatgaaccaaaggaatttatgttttgtaacttgggtactttattttgcattttgttatactattaaataattttttcctgtt

SEQ ID NO: 17840 - DNA, 2903 bp, Homo sapiens
cgctgggggcggggcgacgccggactccggagcgcccgcttacgcagttcctcccggggtcggaggccgattcgccgtgtggcgggttcgagtcccgcctcctgactctggcctctagtccctgagtcccgggcgggctgcattcgtcggggaaacctctcctcgaccaggggcacctctactcgaccaggggcgacggcgtactttgggcttcatcatggaggactacctgcagggttgtcgagctgctctgcaggagtcccgacctctacatgttgtgctgggaaatgaagcctgtgatttggactccacagtgtctgctcttgccctggctttttacctagcaaagacaactgaggctgaggaagtctttgtgccagttttaaatataaaacgttctgaactacctctgcgaggtgacattgtcttctttcttcagaaggttcatattccagagagtatcttgatttttcgggatgagattgacctccatgcattataccaggctggccaactcaccctcatccttgtcgaccatcatatcttatccaaaagtgacacagccctagaggaggcagtagcagaggtgctagaccatcgacccatcgagccgaaacactgccctccctgccatgtttcagttgagctggtggggtcctgtgctaccctggtgaccgagagaatcctgcagggggcaccagagatcttggacaggcaaactgcagcccttctgcatggaaccatcatcctggactgtgtcaacatggaccttaaaattggaaaggcaaccccaaaggacagcaaatatgtggagaaactagaggcccttttcccagacctacccaagagaaatgatatatttgattccctacaaaaggcaaagtttgatgtatcaggactgaccactgagcagatgctgagaaaagaccagaagactatctatagacaaggcgtcaaggtggccattagtgcaatatatatggatttggaggcctttctgcagaggtctaacctccttgcagatctccatgctttctgccaggctcacagctatgatgtcctggttgccatgactatctttttcaacactcacaatgagccagtgcggcagttggctattttctgtccccatgtggcactccaaacaacgtgactccatgaagatcccttcaggacagcctgagacagcagatgtgtccagggagcaagtggacaaggaattggacagggcaagtaactccctgatttctggactgagtcaagatgaggaggaccctccgctgcccccgacgcccatgaacagcttggtggatgagtgccctctagatcaggggctgcctaaactctctgctgaggccgtcttcgagaagtgcagtcagatctcactgtcacagtctaccacagcctccctgtccaagaagtgactgttgagaggcgaggaggtagtgggtgaggctacctgactcacttcaaatgcatgttttgagatgtttggagattcagcaattctgtcttcattgctccaggatctggtatactgttctcataaaactgagaggagaaaaaaagtgaaagaaagcagctgctttaagaatggttttccaccttttccccctaatctctaccaatcagacacattttattatttaaatctgcacctctctctattttatttgccaggggcacgatgtgacatatctgcagtcccagcacagtgggacaaaaagaatttagaccccaaaagtgtcctcggcatggatcttgaacagaaccagtatctgtcatggaactgaacattcatcgatggtctccatgtattcatttattcacttgttcattcaagtatttattgaatacctgcctcaagctagagagaaaagagagtgcgctttggaaatttattccagttttcagcctacagcagattatcagctcggtgacttttctttctgccaccatttaggtgatggtgtttgattcagagatggctgaatttctattcttagcttattgtgactgtttcagatctagtttgggaacagattagaggccattgtcttctgtcctgatcaggtggcctggctgtttctttggatccctctgtcccagagccacccagaaccctgactcttgagaatcaagaaaacacccagaaaggccttaatgacctcataggcactcttccaaaaagacaacagaactggaatgagaggcctgggtctgtctcctgccttagcaggcctatcaatttcttgtcaatctctttttttccttgctcacattaaaaggaagcatggagttctaatgctcccataaactatgtattttggcaagacacttcactactccaggtctcactttccccatctgtaaaacagggtttggactaggtgttccctggtattctgtgatctgcctcttgctgccattctttctctcctctgcttctctgtatttttcttctgttatccctgggggtgctcaggttcacttgattgtctgtatttctgtgtggttgtagcaaggactcagcctcatgtagcacgaataggggtgtggttcatggcgtgttgacccagcagagcactccctcccactaacttgttctgcatgtgtagagtctccccattttttttaacgcaaccctttcccctttttcctaccccacagctctgttccatgtaagttgccaacagtttcactgaacagtggggtatgtgatggttttggcatgacatcttcagtatgagggggacagtttgacttcactttgagggtgtgatgtctgtagctatgtggaaggtaaaaatagtggtgtgatcatgaaccaaaggaatttatgttttgtaacttgggtactttattttgcattttgttatactattaaataattttttcctgtt

SEQ ID NO: 17841 - DNA, 2512 bp, Homo sapiens
cgctgggggcggggcgacgccggactccggagcgcccgcttacgcagttcctcccggggtcggaggccgattcgccgtgtggcgggttcgagtcccgcctcctgactctggcctctagtccctgagtcccgggcgggctgcattcgtcggggaaacctctcctcgaccaggggcacctctactcgaccaggggcgacggcgtactttgggcttcatcatggaggactacctgcagggttgtcgagctgctctgcaggagtcccgacctctacatgttgtgctgggaaatgaagcctgtgatttggactccacagtgtctgctcttgccctggctttttacctagcaaaggaaccatcatcctggactgtgtcaacatggaccttaaaattggaaaggcaaccccaaaggacagcaaatatgtggagaaactagaggcccttttcccagacctacccaagagaaatgatatatttgattccctacaaaaggcaaagtttgatgtatcagggactgaccactgagcagatgctgagaaaagaccagaagactatctatagacaaggcgtcaaggtggccattagtgcaatatatatggatttggagatctgtgaagtcctggaacgctcccactctccacccctgaagctgacccctgcctcaagtacccaccctaacctccatgcctatcttcaaggcaacacccaggtctctcgaaagaaacttctgcccctgctccaggaagccctgtcagcatattttgactccatgaagatcccttcaggacagcctgagacagcagatgtgtccagggagcaagtggacaaggaattggacagggcaagtaactccctgatttctggactgagtcaagatgaggaggaccctccgctgcccccgacgcccatgaacagcttggtggatgagtgccctctagatcaggggctgcctaaactctctgctgaggccgtcttcgagaagtgcagtcagatctcactgtcacagtctaccacagcctccctgtccaagaagtgactgttgagaggcgaggaggtagtgggtgaggctacctgactcacttcaaatgcatgttttgagatgtttggagattcagcaattctgtcttcattgctccaggatctggtatactgttctcataaaactgagaggagaaaaaaagtgaaagaaagcagctgctttaagaatggttttccaccttttccccctaatctctaccaatcagacacattttattatttaaatctgcacctctctctattttatttgccaggggcacgatgtgacatatctgcagtcccagcacagtgggacaaaaagaatttagaccccaaaagtgtcctcggcatggatcttgaacagaaccagtatctgtcatggaactgaacattcatcgatggtctccatgtattcatttattcacttgttcattcaagtatttattgaatacctgcctcaagctagagagaaaagagagtgcgctttggaaatttattccagttttcagcctacagcagattatcagctcggtgacttttctttctgccaccatttaggtgatggtgtttgattcagagatggctgaatttctattcttagcttattgtgactgtttcagatctagtttgggaacagattagaggccattgtcttctgtcctgatcaggtggcctggctgtttctttggatccctctgtcccagagccacccagaaccctgactcttgagaatcaagaaaacacccagaaaggccttaatgacctcataggcactcttccaaaaagacaacagaactggaatgagaggcctgggtctgtctcctgccttagcaggcctatcaatttcttgtcaatctctttttttccttgctcacattaaaaggaagcatggagttctaatgctcccataaactatgtattttggcaagacacttcactactccaggtctcactttccccatctgtaaaacagggtttggactaggtgttccctggtattctgtgatctgcctcttgctgccattctttctctcctctgcttctctgtatttttcttctgttatccctgggggtgctcaggttcacttgattgtctgtatttctgtgtggttgtagcaaggactcagcctcatgtagcacgaataggggtgtggttcatggcgtgttgacccagcagagcactccctcccactaacttgttctgcatgtgtagagtctccccattttttttaacgcaaccctttcccctttttcctaccccacagctctgttccatgtaagttgccaacagtttcactgaacagtggggtatgtgatggttttggcatgacatcttcagtatgagggggacagtttgacttcactttgagggtgtgatgtctgtagctatgtggaaggtaaaaatagtggtgtgatcatgaaccaaaggaatttatgttttgtaacttgggtactttattttgcattttgttatactattaaataattttttcctgtt

SEQ ID NO: 17842 - DNA, 2352 bp, Homo sapiens
cgctgggggcggggcgacgccggactccggagcgcccgcttacgcagttcctcccggggtcggaggccgattcgccgtgtggcgggttcgagtcccgcctcctgactctggcctctagtccctgagtcccgggcgggctgcattcgtcggggaaacctctcctcgaccaggggcacctctactcgaccaggggcgacggcgtactttgggcttcatcatggaggactacctgcagggttgtcgagctgctctgcaggagtcccgacctctacatgttgtgctgggaaatgaagcctgtgatttggactccacagtgtctgctcttgccctggctttttacctagcaaaggactgaccactgagcagatgctgagaaaagaccagaagactatctatagacaaggcgtcaaggtggccattagtgcaatatatatggatttggagatctgtgaagtcctggaacgctcccactctccacccctgaagctgacccctgcctcaagtacccaccctaacctccatgcctatcttcaaggcaacacccaggtctctcgaaagaaacttctgcccctgctccaggaagccctgtcagcatattttgactccatgaagatcccttcaggacagcctgagacagcagatgtgtccagggagcaagtggacaaggaattggacagggcaagtaactccctgatttctggactgagtcaagatgaggaggaccctccgctgcccccgacgcccatgaacagcttggtggatgagtgccctctagatcaggggctgcctaaactctctgctgaggccgtcttcgagaagtgcagtcagatctcactgtcacagtctaccacagcctccctgtccaagaagtgactgttgagaggcgaggaggtagtgggtgaggctacctgactcacttcaaatgcatgttttgagatgtttggagattcagcaattctgtcttcattgctccaggatctggtatactgttctcataaaactgagaggagaaaaaaagtgaaagaaagcagctgctttaagaatggttttccaccttttccccctaatctctaccaatcagacacattttattatttaaatctgcacctctctctattttatttgccaggggcacgatgtgacatatctgcagtcccagcacagtgggacaaaaagaatttagaccccaaaagtgtcctcggcatggatcttgaacagaaccagtatctgtcatggaactgaacattcatcgatggtctccatgtattcatttattcacttgttcattcaagtatttattgaatacctgcctcaagctagagagaaaagagagtgcgctttggaaatttattccagttttcagcctacagcagattatcagctcggtgacttttctttctgccaccatttaggtgatggtgtttgattcagagatggctgaatttctattcttagcttattgtgactgtttcagatctagtttgggaacagattagaggccattgtcttctgtcctgatcaggtggcctggctgtttctttggatccctctgtcccagagccacccagaaccctgactcttgagaatcaagaaaacacccagaaaggccttaatgacctcataggcactcttccaaaaagacaacagaactggaatgagaggcctgggtctgtctcctgccttagcaggcctatcaatttcttgtcaatctctttttttccttgctcacattaaaaggaagcatggagttctaatgctcccataaactatgtattttggcaagacacttcactactccaggtctcactttccccatctgtaaaacagggtttggactaggtgttccctggtattctgtgatctgcctcttgctgccattctttctctcctctgcttctctgtatttttcttctgttatccctgggggtgctcaggttcacttgattgtctgtatttctgtgtggttgtagcaaggactcagcctcatgtagcacgaataggggtgtggttcatggcgtgttgacccagcagagcactccctcccactaacttgttctgcatgtgtagagtctccccattttttttaacgcaaccctttcccctttttcctaccccacagctctgttccatgtaagttgccaacagtttcactgaacagtggggtatgtgatggttttggcatgacatcttcagtatgagggggacagtttgacttcactttgagggtgtgatgtctgtagctatgtggaaggtaaaaatagtggtgtgatcatgaaccaaaggaatttatgttttgtaacttgggtactttattttgcattttgttatactattaaataattttttcctgtt

SEQ ID NO: 17843 - DNA, 2295 bp, Homo sapiens
  misc_feature (228)..(230): n is a, c, g, or t
tatctcccccattcattgccccaaagagaggctgtttttccttccttgacccatctggctgtccttgccttcttggtcttgggaccctggcctaccctgtttgacccctagtctctcatctgctttctaggactgaccactgagcagatgctgagaaaagaccagaagactatctatagacaaggcgtcaaggtggccattagtgcaatatatatggatttggaggcnnnctttctgcagaggtctaacctccttgcagatctccatgctttctgccaggctcacagctatgatgtcctggttgccatgactatctttttcaacactcacaatgagccagtgcggcagttggctattttctgtccccatgtggcactccaaacaacgatctgtgaagtcctggaacgctcccactctccacccctgaagctgacccctgcctcaagtacccaccctaacctccatgcctatcttcaaggcaacacccaggtctctcgaaagaaacttctgcccctgctccaggaagccctgtcagcatattttgactccatgaagatcccttcaggacagcctgagacagcagatgtgtccagggagcaagtggacaaggaattggacagggcaagtaactccctgatttctggactgagtcaagatgaggaggaccctccgctgcccccgacgcccatgaacagcttggtggatgagtgccctctagatcaggggctgcctaaactctctgctgaggccgtcttcgagaagtgcagtcagatctcactgtcacagtctaccacagcctccctgtccaagaagtgactgttgagaggcgaggaggtagtgggtgaggctacctgactcacttcaaatgcatgttttgagatgtttggagattcagcaattctgtcttcattgctccaggatctggtatactgttctcataaaactgagaggagaaaaaaagtgaaagaaagcagctgctttaagaatggttttccaccttttccccctaatctctaccaatcagacacattttattatttaaatctgcacctctctctattttatttgccaggggcacgatgtgacatatctgcagtcccagcacagtgggacaaaaagaatttagaccccaaaagtgtcctcggcatggatcttgaacagaaccagtatctgtcatggaactgaacattcatcgatggtctccatgtattcatttattcacttgttcattcaagtatttattgaatacctgcctcaagctagagagaaaagagagtgcgctttggaaatttattccagttttcagcctacagcagattatcagctcggtgacttttctttctgccaccatttaggtgatggtgtttgattcagagatggctgaatttctattcttagcttattgtgactgtttcagatctagtttgggaacagattagaggccattgtcttctgtcctgatcaggtggcctggctgtttctttggatccctctgtcccagagccacccagaaccctgactcttgagaatcaagaaaacacccagaaaggccttaatgacctcataggcactcttccaaaaagacaacagaactggaatgagaggcctgggtctgtctcctgccttagcaggcctatcaatttcttgtcaatctctttttttccttgctcacattaaaaggaagcatggagttctaatgctcccataaactatgtattttggcaagacacttcactactccaggtctcactttccccatctgtaaaacagggtttggactaggtgttccctggtattctgtgatctgcctcttgctgccattctttctctcctctgcttctctgtatttttcttctgttatccctgggggtgctcaggttcacttgattgtctgtatttctgtgtggttgtagcaaggactcagcctcatgtagcacgaataggggtgtggttcatggcgtgttgacccagcagagcactccctcccactaacttgttctgcatgtgtagagtctccccattttttttaacgcaaccctttcccctttttcctaccccacagctctgttccatgtaagttgccaacagtttcactgaacagtggggtatgtgatggttttggcatgacatcttcagtatgagggggacagtttgacttcactttgagggtgtgatgtctgtagctatgtggaaggtaaaaatagtggtgtgatcatgaaccaaaggaatttatgttttgtaacttgggtactttattttgcattttgttatactattaaataattttttcctgtt

SEQ ID NO: 17844 - DNA, 3004 bp, Homo sapiens
cgctgggggcggggcgacgccggactccggagcgcccgcttacgcagttcctcccggggtcggaggccgattcgccgtgtggcgggttcgagtcccgcctcctgactctggcctctagtccctgagtcccgggcgggctgcattcgtcggggaaacctctcctcgaccaggggcacctctactcgaccaggggcgacggcgtactttgggcttcatcatggaggactacctgcagggttgtcgagctgctctgcaggagtcccgacctctacatgttgtgctgggaaatgaagcctgtgatttggactccacagtgtctgctcttgccctggctttttacctagcaaagacaactgaggctgaggaagtctttgtgccagttttaaatataaaacgttctgaactacctctgcgaggtgacattgtcttctttcttcagaaggttcatattccagagagtatcttgatttttcgggatgagattgacctccatgcattataccaggctggccaactcaccctcatccttgtcgaccatcatatcttatccaaaagtgacacagccctagaggaggcagtagcagaggtgctagaccatcgacccatcgagccgaaacactgccctccctgccatgtttcagttgagctggtggggtcctgtgctaccctggtgaccgagagaatcctgcagggggcaccagagatcttggacaggcaaactgcagcccttctgcatggaaccatcatcctggactgtgtcaacatggaccttaaaattggaaaggcaaccccaaaggacagcaaatatgtggagaaactagaggcccttttcccagacctacccaagagaaatgatatatttgattccctacaaaaggcaaagtttgatgtatcaggactgaccactgagcagatgctgagaaaagaccagaagactatctatagacaaggcgtcaaggtggccattagtgcaatatatatggatttggaggcctttctgcagaggtctaacctccttgcagatctccatgctttctgccaggctcacagctatgatgtcctggttgccatgactatctttttcaacactcacaatgagccagtgcggcagttggctattttctgtccccatgtggcactccaaacaacgatctgtgaagtcctggaacgctcccactctccacccctgaagctgacccctgcctcaagtacccaccctaacctccatgcctatcttcaaggcaacacccaggtctctcgaaagaaacttctgcccctgctccaggaagccctgtcagcatattttgactccatgaagatcccttcaggacagcctgagacagcagatgtgtccagggagcaagtggacaaggaattggacagggcaagtaactccctgatttctggactgagtcaagatgaggaggaccctccgctgcccccgacgcccatgaacagcttggtggatgagtgccctctagatcaggggctgcctaaactctctgctgaggccgtcttcgagaagtgcagtcagatctcactgtcacagtctaccacagcctccctgtccaagaagtgactgttgagaggcgaggaggtagtgggtgaggctacctgactcacttcaaatgcatgttttgagatgtttggagattcagcaattctgtcttcattgctccaggatctggtatactgttctcataaaactgagaggagaaaaaaagtgaaagaaagcagctgctttaagaatggttttccaccttttccccctaatctctaccaatcagacacattttattatttaaatctgcacctctctctattttatttgccaggggcacgatgtgacatatctgcagtcccagcacagtgggacaaaaagaatttagaccccaaaagtgtcctcggcatggatcttgaacagaaccagtatctgtcatggaactgaacattcatcgatggtctccatgtattcatttattcacttgttcattcaagtatttattgaatacctgcctcaagctagagagcagctcggtgacttttctttctgccaccatttaggtgatggtgtttgattcagagatggctgaatttctattcttagcttattgtgactgtttcagatctagtttgggaacagattagaggccattgtcttctgtcctgatcaggtggcctggctgtttctttggatccctctgtcccagagccacccagaaccctgactcttgagaatcaagaaaacacccagaaaggccttaatgacctcataggcactcttccaaaaagacaacagaactggaatgagaggcctgggtctgtctcctgccttagcaggcctatcaatttcttgtcaatctctttttttccttgctcacattaaaaggaagcatggagttctaatgctcccataaactatgtattttggcaagacacttcactactccaggtctcactttccccatctgtaaaacagggtttggactaggtgttccctggtattctgtgatctgcctcttgctgccattctttctctcctctgcttctctgtatttttcttctgttatccctgggggtgctcaggttcacttgattgtctgtatttctgtgtggttgtagcaaggactcagcctcatgtagcacgaataggggtgtggttcatggcgtgttgacccagcagagcactccctcccactaacttgttctgcatgtgtagagtctccccattttttttaacgcaaccctttcccctttttcctaccccacagctctgttccatgtaagttgccaacagtttcactgaacagtggggtatgtgatggttttggcatgacatcttcagtatgagggggacagtttgacttcactttgagggtgtgatgtctgtagctatgtggaaggtaaaaatagtggtgtgatcatgaaccaaaggaatttatgttttgtaacttgggtactttattttgcattttgttatactattaaataattttttcctgtt

SEQ ID NO: 17845 - DNA, 1531 bp, Homo sapiens
  misc_feature (9)..(9): n is a, c, g, or t
  misc_feature (16)..(16): n is a, c, g, or t
ctcgtgccntcgtgcngctcgtgccgctcgtgcctccctgtccaagaagtgactgttgagaggcgaggaggtagtgggtgaggctacctgactcacttcaaatgcatgttttgagatgtttggagattcagcaattctgtcttcattgctccaggatctggtatactgttctcataaaactgagaggagaaaaaaagtgaaagaaagcagctgctttaagaatggttttccaccttttccccctaatctctaccaatcagacacattttattatttaaatctgcacctctctctattttatttgccaggggcacgatgtgacatatctgcagtcccagcacagtgggacaaaaagaatttagaccccaaaagtgtcctcggcatggatcttgaacagaaccagtatctgtcatggaactgaacattcatcgatggtctccatgtattcatttattcacttgttcattcaagtatttattgaatacctgcctcaagctagagagaaaagagagtgcgctttggaaatttattccagttttcagcctacagcagattatcagctcggtgacttttctttctgccaccatttaggtgatggtgtttgattcagagatggctgaatttctattcttagcttattgtgactgtttcagatctagtttgggaacagattagaggccattgtcttctgtcctgatcaggtggcctggctgtttctttggatccctctgtcccagagccacccagaaccctgactcttgagaatcaagaaaacacccagaaaggccttaatgacctcataggcactcttccaaaaagacaacagaactggaatgagaggcctgggtctgtctcctgccttagcaggcctatcaatttcttgtcaatctctttttttccttgctcacattaaaaggaagcatggagttctaatgctcccataaactatgtattttggcaagacacttcactactccaggtctcactttccccatctgtaaaacagggtttggactaggtgttccctggtattctgtgatctgcctcttgctgccattctttctctcctctgcttctctgtatttttcttctgttatccctgggggtgctcaggttcacttgattgtctgtatttctgtgtggttgtagcaaggactcagcctcatgtagcacgaataggggtgtggttcatggcgtgttgacccagcagagcactccctcccactaacttgttctgcatgtgtagagtctccccattttttttaacgcaaccctttcccctttttcctaccccacagctctgttccatgtaagttgccaacagtttcactgaacagtggggtatgtgatggttttggcatgacatcttcagtatgagggggacagtttgacttcactttgagggtgtgatgtctgtagctatgtggaaggtaaaaatagtggtgtgatcatgaaccaaaggaatttatgttttgtaacttgggtactttattttgcattttgttatactattaaataattttttcctgtt

SEQ ID NO: 17846 - DNA, 3164 bp, Homo sapiens
cgctgggggcggggcgacgccggactccggagcgcccgcttacgcagttcctcccggggtcggaggccgattcgccgtgtggcgggttcgagtcccgcctcctgactctggcctctagtccctgagtcccgggcgggctgcattcgtcggggaaacctctcctcgaccaggggcacctctactcgaccaggggcgacggcgtactttgggcttcatcatggaggactacctgcagggttgtcgagctgctctgcaggagtcccgacctctacatgttgtgctgggaaatgaagcctgtgatttggactccacagtgtctgctcttgccctggctttttacctagcaaagacaactgaggctgaggaagtctttgtgccagttttaaatataaaacgttctgaactacctctgcgaggtgacattgtcttctttcttcagaaggttcatattccagagagtatcttgatttttcgggatgagattgacctccatgcattataccaggctggccaactcaccctcatccttgtcgaccatcatatcttatccaaaagtgacacagccctagaggaggcagtagcagaggtgctagaccatcgacccatcgagccgaaacactgccctccctgccatgtttcagttgagctggtggggtcctgtgctaccctggtgaccgagagaatcctgcagggggcaccagagatcttggacaggcaaactgcagcccttctgcatggaaccatcatcctggactgtgtcaacatggaccttaaaattggaaaggcaaccccaaaggacagcaaatatgtggagaaactagaggcccttttcccagacctacccaagagaaatgatatatttgattccctacaaaaggcaaagtttgatgtatcaggactgaccactgagcagatgctgagaaaagaccagaagactatctatagacaaggcgtcaaggtggccattagtgcaatatatatggatttggaggcctttctgcagaggtctaacctccttgcagatctccatgctttctgccaggctcacagctatgatgtcctggttgccatgactatctttttcaacactcacaatgagccagtgcggcagttggctattttctgtccccatgtggcactccaaacaacgatctgtgaagtcctggaacgctcccactctccacccctgaagctgacccctgcctcaagtacccaccctaacctccatgcctatcttcaaggcaacacccaggtctctcgaaagaaacttctgcccctgctccaggaagccctgtcagcatattttgactccatgaagatcccttcaggacagcctgagacagcagatgtgtccagggagcaagtggacaaggaattggacagggcaagtaactccctgatttctggactgagtcaagatgaggaggaccctccgctgcccccgacgcccatgaacagcttggtggatgagtgccctctagatcaggggctgcctaaactctctgctgaggccgtcttcgagaagtgcagtcagatctcactgtcacagtctaccacagcctccctgtccaagaagtgactgttgagaggcgaggaggtagtgggtgaggctacctgactcacttcaaatgcatgttttgagatgtttggagattcagcaattctgtcttcattgctccaggatctggtatactgttctcataaaactgagaggagaaaaaaagtgaaagaaagcagctgctttaagaatggttttccaccttttccccctaatctctaccaatcagacacattttattatttaaatctgcacctctctctattttatttgccaggggcacgatgtgacatatctgcagtcccagcacagtgggacaaaaagaatttagaccccaaaagtgtcctcggcatggatcttgaacagaaccagtatctgtcatggaactgaacattcatcgatggtctccatgtattcatttattcacttgttcattcaagtatttattgaatacctgcctcaagctagagagaaaagagagtgcgctttggaaatttattccagttttcagcctacagcagattatcagctcggtgacttttctttctgccaccatttaggtgatggtgtttgattcagagatggctgaatttctattcttagcttattgtgactgtttcagatctagtttgggaacagattagaggccattgtcttctgtcctgatcaggtggcctggctgtttctttggatccctctgtcccagagccacccagaaccctgactcttgagaatcaagaaaacacccagaaaggccttaatgacctcataggcactcttccaaaaagacaacagaactggaatgagaggcctgggtctgtctcctgccttagcaggcctatcaatttcttgtcaatctctttttttccttgctcacattaaaaggaagcatggagttctaatgctcccataaactatgtattttggcaagacacttcactactccaggtctcactttccccatctgtaaaacagggtttggactaggtgttccctggtattctgtgatctgcctcttgctgccattctttctctcctctgcttctctgtatttttcttctgttatccctgggggtgctcaggttcacttgattgtctgtatttctgtgtggttgtagcaaggactcagcctcatgtagcacgaataggggtgtggttcatggcgtgttgacccagcagagcactccctcccactaacttgttctgcatgtgtagagtctccccattttttttaacgcaaccctttcccctttttcctaccccacagctctgttccatgtaagttgccaacagtttcactgaacagtggggtatgtgatggttttggcatgacatcttcagtatgagggggacagtttgacttcactttgagggtgtgatgtctgtagctatgtggaaggtaaaaatagtggtgtgatcatgaaccaaaggaatttatgttttgtaacttgggtactttattttgcattttgttatactattaaataattttttcctgtttgggggtcttactgtctttttttacaagtgtattcaggcctttctctgtgatagttgtttcagtctcctcaaaattgatcccccttcttcctactatacttaatgt

SEQ ID NO: 17847 - DNA, 2627 bp, Homo sapiens
cgctgggggcggggcgacgccggactccggagcgcccgcttacgcagttcctcccggggtcggaggccgattcgccgtgtggcgggttcgagtcccgcctcctgactctggcctctagtccctgagtcccgggcgggctgcattcgtcggggaaacctctcctcgaccaggggcacctctactcgaccaggggcgacggcgtactttgggcttcatcatggaggactacctgcagggttgtcgagctgctctgcaggagtcccgacctctacatgttgtgctgggaaatgaagcctgtgatttggactccacagtgtctgctcttgccctggctttttacctagcaaagacaactgaggctgaggaagtctttgtgccagttttaaatataaaacgttctgaactacctctgcgaggtgacattgtcttctttcttcagaaggttcatattccagagagtatcttgatttttcgggatgagattgacctccatgcattataccaggctggccaactcaccctcatccttgtcgaccatcatatcttatccaaaagtgacacagccctagaggaggcagtagcagaggtgctagaccatcgacccatcgagccgaaacactgccctccctgccatgtttcagttgagctggtggggtcctgtgctaccctggtgaccgagagaatcctgcagggggcaccagagatcttggacaggcaaactgcagcccttctgcatggaaccatcatcctggactgtgtcaacatggaccttaaaattggaaaggcaaccccaaaggacagcaaatatgtggagaaactagaggcccttttcccagacctacccaagagaaatgatatatttgattccctacaaaaggcaaagtttgatgtatcaggactgaccactgagcagatgctgagaaaagaccagaagactatctatagacaaggcgtcaaggtggccattagtgcaatatatatggatttggaggcctttctgcagaggtctaacctccttgcagatctccatgctttctgccaggctcacagctatgatgtcctggttgccatgactatctttttcaacactcacaatgagccagtgcggcagttggctattttctgtccccatgtggcactccaaacaacgatctgtgaagtcctggaacgctcccactctccacccctgaagctgacccctgcctcaagtacccaccctaacctccatgcctatcttcaaggcaacacccaggtctctcgaaagaaacttctgcccctgctccaggaagccctgtcagcatattttgactccatgaagatcccttcaggacagcctgagacagcagatgtgtccagggagcaagtggacaaggaattggacagggcaagtaactccctgatttctggactgagtcaagatgaggaggaccctccgctgcccccgacgcccatgaacagcttggtggatgagtgccctctagatcaggggctgcctaaactctctgctgaggccgtcttcgagaagtgcagtcagatctcactgtcacagtctaccacagcctccctgtccaagaagtgactgttgagaggcgaggaggtagtgggtgaggctacctgactcacttcaaatgcatgttttgagatgtttggagattcagcaattctgtcttcattgctccaggatctggtatactgttctcataaaactgagaggagaaaaaaagtgaaagaaagcagctgctttaagaatggttttccaccttttccccctaatctctaccaatcagacacattttattatttaaatctgcacctctctctattttatttgccaggggcacgatgtgacatatctgcagtcccagcacagtgggacaaaaagaatttagaccccaaaagtgtcctcggcatggatcttgaacagaaccagtatctgtcatggaactgaacattcatcgatggtctccatgtattcatttattcacttgttcattcaagtatttattgaatacctgcctcaagctagagagaaaagagagtgcgctttggaaatttattccagttttcagcctacagcagattatcagctcggtgacttttctttctgccaccatttaggtgatggtgtttgattcagagatggctgaatttctattcttagcttattgtgactgtttcagatctagtttgggaacagattagaggccattgtcttctgtcctgatcaggtggcctggctgtttctttggatccctctgtcccagagccacccagaaccctgactcttgagaatcaagaaaacacccagaaaggccttaatgacctcataggcactcttccaaaaagacaacagaactggaatgagaggcctgggtctgtctcctgccttagcaggcctatcaatttcttgtcaatctctttttttccttgctcacattaaaaggaagcatggagttctaatgctcccataaactatgtattttggcaagacacttcactactccaggtctcactttccccatctgtaaaacagggtttggactaggtgttccctggtattctgtgatctgcctcttgctgccattctttctctcctctgcttctacggggggggatccttctagagt

SEQ ID NO: 17848 - DNA, 2084 bp, Homo sapiens
  misc_feature (995)..(997): n is a, c, g, or t
cgctgggggcggggcgacgccggactccggagcgcccgcttacgcagttcctcccggggtcggaggccgattcgccgtgtggcgggttcgagtcccgcctcctgactctggcctctagtccctgagtcccgggcgggctgcattcgtcggggaaacctctcctcgaccaggggcacctctactcgaccaggggcgacggcgtactttgggcttcatcatggaggactacctgcagggttgtcgagctgctctgcaggagtcccgacctctacatgttgtgctgggaaatgaagcctgtgatttggactccacagtgtctgctcttgccctggctttttacctagcaaagacaactgaggctgaggaagtctttgtgccagttttaaatataaaacgttctgaactacctctgcgaggtgacattgtcttctttcttcagaaggttcatattccagagagtatcttgatttttcgggatgagattgacctccatgcattataccaggctggccaactcaccctcatccttgtcgaccatcatatcttatccaaaagtgacacagccctagaggaggcagtagcagaggtgctagaccatcgacccatcgagccgaaacactgccctccctgccatgtttcagttgagctggtggggtcctgtgctaccctggtgaccgagagaatcctgcagggggcaccagagatcttggacaggcaaactgcagcccttctgcatggaaccatcatcctggactgtgtcaacatggaccttaaaattggaaaggcaaccccaaaggacagcaaatatgtggagaaactagaggcccttttcccagacctacccaagagaaatgatatatttgattccctacaaaaggcaaagtttgatgtatcagggactgaccactgagcagatgctgagaaaagaccagaagactatctatagacaaggcgtcaaggtggccattagtgcaatatatatggatttggaggcnnnctttctgcagaggtctaacctccttgcagatctccatgctttctgccaggctcacagctatgatgtcctggttgccatgactatctttttcaacactcacaatgagccagtgcggcagttggctattttctgtccccatgtggcactccaaacaacgatctgtgaagtcctggaacgctcccactctccacccctgaagctgacccctgcctcaagtacccaccctaacctccatgcctatcttcaaggcaacacccaggtctctcgaaagaaacttctgcccctgctccaggaagccctgtcagcatattttcttgagaatcaagaaaacacccagaaaggccttaatgacctcataggcactcttccaaaaagacaacagaactggaatgagaggcctgggtctgtctcctgccttagcaggcctatcaatttcttgtcaatctctttttttccttgctcacattaaaaggaagcatggagttctaatgctcccataaactatgtattttggcaagacacttcactactccaggtctcactttccccatctgtaaaacagggtttggactaggtgttccctggtattctgtgatctgcctcttgctgccattctttctctcctctgcttctctgtatttttcttctgttatccctgggggtgctcaggttcacttgattgtctgtatttctgtgtggttgtagcaaggactcagcctcatgtagcacgaataggggtgtggttcatggcgtgttgacccagcagagcactccctcccactaacttgttctgcatgtgtagagtctccccattttttttaacgcaaccctttcccctttttcctaccccacagctctgttccatgtaagttgccaacagtttcactgaacagtggggtatgtgatggttttggcatgacatcttcagtatgagggggacagtttgacttcactttgagggtgtgatgtctgtagctatgtggaaggtaaaaatagtggtgtgatcatgaaccaaaggaatttatgttttgtaacttgggtactttattttgcattttgttatactattaaataattttttcctgtt

SEQ ID NO: 17849 - DNA, 499 bp, Homo sapiens
ttttttaacaggaaaaaattatttaatagtataacaaaatgcaaaataaagtacccaagttacaaaacataaattcctttggttcacttgattgtctgtatttctgtgtggttgtagcaaggactcagcctcatgtagcacgaataggggtgtggttcatggcgtgttgacccagcagagcactccctcccactaacttgttctgcatgtgtagagtctccccattttttttaacgcaaccctttcccctttttcctaccccacagctctgttccatgtaagttgccaacagtttcactgaacagtggggtatgtgatggttttggcatgacatcttcagtatgagggggacagtttgacttcactttgagggtgtgatgtctgtagctatgtggaaggtaaaaatagtggtgtgatcatgaaccaaaggaatttatgttttgtaacttgggtactttattttgcattttgttatactattaaataattttttcctgtt

SEQ ID NO: 17850 - DNA, 1327 bp, Homo sapiens
cgctgggggcggggcgacgccggactccggagcgcccgcttacgcagttcctcccggggtcggaggccgattcgccgtgtggcgggttcgagtcccgcctcctgactctggcctctagtccctgagtcccgggcgggctgcattcgtcggggaaacctctcctcgaccaggggcacctctactcgaccaggggcgacggcgtactttgggcttcatcatggaggactacctgcagggttgtcgagctgctctgcaggagtcccgacctctacatgttgtgctgggaaatgaagcctgtgatttggactccacagtgtctgctcttgccctggctttttacctagcaaagacaactgaggctgaggaagtctttgtgccagttttaaatataaaacgttctgaactacctctgcgaggtgacattgtcttctttcttcagaaggttcatattccagagagtatcttgatttttcgggatgagattgacctccatgcattataccaggctggccaactcaccctcatccttgtcgaccatcatatcttatccaaaagtgacacagccctagaggaggcagtagcagaggtgctagaccatcgacccatcgagccgaaacactgccctccctgccatgtttcagttgagctggtggggtcctgtgctaccctggtgaccgagagaatcctgcagggggcaccagagatcttggacaggcaaactgcagcccttctgcatggaaccatcatcctggactgtgtcaacatggaccttaaaattggaaaggcaaccccaaaggacagcaaatatgtggagaaactagaggcccttttcccagacctacccaagagaaatgatatatttgattccctacaaaaggcaaagtttgatgtatcagggactgaccactgagcagatgctgagaaaagaccagaagactatctatagacaaggcgtcaaggtggccattagtgcaatatatatggatttggagatctgtgaagtcctggaacgctcccactctccacccctgaagctgacccctgcctcaagtacccaccctaacctccatgcctatcttcaaggcaacacccaggtctctcgaaagaaacttctgcccctgctccaggaagccctgtcagcatattttgactccatgaagatcccttcaggacagcctgagacagcagatgtgtccagggagcaagtggacaaggaattggacagggcaagtaactccctgatttctggactgagtcaagatgaggaggaccctccgccaaagtgacgaattcggcacgaggaccattctgatgttggagcggccgc

SEQ ID NO: 17851 - DNA, 708 bp, Homo sapiens
  misc_feature (626)..(626): n is a, c, g, or t
gcactgcctgagactactccagcctcccccgtccctgatgtcacaattcagaggctgctgcctgcttaggaggttgtagaaagctctgtaggttctctctgtgtgtcctacaggagtcttcaggccagctccctgtcggatggcttttatgaaaaaatatctcctccccattctggggctcttcatggcctactactactattctgcaaacgaggaattcagaccagagatgctccaaggaaagaaagtgattgtcacaggggccagcaaagggatcggaagagagatggcttatcatctggcgaagatgggagcccatgtggtggtgacagcgagctcagcacactacattgctggcaccatggaagacatgaccttcgcagagcaatttgttgcccaagcaggaaagctcatgggaggactagacatgctcattctcaaccacatcaccaacacttctttgaatctttttcatgatgatattcaccatgtgcgcaaaagcatggaagtcaacttcctcagttacgtggtcctgactgtagctgccttgcccatgctgaagcagagcaatggaagcatgtgcgctcttctgctggaatgctatcatgttgtgcatctgagcagtngttgatggtctctctcatagaagatatcaggcaggcatgatatactttggtctgctataccagacgctaggcgtctgatgca

SEQ ID NO: 17852 - DNA, 1935 bp, Homo sapiens
ggtgaaaagggaaaacctgcccaaatccagtttttgtttcagtaacttcctttgagacaaagtcaggaatctgagagtaagcacctgctaagggtgggacaggggctctgtctggtatgcctctcccatgttaagagctaacaatagtaatggataagtctccagggcaaccaggaccacttccaagcattcctgtcttgggctgcctcgagggctcctctgtcctttggggagtactgattgatgcctgatgcccagaactggcccactctggcttctctttggagctgtctctgcaggcgccttctggctgccagctcggtcctagcataagggacttcttccttggcctgggtttcaccttcttgtatcaggtggcagaccagctggtttcagtcccaaatcaggtcttctgactcctcccagaaaccaaccaacttctgagcaggaaatcctgcccctccccaaagagtgggaaaccgcaaaggaagagagagatgaaacagaaggaaaggcagaggaggagggagagagagagaagagaagaaaaagaaaaaagaacatcaataaaaagaagtcagatttgttcgaaatcttgaggagtcttcaggccagctccctgtcggatggcttttatgaaaaaatatctcctccccattctggggctcttcatggcctactactactattctgcaaacgaggaattcagaccagagatgctccaaggaaagaaagtgattgtcacaggggccagcaaagggatcggaagagagatggcttatcatctggcgaagatgggagcccatgtggtggtgacagcgaggtcaaaagaaactctacagaaggtggtatcccactgcctggagcttggagcagcctcagcacactacattgctggcaccatggaagacatgaccttcgcagagcaatttgttgcccaagcaggaaagctcatgggaggactagacatgctcattctcaaccacatcaccaacacttctttgaatctttttcatgatgatattcaccatgtgcgcaaaagcatggaagtcaacttcctcagttacgtggtcctgactgtagctgccttgcccatgctgaagcagagcaatggaagcattgttgtcgtctcctctctggctgggaaagtggcttatccaatggttgctgcctattctgcaagcaagtttgctttggatgggttcttctcctccatcagaaaggaatattcagtgtccagggtcaatgtatcaatcactctctgtgttcttggcctcatagacacagaaacagccatgaaggcagtttctgggatagtccatatgcaagcagctccaaaggaggaatgtgccctggagatcatcaaagggggagctctgcgccaagaagaagtgtattatgacagctcactctggaccactcttctgatcagaaatccatgcaggaagatcctggaatttctctactcaacgagctataatatggacagattcataaacaagtaggaactccctgagggctgggcatgctgagggattttgggactgttctgtctcatgtttatctgagctcttatctatgaagacatcttcccagagtgtccccagagacatgcaagtcatgggtcacacctgacaaatggaaggagttcctctaacatttgcaaaatggaaatgtaataataatgaatgtcatgcaccgctgcagccagcagttgtaaaattgttagtaaacataggtataattaccagatagttatattaaatttatatcttatatataataatatgtgatgattaatacaatattaattataataaaggtcacataaactttataaattcataactggtagctataacttgagcttattcaggatggtttctttaaaaccataaactgtacaaatgaaatttttcaatatttgtttcttat

SEQ ID NO: 17853 - DNA, 1821 bp, Homo sapiens
ggtgaaaagggaaaacctgcccaaatccagtttttgtttcagtaacttcctttgagacaaagtcaggaatctgagagtaagcacctgctaagggtgggacaggggctctgtctggtatgcctctcccatgttaagagctaacaatagtaatggataagtctccagggcaaccaggaccacttccaagcattcctgtcttgggctgcctcgagggctcctctgtcctttggggagtactgattgatgcctgatgcccagaactggcccactctggcttctctttggagctgtctctgcaggcgccttctggctgccagctcggtcctagcataagggacttcttccttggcctgggtttcaccttcttgtatcaggtggcagaccagctggtttcagtcccaaatcaggtcttctgactcctcccagaaaccaaccaacttctgagcaggaaatcctgcccctccccaaagagtgggaaaccgcaaaggaagagagagatgaaacagaaggaaaggcagaggaggagggagagagagagaagagaagaaaaagaaaaaagaacatcaataaaaagaagtcagatttgttcgaaatcttgagagatgctccaaggaaagaaagtgattgtcacaggggccagcaaagggatcggaagagagatggcttatcatctggcgaagatgggagcccatgtggtggtgacagcgaggtcaaaagaaactctacagaaggtggtatcccactgcctggagcttggagcagcctcagcacactacattgctggcaccatggaagacatgaccttcgcagagcaatttgttgcccaagcaggaaagctcatgggaggactagacatgctcattctcaaccacatcaccaacacttctttgaatctttttcatgatgatattcaccatgtgcgcaaaagcatggaagtcaacttcctcagttacgtggtcctgactgtagctgccttgcccatgctgaagcagagcaatggaagcattgttgtcgtctcctctctggctgggaaagtggcttatccaatggttgctgcctattctgcaagcaagtttgctttggatgggttcttctcctccatcagaaaggaatattcagtgtccagggtcaatgtatcaatcactctctgtgttcttggcctcatagacacagaaacagccatgaaggcagtttctgggatagtccatatgcaagcagctccaaaggaggaatgtgccctggagatcatcaaagggggagctctgcgccaagaagaagtgtattatgacagctcactctggaccactcttctgatcagaaatccatgcaggaagatcctggaatttctctactcaacgagctataatatggacagattcataaacaagtaggaactccctgagggctgggcatgctgagggattttgggactgttctgtctcatgtttatctgagctcttatctatgaagacatcttcccagagtgtccccagagacatgcaagtcatgggtcacacctgacaaatggaaggagttcctctaacatttgcaaaatggaaatgtaataataatgaatgtcatgcaccgctgcagccagcagttgtaaaattgttagtaaacataggtataattaccagatagttatattaaatttatatcttatatataataatatgtgatgattaatacaatattaattataataaaggtcacataaactttataaattcataactggtagctataacttgagcttattcaggatggtttctttaaaaccataaactgtacaaatgaaatttttcaatatttgtttcttat

SEQ ID NO: 17854 - DNA, 1448 bp, Homo sapiens
gcactgcctgagactactccagcctcccccgtccctgatgtcacaattcagaggctgctgcctgcttaggaggttgtagaaagctctgtaggttctctctgtgtgtcctacaggagtcttcaggccagctccctgtcggatggcttttatgaaaaaatatctcctccccattctggggctcttcatggcctactactactattctgcaaacgaggaattcagaccagagatgctccaaggaaagaaagtgattgtcacaggggccagcaaagggatcggaagagagatggcttatcatctggcgaagatgggagcccatgtggtggtgacagcgaggtcaaaagaaactctacagaaggtggtatcccactgcctggagcttggagcagcctcagcacactacattgctggcaccatggaagacatgaccttcgcagagcaatttgttgcccaagcaggaaagctcatgggaggactagacatgctcattctcaaccacatcaccaacacttctttgaatctttttcatgatgatattcaccatgtgcgcaaaagcatggaagtcaacttcctcagttacgtggtcctgactgtagctgccttgcccatgctgaagcagagcaatggaagcattgttgtcgtctcctctctggctgggaaagtggcttatccaatggttgctgcctattctgcaagcaagtttgctttggatgggttcttctcctccatcagaaaggaatattcagtgtccagggtcaatgtatcaatcactctctgtgttcttggcctcatagacacagaaacagccatgaaggcagtttctgggatagtccatatgcaagcagctccaaaggaggaatgtgccctggagatcatcaaagggggagctctgcgccaagaagaagtgtattatgacagctcactctggaccactcttctgatcagaaatccatgcaggaagatcctggaatttctctactcaacgagctataatatggacagattcataaacaagtaggaactccctgagggctgggcatgctgagggattttgggactgttctgtctcatgtttatctgagctcttatctatgaagacatcttcccagagtgtccccagagacatgcaagtcatgggtcacacctgacaaatggaaggagttcctctaacatttgcaaaatggaaatgtaataataatgaatgtcatgcaccgctgcagccagcagttgtaaaattgttagtaaacataggtataattaccagatagttatattaaatttatatcttatatataataatatgtgatgattaatacaatattaattataataaaggtcacataaactttataaattcataactggtagctataacttgagcttattcaggatggtttctttaaaaccataaactgtacaaatgaaatttttcaatatttgtttcttat

SEQ ID NO: 17855 - DNA, 1355 bp, Homo sapiens
gcactgcctgagactactccagcctcccccgtccctgatgtcacaattcagaggctgctgcctgcttaggaggttgtagaaagctctgtaggttctctctgtgtgtcctacaggagtcttcaggccagctccctgtcggatggcttttatgaaaaaatatctcctccccattctggggctcttcatggcctactactactattctgcaaacgaggaattcagaccagagatgctccaaggaaagaaagtgattgtcacaggggccagcaaagggatcggaagagagatggcttatcatctggcgaagatgggagcccatgtggtggtgacagcgaggtcaaaagaaactctacagaaggtggtatcccactgcctggagcttggagcagcctcagcacactacattgctggcaccatggaagacatgaccttcgcagagcaatttgttgcccaagcaggaaagctcatgggaggactagacatgctcattctcaaccacatcaccaacacttctttgaatctttttcatgatgatattcaccatgtgcgcaaaagcatggaagtcaacttcctcagttacgtggtcctgactgtagctgccttgcccatgctgaagcagagcaatggaagcattgttgtcgtctcctctctggctgggaaagtggcttatccaatggttgctgcctattctgcaagcaagtttgctttggatgggttcttctcctccatcagaaaggaatattcagtgtccagggtcaatgtatcaatcactctctgtgttcttggcctcatagacacagaaacagccatgaaggcagtttctgggatagtccatatgcaagcagctccaaaggaggaatgtgccctggagatcatcaaagggggagctctgcgccaagaagaagtgtattatgacagctcactctggaccactcttctgatcagaaatccatgcaggaagatcctggaatttctctactcaacgagctataatatggacagattcataaacaagtaggaactccctgagggctgggcatgctgagggattttgggactgttctgtctcatgtttatctgagctcttatctatgaagacatcttcccagagtgtccccagagacatgcaagtcatgggtcacacctgacaaatggaaggagttcctctaacatttgcaaaatggaaatgtaataataatgaatgtcatgcaccgctgcagccagcagttgtaaaattgttagtaaacataggtataattaccagatagttatattaaatttatatcttatatataataatatgtgatgattaatacaatattaattataataaaggtcacataaactttataaat

SEQ ID NO: 17856 - DNA, 1394 bp, Homo sapiens
gcactgcctgagactactccagcctcccccgtccctgatgtcacaattcagaggctgctgcctgcttaggaggttgtagaaagctctgtaggttctctctgtgtgtcctacaggagtcttcaggccagctccctgtcggatggcttttatgaaaaaatatctcctccccattctggggctcttcatggcctactactactattctgcaaacgaggaattcagaccagagatgctccaaggaaagaaagtgattgtcacaggggccagcaaagggatcggaagagagatggcttatcatctggcgaagatgggagcccatgtggtggtgacagcgaggtcaaaagaaactctacagaaggtggtatcccactgcctggagcttggagcagcctcagcacactacattgctggcaccatggaagacatgaccttcgcagagcaatttgttgcccaagcaggaaagctcatgggaggactagacatgctcattctcaaccacatcaccaacacttctttgaatctttttcatgatgatattcaccatgtgcgcaaaagcatggaagtcaacttcctcagttacgtggtcctgactgtagctgccttgcccatgctgaagcagagcaatggaagcattgttgtcgtctcctctctggctgggaaagtggcttatccaatggttgctgcctattctgcaagcaagtttgctttggatgggttcttctcctccatcagaaaggaatattcagtgtccagggtcaatgtatcaatcactctctgtgttcttggcctcatagacacagaaacagccatgaaggcagtttctgggatagtccatatgcaagcagctccaaaggaggaatgtgccctggagatcatcaaagggggagctctgcgccaagaagaagtgtattatgacagctcactctggaccactcttctgatcagaaatccatgcaggaagatcctggaatttctctactcaacgagctataatatggagggactgttctgtctcatgtttatctgagctcttatctatgaagacatcttcccagagtgtccccagagacatgcaagtcatgggtcacacctgacaaatggaaggagttcctctaacatttgcaaaatggaaatgtaataataatgaatgtcatgcaccgctgcagccagcagttgtaaaattgttagtaaacataggtataattaccagatagttatattaaatttatatcttatatataataatatgtgatgattaatacaatattaattataataaaggtcacataaactttataaattcataactggtagctataacttgagcttattcaggatggtttctttaaaaccataaactgtacaaatgaaatttttcaatatttgtttcttat

SEQ ID NO: 17857 - DNA, 1394 bp, Homo sapiens
gcactgcctgagactactccagcctcccccgtccctgatgtcacaattcagaggctgctgcctgcttaggaggttgtagaaagctctgtaggttctctctgtgtgtcctacaggagtcttcaggccagctccctgtcggatggcttttatgaaaaaatatctcctccccattctggggctcttcatggcctactactactattctgcaaacgaggaattcagaccagagatgctccaaggaaagaaagtgattgtcacaggggccagcaaagggatcggaagagagatggcttatcatctggcgaagatgggagcccatgtggtggtgacagcgaggtcaaaagaaactctacagaaggtggtatcccactgcctggagcttggagcagcctcagcacactacattgctggcaccatggaagacatgaccttcgcagagcaatttgttgcccaagcaggaaagctcatgggaggactagacatgctcattctcaaccacatcaccaacacttctttgaatctttttcatgatgatattcaccatgtgcgccccatgctgaagcagagcaatggaagcattgttgtcgtctcctctctggctgggaaagtggcttatccaatggttgctgcctattctgcaagcaagtttgctttggatgggttcttctcctccatcagaaaggaatattcagtgtccagggtcaatgtatcaatcactctctgtgttcttggcctcatagacacagaaacagccatgaaggcagtttctgggatagtccatatgcaagcagctccaaaggaggaatgtgccctggagatcatcaaagggggagctctgcgccaagaagaagtgtattatgacagctcactctggaccactcttctgatcagaaatccatgcaggaagatcctggaatttctctactcaacgagctataatatggacagattcataaacaagtaggaactccctgagggctgggcatgctgagggattttgggactgttctgtctcatgtttatctgagctcttatctatgaagacatcttcccagagtgtccccagagacatgcaagtcatgggtcacacctgacaaatggaaggagttcctctaacatttgcaaaatggaaatgtaataataatgaatgtcatgcaccgctgcagccagcagttgtaaaattgttagtaaacataggtataattaccagatagttatattaaatttatatcttatatataataatatgtgatgattaatacaatattaattataataaaggtcacataaactttataaattcataactggtagctataacttgagcttattcaggatggtttctttaaaaccataaactgtacaaatgaaatttttcaatatttgtttcttat

SEQ ID NO: 17858 - DNA, 1394 bp, Homo sapiens
gcactgcctgagactactccagcctcccccgtccctgatgtcacaattcagaggctgctgcctgcttaggaggttgtagaaagctctgtaggttctctctgtgtgtcctacaggagtcttcaggccagctccctgtcggatggcttttatgaaaaaatatctcctccccattctggggctcttcatggcctactactactattctgcaaacgaggaattcagaccagagatgctccaaggaaagaaagtgattgtcacaggggccagcaaagggatcggaagagagatggcttatcatctggcgaagatgggagcccatgtggtggtgacagcgagctcagcacactacattgctggcaccatggaagacatgaccttcgcagagcaatttgttgcccaagcaggaaagctcatgggaggactagacatgctcattctcaaccacatcaccaacacttctttgaatctttttcatgatgatattcaccatgtgcgcaaaagcatggaagtcaacttcctcagttacgtggtcctgactgtagctgccttgcccatgctgaagcagagcaatggaagcattgttgtcgtctcctctctggctgggaaagtggcttatccaatggttgctgcctattctgcaagcaagtttgctttggatgggttcttctcctccatcagaaaggaatattcagtgtccagggtcaatgtatcaatcactctctgtgttcttggcctcatagacacagaaacagccatgaaggcagtttctgggatagtccatatgcaagcagctccaaaggaggaatgtgccctggagatcatcaaagggggagctctgcgccaagaagaagtgtattatgacagctcactctggaccactcttctgatcagaaatccatgcaggaagatcctggaatttctctactcaacgagctataatatggacagattcataaacaagtaggaactccctgagggctgggcatgctgagggattttgggactgttctgtctcatgtttatctgagctcttatctatgaagacatcttcccagagtgtccccagagacatgcaagtcatgggtcacacctgacaaatggaaggagttcctctaacatttgcaaaatggaaatgtaataataatgaatgtcatgcaccgctgcagccagcagttgtaaaattgttagtaaacataggtataattaccagatagttatattaaatttatatcttatatataataatatgtgatgattaatacaatattaattataataaaggtcacataaactttataaattcataactggtagctataacttgagcttattcaggatggtttctttaaaaccataaactgtacaaatgaaatttttcaatatttgtttcttat

SEQ ID NO: 17859 - DNA, 1304 bp, Homo sapiens
gcactgcctgagactactccagcctcccccgtccctgatgtcacaattcagaggctgctgcctgcttaggaggttgtagaaagctctgtaggttctctctgtgtgtcctacaggagtcttcaggccagctccctgtcggatggcttttatgaaaaaatatctcctccccattctggggctcttcatggcctactactactattctgcaaacgaggaattcagaccagagatgctccaaggaaagaaagtgattgtcacaggggccagcaaagggatcggaagagagatggcttatcatctggcgaagatgggagcccatgtggtggtgacagcgaggtcaaaagaaactctacagaaggtggtatcccactgcctggagcttggagcagcctcagcacactacattgctggcaccatggaagacatgaccttcgcagagcaatttgttgcccaagcaggaaagctcatgggaggactagacatgctcattctcaaccacatcaccaacacttctttgaatctttttcatgatgatattcaccatgtgcgcaaaagcatggaagtcaacttcctcagttacgtggtcctgactgtagctgccttgcccatgctgaagcagagcaatggaagcattgttgtcgtctcctctctggctgaaacagccatgaaggcagtttctgggatagtccatatgcaagcagctccaaaggaggaatgtgccctggagatcatcaaagggggagctctgcgccaagaagaagtgtattatgacagctcactctggaccactcttctgatcagaaatccatgcaggaagatcctggaatttctctactcaacgagctataatatggacagattcataaacaagtaggaactccctgagggctgggcatgctgagggattttgggactgttctgtctcatgtttatctgagctcttatctatgaagacatcttcccagagtgtccccagagacatgcaagtcatgggtcacacctgacaaatggaaggagttcctctaacatttgcaaaatggaaatgtaataataatgaatgtcatgcaccgctgcagccagcagttgtaaaattgttagtaaacataggtataattaccagatagttatattaaatttatatcttatatataataatatgtgatgattaatacaatattaattataataaaggtcacataaactttataaattcataactggtagctataacttgagcttattcaggatggtttctttaaaaccataaactgtacaaatgaaatttttcaatatttgtttcttat

SEQ ID NO: 17860 - DNA, 1247 bp, Homo sapiens
  misc_feature (914)..(914): n is a, c, g, or t
  misc_feature (920)..(920): n is a, c, g, or t
  misc_feature (929)..(929): n is a, c, g, or t
  misc_feature (931)..(931): n is a, c, g, or t
  misc_feature (953)..(953): n is a, c, g, or t
  misc_feature (956)..(956): n is a, c, g, or t
  misc_feature (992)..(992): n is a, c, g, or t
attatcataatgaggttgacattgtaggaaatattcaagctacttctccatgtttacatcctactgatcttcaaaaagttgcagaaatgattcgagaagaaggatatgattctgttttctctgttgtgagacgccatcagtttcgatggagtgaaattcagaaaggagttcgtgaagtgaccgaacctctgaatttaaatccagctaaacggcctcgtcgacaagactgggatggagaattatatgaaaatggctcattttattttgctaaaagacatttgatagagatgggttacttgcagggtggaaaaatggcatactacgaaatgcgagctgaacatagtgtggatatagatgtggatattgattggcctattgcagagcaaagagtattaagatatggctattttggcaaagagaagcttaaggaaataaaacttttggtttgcaatattgatggatgtctcaccaatggccacatttatgtatcaggagaccaaaaagaaataatatcttatgatgtaaaagatgctattgggataagtttattaaagaaaagtggtattgaggtgaggctaatctcagaaagggcctgttcaaagcagacgctgtcttctttaaaactggattgcaaaatggaagtcagtgtatcagacaagctagcagttgtagatgaatggagaaaagaaatgggcctgtgctggaaagaagtggcatatcttggaaatgaagtgtctgatgaagagtgcttgaagagaggtgggcctaagtggcgctcctgctgatgcctgttctactgcccagaaggctgttggatacatttgcaaatgtaatggtggccgtggtgccatccgagaatttgcagagcacatttgccctactaatggaaaaggttaataattcatgccaaaaanagaaantagcgtaanantgagaaaaaaatgatacagccntcntcagccagtttgcttttatttttgattaagtaaatnccatgttgtaatgttacagagagtgtgatttggttgtgatatatatatattgtgctctacttttctctttacgcaagataattatttagagactgattacagtctttctcagatttttagtaaatgcagtaagaacatcatcaaagttcacttgtattgtaccctgtaaaactgtgtgtggtgtgctttcaaagatgttgggatttatttatctggggacaggtgtatggtaagacatgcccttctattaataca

SEQ ID NO: 17861 - DNA, 446 bp, Homo sapiens
tcctttcagatcctccacttggcaggcagggccaacagcagcccccgggccaggtgtcctggagcagcagcagctgcccgtgcaggcccggactctccctagctaagggccatgtgcggtggagtgtcctaattttgcagggttcctttctgtgggggtacctgtggggtacttcaaacagccctagcagcaaaggcccttgagcagcgcggtgtgaaactgggataaaaacggggcttggccgaaggacttttatctgtcttggtcaccccggccaggccccggaagcagcagccagggatggtccttcctcacccacaggcgtgtgtcactgtggctgggacggcagcgctcagaggagcctccagttactttcctcacatctcccaaactctctcttaattgcgataattcacagaacataaaattcacgatcttaaaaaaaa

SEQ ID NO: 17862 - DNA, 1061 bp, Homo sapiens
  misc_feature (25)..(25): n is a, c, g, or t
aaggctagtacgaggctggtgtganttcggccgaggaagaactgaacagggtcttagaatgatcaaatggatggtttgtttggttggtgggagatgttgaaacgtgggtaaggaatggtgtccttagaagagaggttgccctagatgccgaaaccctggaggtccatggttgccagcagaaacttacagctgggaggagcctgcacccatctctggctcttgtgaatgagaagactcaatttgtgtttttgtttttttgagaaagggtcttgctctgtcacccagactgaagtacagtagcgtgatctcagttcactgcagccttgacctcctgggcccaagcgatcctcccacctcagcctcctgagtagttaagacttcaggtatgcattaccatgcctggctaatgtttttttattttttgtagagacaaggtctccctcgttgcccaggctggtctcaaactcttgggctcaagtgactttcctgcctcggccatccaaagtgctgggattacaggcataagccaccgcaacatgccccagttgcttttaaactgttaaatgtgggatttaaagaataatctagttctacccattttatgaatgaagaaaagaaactgggacccagagagaaaaggtgcccggtccaaggttacagagcccgttggactcagaagtgaagctggaacactggccaatgccctcccatccgccaggtgacttctctgcagtcccctttaccatctgcccgggtcctttgggatacggctgactaggggtttgaagaacagcaattggcctttgttatgaatctttttgtggagataaacccagtagaagtatcacggttctgaccatgaaagtgtgttcaactctaatccagcacaattaggattccagatcatttgattctgtgtcgtctaaatatcacagaaagttaaaaacaaattagcctcaatggaattaatggcttaatatccataatttagttttaatgctaggaggaagggctcctgtgaatgtgttcttacaaatcaaataaagaaaatcaaatagaga

SEQ ID NO: 17863 - DNA, 1509 bp, Homo sapiens
ggctctgtcacccaggctggagtgcagtggtgcaatcatggttgattgcaacctcaacctccctggttcaagccatcctcccacctcagtctcctgagtagctgggactacaggtgcacatcaccatgcccggctaatttttttgtatttttttactagagatgaggttctactatgtagcccaggctgctctggaactcctgggctcaagcaatcctcccacctcggcctcccaaagtgctgggattgcaggcatgagccaccatactggcctaagtgcagaaatttgaacatgtgcctccaccccaagccaaaatttcccttgaggagcactatctatctgatgatgtctttgaaacggtatgaaattaaaataattaaaacatcctgcacataggtggtagcatctaatatgaaagatggatttatgcttagagctcagaaaaatcctcataaaattattgtgtcttatcctcggcacctaaagaactgaacagggtcttagaatgatcaaatggatggtttgtttggttggtgggagatgttgaaacgtgggtaaggaatggtgtccttagaagagaggttgccctagatgccgaaaccctggaggtccatggttgccagcagaaacttacagctgggaggagcctgcacccatctctggctcttgtgaatgagaagactcaatttgtgtttttgtttttttgagaaagggtcttgctctgtcacccagactgaagtacagtagcgtgatctcagttcactgcagccttgacctcctgggcccaagcgatcctcccacctcagcctcctgagtagttaagacttcaggtatgcattaccatgcctggctaatgtttttttattttttgtagagacaaggtctccctcgttgcccaggctggtctcaaactcttgggctcaagtgactttcctgcctcggccatccaaagtgctgggattacaggcataagccaccgcaacatgccccagttgcttttaaactgttaaatgtgggatttaaagaataatctagttctacccattttatgaatgaagaaaagaaactgggacccagagagaaaaggtgcccggtccaaggttacagagcccgttggactcagaagtgaagctggaacactggccaatgccctcccatccgccaggtgacttctctgcagtcccctttaccatctgcccgggtcctttgggatacggctgactaggggtttgaagaacagcaattggcctttgttatgaatctttttgtggagataaacccagtagaagtatcacggttctgaccatgaaagtgtgttcaactctaatccagcacaattaggattccagatcatttgattctgtgtcgtctaaatatcacagaaagttaaaaacaaattagcctcaatggaattaatggcttaatatccataatttagttttaatgctaggaggaagggctcctgtgaatgtgttcttacaaatcaaataaagaaaatcaaatagaga

SEQ ID NO: 17864 - DNA, 228 bp, Homo sapiens
acatcttgaaagttaggcaccatctcacacaaatgttctctcccgtttttcctctaagaccacctgagtttggtgttgactgggaagcctcctaaagcctctgctgctgcctaagccctcattgaccctccctcttccaaatcccagcagcactttttgtctcgatacctccctgggcaccgagccacgcacctggttagttctttttgtgtataatagcgtgtgttg

SEQ ID NO: 17865 - DNA, 1059 bp, Homo sapiens
tatgaaatgtgtatgcttaaatacattttaggcatattaacaaagttgacatgagctgatggcagtaataacattttataaacaaatataatttataaatataaatacaggaattctttacatttaaaagttattaataggtgtgaagagttttcaaagaattgactctctccatcatctagtaatttgaaattttagaagattctttgaataaacctcatttagtctctctcctataaaaggaaaagcagaacctcaagtccacatttattttgcatttgctctcttgttcacattcttctctatgtcaataaaagttagatggcattttttatagctgtgtatcaaatatgtgaatatagaattccaactaaaatagcaatagatgggaaaactttctagttcattcattgtcaaaagtgagtgctgagaggacatctgaagccccacctaaaagtaaatcctcagcaggaaagataatgcagataaattttgggtccaaattcttaatctgggcaaagaaagaaaacaaacacacttactagatggatttttcataaaagttcctttccatgctgtccaaagtgattaaattagtcatccattcttttatctcttctgttgataatcatataagcaactcctgaatctatatgagtattcagtcttctttattattcagaagatttgccattttagtcaactcaaatatcagtactatttcatagcatgctagttcaggttacacaaagcccaccaggtacacctggaatctagccagaatgcagtccaatcatgagcactttaaacatttacctcattttactatttgtcttagagctatggaaacattattctgtttctggagtatctcacacttcaggagcattagttgaagcagtacagatacagttagtgtcctctctggacattcatttgttaactttgaaacaactggattcaaagaccttaagttaaaaacaaacttattgcctatttatggaagaaaaacctgttattttattctggtttaaaagttaaaagcattgcctctaccac

SEQ ID NO: 17866 - DNA, 224 bp, Homo sapiens
tgctatgctgcccagactggactctaattccttggctcaaggcattctctagcctcagcctcctgagcagctgggaccaaaagcatatgccacagtacctggcctccatccttcctttctgttactgcctgtgttccagactccccacagctctctcggatccttggaacaccttcttaagttcataacctgtctccagacctgttacctttcaaatacatctg

SEQ ID NO: 17867 - DNA, 424 bp, Homo sapiens
gtgacaatccctggctggcaggaagctttgatccttggggagtccagaggaagtcctatgatgtgtgggatccctagagtcacagggattgggaagaagctctataccaggatgggttgctaagatagacccattaattaagcaggaggctttgcttaacactcagttactaaaaacagagatccggtaactgataacagggagctcagcacccctcaagtgtggagtgggttttgcacaggcagtattgttattttaaggacacagaagtgcccagggggaaattcctacccacacggagaaagagcagaatacctgtgagtatccctttttaacaagtaaaagctgactttactttgaatgttaggaggctctagcaaaaaaatctcaaagatatttctaagtgaaagattcctctaaaagg

SEQ ID NO: 17868 - DNA, 586 bp, Homo sapiens
attggataaacatatgaacagatgctcagtatctgtggtaatcaaagatatgcaaattaaaatgatgagttatccttttttacccatcagattggaaaagactaagaagagtgataatgcacagagttagcaggatgtagggaaagcgatgtactcacatgggaatggtgggagtgtaattgataaaacctttccaaagccttacaaatgtatcctctttgacccagcaattctacttctgggaatatatctccaagaaatcacctggtgagtacccagaggcatttcgcagtttgttttagatgtggtttaaatacagggtctacttatctctggcctggcaggtgcggtggctcacacctgtagtaatcccagcactttgggaggccaaggcgggcagatcacctgaggtcaggagttcaagaccagcctaggcaatatggcgaaaccccgtctctatcaaaaaatacaaaaattagccaggcttggtggcacacgcctgtagtcccagctactcgggaggttgcagtgagtcaagattgcaccactgcactccagcctgggtgacagagcgagactctgcctc

SEQ ID NO: 17869 - DNA, 712 bp, Homo sapiens
taggatattatcttcacaataatattggattcaggacagatgattagatgagcaagatattatagtttatagatcggactgtatttaatatagtttgtattttaatttcagtgtctgtgatttaaattacaatgaattttttaaaattgcatataaatgcattgttttagacagattaattctttatattcatagtcatcattaaatgagtttttcagtatggtgaaaacattattttttctttctatgaagatctttgtgtaaagatttccttcagttttatttgaaagaatccattaccttcaaaatagtcatattattttttctttgccagtataagaaactaaagttattgttatgatttgcatatttatattgaattttcctttgtcatttatattatttctatttatttaaaaagtatatgtgaataggctgggtgcggtggctcatacctctaatcccagcacattgggaggctgaggtgggcagttcgcttgaggccaggagtttgagaccagcctggccaacatggtgaaactgcatctctactaagattacaaaaattagctggacatggtagtgcgtgcttgtgatcccagctgctcgggaggctgaggcatgagaatcgcttgaacccaagaggtggaggttgcaattagcggagattgtgccactgcactcaagcctgggtgacagaggaagactgtct

SEQ ID NO: 17870 - DNA, 1024 bp, Homo sapiens
  misc_feature (30)..(30): n is a, c, g, or t
  misc_feature (35)..(35): n is a, c, g, or t
ggtcgactcctactactactaaattcgcgnccgcntcgaccaattactgaatgacagaactggggtaagcacgcggacttctgactccaagaatccattagcttatttggagtttaaatagaaactttaaaaggtttcataaaattaaatgcccattaataatttttttaaaaagaagtagaaaaagtgttctttaacattatagggaatctttatagtcaacagacagctttatatttatttattgaaaaattatagatgtatatatttatggggcacagagtgatgttacgatcttcgactaccatgtgaaatgcttaaatcaactaatgtatcaagctgatatgttaatcaatttccacaactattttacattttttaggtgatgagaacatttgaaatttactcttagcaattttaaaatgttactagctatgttcactgtgttgtgcaataagatcttattaaaaaaaaaaacttatttctcctatcttctaaccatatctggtaaccaccattctactctttgtttctatgagtttgattgttttagattccacatataagtgagagcatgcagtatttgtctttctgtatttggctaatttcacttaataagcatagtattgtctaattccattcatgtttgtcacaaatgacagaatctctctctgttttaaggctgaatgcttttccattatgtatacttatttaggaccacattttctttatccattcatctgttgatgaacacttaggttgattccgtacttggtattttgaatagtgctgcaatgaacatgggagtgtagacatctctttgacatactgttttcgaatcttttgggtaaatacctagaagtgggattgctgggtatttatttattagtttaaaaaaaaaatcctaggctgggcgtggtggctcatacctgtaatcccagcactttgggaagccaaggcaagtggattgtctgagttcaggagtttgagaccagcctgggcaatgtggcaaaacctcctctaa

SEQ ID NO: 17871 - DNA, 416 bp, Homo sapiens
caagtgtggattctggaactcaaaaatgagaaggcagcttgccaagtaaacaggatgtagtggatggtgaaaagcgtgtatgggtgtgtatgaagaaaaatgaatggaattgtcaataacaatgctacacttgcagcctggaaagagtaggagagtgcagcgcgggcctcagcatctgtgttggcccagtctcttggttgattatcagagcacctgagctagccaggcctctgtcctgtcctaggtccagaacgtgcacactcactccctcagcactgaggtttcagcaaaatttaatgcctcagccccacgcattgcccgagaaagcactgggcattaaagatcagcgggaggccacaggatcacttttggccaggagtctgagaacagcatgggtaacatggctagaccccctc

SEQ ID NO: 17872 - DNA, 469 bp, Homo sapiens
agactctcctgcccatctctcctgtcaccacgggtttctccgaggcgtggcatcccggggttggcgtgatgtgggcatgagccactggctgcatgtaaaagggccgtcctgcccaccacactgccacacagatgcttctagactggggctgggctcgcgctccatccctgcccaccacaccgccacacaggtggttctgggccggggctgggcctgcgctccgtgctgctgccggcactgcgcggtttccatgtgatgtggctgcttcccacagccccacagaggacactcctgccccgtgggctgtccatgccctgagctgcctgtgttgattttggctggcctggtggggagtatagtctgacgggttgtgattttgccttttcctgatgttaatgaagttgaatgtttgttatagtcattcgggtcttgctcttcagtaaacttccttttgtttcttgcctttttc

SEQ ID NO: 17873 - DNA, 516 bp, Homo sapiens
caatcctctcacagcctcccaaagtgctggtattacaggcgtgagccaccacacctaacaaaagtttgctttttatctaaaatgacccaggcattgtcactgtactgctatttttttaaaaaaattttgttgttttgttgttgttgtcgtcgttatatagatgagggcttcctgtgttgcccaggctggtttctgacgcctggcctcgcctccttatacaccaggacagcaggactgagccaccacactacccaactgcttttatctcagtgaatgaaaatgatacttgcctggaggcttcccctcatctacccccatgtttctctatttattcctcagttaagtgggcagaccaacatccacctcagcaaaaacttcttcctgacgaatcgcgccagggagcgctcagacaccttcatcaacctccgggaggtgctcaaccgcttcaagctgccgccaggagagtacattctcgtgccttccaccttcgaacccaacaaggatggggatttctgc

SEQ ID NO: 17874 - DNA, 915 bp, Homo sapiens
ggcacgaggctgcctttctccaccagagactcttcctcagggaggacttggtgaattttattcaagcaaattttaagaaacgagaatgtgtcttctttaccaaagattccaaggccacgctcaatgaaatccttccttcctgtccacaccatcgtgcttatcagggagaatgtgtgcaagtgtggctatgcccagagccagcacatggaaggcacccagatcaaccaaagtgagaaatggaactacaagaaacacaccaaggaatttcctaccgacgcctttggggatattcagtttgagacactggggaagaaagggaagtatatacgtctgtcctgcgacacggacgcggaaatcctttacgagctgctgacccagcactggcacctgaaaacacccaacctggtcatttctgtgaccgggggcgccaagaacttcgccctgaagccgcgcatgcgcaagatcttcagccggctcatctacatcgcgcagtccaaaggtgcttggattctcacgggaggcacccattatggcctgatgaagtacatcggggaggtggtgagagataacaccatcagcaggagttcagaggagaatattgtggccattggcatagcagcttggggcatggtctccaaccgggacaccctcatcaggaattgcgatgctgaggtaccggtgggacaggaggaggtctgctaggtcacatggaagaaagaccatggcatgggcctgtggcctgaaccctggggctctgtgatggagccagccagatcatggggaagtctgcctttcaaggagtgcctttgggaccttaaaggaattgaaaacaaggatgacgtacctaattaactgctgggaaagagttaacaatgaatgttttgttcattaaaatgtgttctcagcaatctcata

SEQ ID NO: 17875 - DNA, 318 bp, Homo sapiens
tggctcacatctgtaatcctagcactttgggaggccagggaggagaattgcttgagcccaggatctcgtgaccagcctgggtctcaaaacaacaacaacaaaaaacccaaaatttacaacttacctactttgtcttcatcacatttatttaaaaagaaagagaagggggaaatggagacagtcttacgacttgtgggaaaagggaagggcagacactggtgattttcagtagggaagattcaagcacaggctgggaaaagattgattggggatgatgatgattggagcatcatcccttggagagggtatacaatggga

SEQ ID NO: 17876 - DNA, 505 bp, Homo sapiens
tggaagaagtgggcagtctgaattttcccacatggctggagcctccctgatccgaacagacccagttttctgcgggttctttgagtaatacctaatactgacatagtgctatgtgccaggtagcgttctccacacaattgaggtagatgctgttaacaccctccagtttacagatgaggaaattggagctcagtggggttatttctcagcccaagcttacatggctggtaaataggggagcaaggatttgaactcaaggtgtcttcagagcctggcctcttaaccctgaatctcccctttctaggttcttaaccctgaaactctgttctcagtcagtgatttgccatgatcattgagtgtaagagccatagatcatggaacagaatgttccaatggaatgtgcccagttacatgtgagctgaaattgcccattagttccattccccagatcaaacattgtagtgatagaaaaatagatggagaaagaaggtagacatatggatag

SEQ ID NO: 17877 - DNA, 263 bp, Homo sapiens
tttatctagaaaccaacatcacagatcctgagaaaggctggtaagaacaataaaaccagcttatttgaggggccacatatggaaagaaatgggaccatttcactttttaatgaaaaatcagtaatctcaaggtgaacaagagcttcattttccagctgcagatgaagtgacaagaggtacccaaattctgctccaatatgggttctgcctcaataacaaatccctagaccagtgattctccctgaccctgctgccaggcagct

SEQ ID NO: 17878 - DNA, 324 bp, Homo sapiens
agcaaacactactggggcattggttggacccagacactcaacaatagctcatttaatcctcacaatcaccctctgagatatgtagggactattctaatcattcccaatttacagatgagcaaactgaggcatagagaggtgcagaaacttgcccaagctcaaacagacttggaacaggggcagcttggcttcaaagtctgtggtcttagccacctcgcttcatcagctgcctctcctttccagaatgtgagaacctgagtggaagaggtacggcttttctgtatgggcttgaagccaacaatcacccccaactattcaccatat

SEQ ID NO: 17879 - DNA, 459 bp, Homo sapiens
acagattggaagcaggcttcccccaagtgtgtttccctttgtaatgcccagtgtcgtaacgccactatctatacttttcaacacaattcccaagtgctaccctctgcatggcagaaactatcaaccgtggatggtttctttttagcttgtccttcccgttctacagcatggaggttaagagctctggctttggttccaatcgtgtcccctttcctccctgtgtgttattgattgacctctctgagcccattgataaatggagttaaaaatttatactcactggggtggtgagaaggttaagggcaatgatgtatacaagacattagcatttgctataaggaggatgtatctcagttgccatatttgtatcactaaccatttgaagattttgtgttcaagatttggaagagaatcttcttcccaagccagcattttatattttgcattaaaaaaaaccac

SEQ ID NO: 17880 - DNA, 489 bp, Homo sapiens
tccagtatatcttggtgctgttgataaagagtcagtctgtaaaatatttgaagagattattctgagccaaatatgagcagccagtagcccatgacacagccctcaggagatcctgagaacatgtgccccaagcagtcaaactacaagtttattcatttcaggaagacaataaaatatcagtcaatacatgtaagaggtacattggttggctgggcctggtggctcatgcctgtaatctcagcactttgggaggctgtggcaggcggatcacctgaggtcaggagttcgagaccagcctggccaaaatggtgaaaccctgtctctactaaaaatacaaaatttagctgggcatagtggcaggcacctgtaatcccagctactcagggggctgaggcaggagaatcacttgaacctgggaggcggaggttgcagtgagccgagactgcgccactgcacttcagcctgggcaacagaggtgactccgtctca

SEQ ID NO: 17881 - DNA, 232 bp, Homo sapiens
ggaaggttttcagaaagcaatggcctattccttcatgttaatacattgcgaacttggatttggtgtaaatcaagccctgagaatattgctctgaatttctagcttaatttctgagcaacattctaaagcagttcattaatttactccaaaaacatttcttggacacttcggtgtaggagatatatattgcatggtccttaacctaaaaaattcagagttaaaacttggattt

SEQ ID NO: 17882 - DNA, 846 bp, Homo sapiens
tgggggggtttctttttgctttttaagggtatcatgacccctctttccaggggaagcacaagaagtttatgtgcccagctagatgtcccaagccaggaatgagagctgtgacatctgaacccgggttctgaaactccctgcctcagagcactgcctgctccatatgacctcaaggaaggccagactggagggtcattcacctttgccaccacgcttacaccaggccctgcccaagacctgttgctcctccctcccaggcagaaggaccggggagtcctatccaggctctcctggcttcttcccatcaacaaggccaaacacaaccactagcactttctgttgtcccaggagatccaaaatataccagcaatggtgtaaatgtcccaagacagaaaacagaaatggagtcaatttagtataagaggaccatgagttttggaaattatggaaagtcgacgctagcttagttctgtctcccaggctctcttcagataccagggatgctgcctgtgctcaccgtctttctattctcgacacgatcaatcaagggataccgtaacacatccgcgagggaactgccctgcactctacagagacctctctgcattctaagaaccacatacgggaggtttcatcagatgtaaggcacccaggatgagatgggggacagccttgtccctcactgcgggactgacctttgttccctaagcgtgccaaccagcccgcaatcaactgacctttgctagttgagcaatcgattcagggaaggaagagcagatacaaggagatcacccacccccatcaggtcccaggacgcccaggaaggctgaactcacatctttctgt

SEQ ID NO: 17883 - DNA, 426 bp, Homo sapiens
ctacttactttgtttaaaaccttgcacaaggtcaagtccttaggacacctgagtgtagggaatgagagatccaaaaaggcttcaccgcaaagcccatcatttagtaggaaactaggcccaatttaaaaggtggttagagccggggtggtggctcacacctgtaatcccaacactttgggaggctgaggcaggcagatcacctgaggtcaggatttcgagaccagcctagtggacatggtgaaactctgtctgtactgaaaatacaaaattagctgggcatggtggcatgagcctgtaatcccagctcccagctactcaggaggctgaggcaggagaatcacttaaacccaggaggcggagactgctgtgagccaggattgtgccattgcactccagcctgggcaagaagagtgagactctgtctca

SEQ ID NO: 17884 - DNA, 545 bp, Homo sapiens
tataacattttatttttttcttctcagcaaggcagtttacttctatagaagggggcgccctcacagatggagcaatgccgtgaagaggacgccctgcagacccactgcccaccggctccctcccccgcatccctgcaaccccagaggcgaagatggcctcaggagtgcaagtagctgatgaagtatgtcgcattttttatgacatgaaagttcgtaaatgctccacaccagaagaaatcaagaaaagaaagaaggctgtcatttttttgtctcagtgcagacgaaaagtgcatcattgtagaagaaggcaaagagatcttggttggagatgttggtgtaaccataactggtcctttcaagcattttgtgggaatgcttcctgaaaaagattgtcgctgtgctttgtatgatgcaagctttgaaacaaaagaatccagtacagaagagttgatttttttttgtaggcatgagaactagcacctctgaaaagtaaaatgatctgtgcaacatccaaggatgcaatgaaaaagaaatttcaaggcaaa

SEQ ID NO: 17885 - DNA, 415 bp, Homo sapiens
gcatatttttaatattttatctgagtgcagctaattattttgtttcctaagtatctaatttggtttactgaatgttttagcagtggtagtattgctaccatttgatgaagtaggaagtaaaatatgcatggttgttacttgttaagagttattacaattagtgtataataaatgtttgatttcatggttattatatacttagctcttttacctttctcattcatgaaagataattttaaaaactggtaaatttttaaacagtcattctgtgcaaaaatatagcctttaaacaacaacgacaaatatatatatatatttatctaccaacaactaagaagtatgatctaagtgcagttaattgattcacactgagcttgtaaatttgatttcagaaataatagttcaggatttaatt

SEQ ID NO: 17886 - DNA, 461 bp, Homo sapiens
tcactgagcacttcctgggaacttatttttttgctgctgagggggagtcagtctttaaacaaattgcaattgtgttagagaaaaaagctttatatgcaaaagtaattgatgcaagatacaagacaatgacaaggccatatggcccaagaggtgcagagtgtaagcactctggcatcaaagataaatagggaaaaactataatcataatacaatactgttaatagcagcagcaactgggccttgtgtttgcactgtgtgctgcattgagacaattaaatgttctatgctctggatccaaattcctaggtgtgaattcagcctattgggactgtcgcttgcttactctataaacttggtgaagtcacttcatttcccaatttttccatcaaaacaaaaacaattcccatcttaccagctggttgtaagaattaaaagatttataaagcaagcaacaaagtgcc

SEQ ID NO: 17887 - DNA, 753 bp, Homo sapiens
cagataatgatccattttaagctattggcattgcaataaatgcagttattggatgtgggtggggattctgaattttgttttctggtctatttgtttaaaaaaacaattttttttttctgaaacaagaaataaacaacagtgaaagtatcctcctgccaaatgcagcttgaagacagcctaatgacatttgggtcttaacaatcttccaaggacaacaattctgcctccctgggaagcctctaacatctgtatatattcagctccactgaatgttgcatgaagtttcattgtagaaaattgacacatgccttctgattaatctgttgtttcactcagtcttgtaaagggcacaccctgtagtttccatttgttcaatcatgtattttcctgctcacttaataaatctttttaaaaaataaagaaggaagataacaaaatgatgtcatatgaagcaatataacagtgaaagaattttttttttggtcctcattactttttgtgtcttttcacaaatctgttgagattaaggatagtgtgtaattcatgctaaatagctaggatcaaggtcttcacctttccaggaccaaaagcattttggagttccatggtgcttagttacagattcctgaggtcctgttgaaaaatgcaggacattagtttcagggatagatggaaaatatgaaaaagatgctaagaaatgggacaaggtgtcacagtcattgtgaacaatctagattatcacaaactccagtt

SEQ ID NO: 17888 - DNA, 2103 bp, Homo sapiens
tttctttaacagaattcagtatttaatatttctagtcaaaattgttataattagatttttgcttttttcatttaagaagcaatgagtgatccttgtctagtgtgtctcagttattactgtagtttaaaacaacaaacaagtattaccttccacagttctggatcaggaatctaggagctgcttaactgggtggttctgtcttgagatctcagaaggttgcagtcaagctgttagccaggactgtaccatcttgaagcttgacaaggctagaggagccatttccaagatgtcttgcttacgtggctcttgggcttctgttcctcactgtgtgggtatcacacacagtgcctgatgctcacgtggctcttgggcttcagttccttgggcaccagttgcctggtggacaactggtatgtggcttcccctagagcaggtgatataagaaagtgagcagaaaccatacttttttatgacgtagcctcaggtgacattatttctgccatattccatgagtcacacagaccaaccattgaatcagcttggtatagtgtgggaggggactgcacaaggatgtgaatactgggaggtggatatcattgggccctctaggagactggctatcactgctcagagaagatgctgggcttcgttgactcccaaggtcagggtagttttggttaggttgtgttttattagtctctaaaaggagtagttttctaaatgagggttataaagcactgcactttacagttattcgggatataaaagaaatagtgggtctaaaggctgtgctcttgtggttgggttttcagtggggaggggagactagtctgtctcagactgatgctgttctcactgatttgaatatttctgggaaattggatactacagtcacaaataggaacagtaagcctatagaagtttttcagggagtaaatattttctatggcagtgtcctgaattggttctcccttgcaagactgaactgtaggaacttagtcctagtttatgatacagccaagtaacatagtcacatgggaaaaagagcttgagtcagatttcttaatgtgtgttgttaacttggtagaacattgagaattatttaagtcagagaacgatctgttactggggcagaaattctcaaccttttcagttctccaaaatttaagatacttgatttcttaggtaaaatgtttttgtttttgttttggagacagagtctcgctctgtcgcccaggctggagtgcagtggcgcgatcttggctcactgcaaactccgcctcccagattcaagcaattctgcctgagcctcccaagtagctgcgactagaaagcgcatgccaccacgcctggctaattttttgtattttagtagagatgggggtttcaccgtgttgcccaggctggtctcaaactcctgagcttaggcaatcctcctggggcagcctcccaaagtgctaggattacaggcgagccatggcgcctggccagtaaaatgttttctatctagaatgaatcaaggtattttccttgctcagtagcttctagaataagaaaaaaatagcagcaagatctgattcagaaatagttgggagcagaaagttaatatgaaggagttgctacttgttaacagcctagagttgagatctagaagaattattacctttttaaatttgtgatgaaagcttaaatccagcatttgggaagttactctattggctgaactattttggagtttgtaagctttgtattagatattcctgatttaactgaaactaatttgccacatagctttaatttcatcccagttttacttgttttactgtcctcaaaaactcaagacatctgaactcaaaggatctaagcagtataaattaaagcacatgttgaatcactgtagctttcgtaggacatctgattataatgcttttctttgtttctttgtccatactgaacttgtctagtttatctttgagaaacatttgctagtatcaaaaatcttctgtaaagatttgaacaatcttgaattctccttgtcactagccatctcttcccctaaagtataataaaactgtcaggtactatatgtgtaattgcttatgc

SEQ ID NO: 17889 - DNA, 1979 bp, Homo sapiens
gcggccgcctactactactaaattcgcggccgcgtcgaccaggaatctaggagctgcttaactgggtggttctgtcttgagatctcagaaggttgcagtcaagctgttagccaggactgtaccatcttgaagcttgacaaggctagaggagccatttccaagatgtcttgcttacgtggctcttgggcttctgttcctcactgtgtgggtatcacacacagtgcctgatgctcacgtggctcttgggcttcagttccttgggcaccagttgcctggtggacaactggtatgtggcttcccctagagcaggtgatataagaaagtgagcagaaaccatacttttttatgacgtagcctcaggtgacattatttctgccatattccatgagtcacacagaccaaccattgaatcagcttggtatagtgtgggaggggactgcacaaggatgtgaatactgggaggtggatatcattgggccctctaggagactggctatcactgctcagagaagatgctgggcttcgttgactcccaaggtcagggtagttttggttaggttgtgttttattagtctctaaaaggagtagttttctaaatgagggttataaagcactgcactttacagttattcgggatataaaagaaatagtgggtctaaaggctgtgctcttgtggttgggttttcagtggggaggggagactagtctgtctcagactgatgctgttctcactgatttgaatatttctgggaaattggatactacagtcacaaataggaacagtaagcctatagaagtttttcagggagtaaatattttctatggcagtgtcctgaattggttctcccttgcaagactgaactgtaggaacttagtcctagtttatgatacagccaagtaacatagtcacatgggaaaaagagcttgagtcagatttcttaatgtgtgttgttaacttggtagaacattgagaattatttaagtcagagaacgatctgttactggggcagaaattctcaaccttttcagttctccaaaatttaagatacttgatttcttaggtaaaatgtttttgtttttgttttggagacagagtctcgctctgtcgcccaggctggagtgcagtggcgcgatcttggctcactgcaaactccgcctcccagattcaagcaattctgcctgagcctcccaagtagctgcgactagaaagcgcatgccaccacgcctggctaattttttgtattttagtagagatgggggtttcaccgtgttgcccaggctggtctcaaactcctgagcttaggcaatcctcctggggcagcctcccaaagtgctaggattacaggcgagccatggcgcctggccagtaaaatgttttctatctagaatgaatcaaggtattttccttgctcagtagcttctagaataagaaaaaaatagcagcaagatctgattcagaaatagttgggagcagaaagttaatatgaaggagttgctacttgttaacagcctagagttgagatctagaagaattattacctttttaaatttgtgatgaaagcttaaatccagcatttgggaagttactctattggctgaactattttggagtttgtaagctttgtattagatattcctgatttaactgaaactaatttgccacatagctttaatttcatcccagttttacttgttttactgtcctcaaaaactcaagacatctgaactcaaaggatctaagcagtataaattaaagcacatgttgaatcactgtagctttcgtaggacatctgattataatgcttttctttgtttctttgtccatactgaacttgtctagtttatctttgagaaacatttgctagtatcaaaaatcttctgtaaagatttgaacaatcttgaattctccttgtcactagccatctcttcccctaaagtataataaaactgtcaggtactatatgtgtaattgcttatgc

SEQ ID NO: 17890 - DNA, 442 bp, Homo sapiens
taggaagtaatttaggtaatgtacctaaaagaatgaggcagcgcctggtaatgataagcaattaatgaatgttaggtgggaaatttccggacaccaggggctaggattgggtaggaggagaggggcagtgattgttcatctgggtgtggggtgtgaaaatggttccaatatctgtatccccttctgcatagagtctggtactgcatgcacagccccagattgcttcaagccctggattcaaagggctgagtgggaaaaatcagggtaccaggggtcaggaaccaacaggagaccatccgtggagacccctttttcctttggttcccaactcctcttgcatttttgctctgcaagttgaagctgatttctcatttgccccaagctagtccctgaattaaggagtaggaagtggtagcgagagagctgatcctctctgtgcccc

SEQ ID NO: 17891 - DNA, 442 bp, Homo sapiens
agataccctttgcctgcttcagtgccaagtgaacatcgcagagatctgccttgtgtctccctgcacccctggctgcaggggagctcctgctgcctcctctggagctggtgggggcctcactgccatccttggatccctccctgccgtcagcctgctgtcctcagtgcactgggaggagggggtgcgctgtggttgtgttgagccttcataggtgtcctctggtgggcttagaatgggggttcttaatcccccccagtatgtggatagaattcaggggtctgtgaacatggatgaggaaaaaataacattattatttattactaatgtagctaaaatatgtagtgtgacctttgattataaatgtagacaataaacctcacagcattagaaaggcctgtgactacccacataacaaacaagcacatgtagtccctgaacccaa

SEQ ID NO: 17892 - DNA, 237 bp, Homo sapiens
aacactcacgtggtccaaggttatggcctcccagctatcccctggcctccaggcttaccttcctccatccagccctcctccccctgagggtcaacgtccctaaccacagttcaggactatcactcctgggctcaaaacctccactggtccccactgactctagaagaaagttcaaattcttctaccaggcagtcaagggctctggtctagctccaatcttcctttttaatcttgcct

SEQ ID NO: 17893 - DNA, 558 bp, Homo sapiens
gcctctggcttaggtactccagcctcacctggtctccagatggacctcaactgctcctgcgacactgataaaggatgccgggtttcggggccttgggatctccattttcatgccagaggatagaatgtccctgcggcaggagctgggtcctgcacttatgccagcttctgcaaatgcaaagagtacaaatgcacctcttgcaagaagagtgagtgtgggggccttccctgggaatcagggtgctgggcagagtcagaggagggaaccgagagctcagcaggcaggagcaggacagtgacaagcttcccacatcccctttctgactgctgctcctgctaccctgtgggctgtgccaagtgtgcccaaggctgcatttgcaaaggggcatcagataagtgcagctgctgtgcctgatgctgggacagccctgctcacagatgtagaaagagtgacctatataaacttggaatttttttccatgcaaccatgacccatttactgtatttgtctctcttttatgaaatatgtgaatgataataaaagttgttgacttattct

SEQ ID NO: 17894 - DNA, 928 bp, Homo sapiens
agactgtttctacaggtgcagtgtgccaatcagaagaaaggtggccaggctcaggagaaaggacaggagagtgactctggcaggcttgctccattgtagagatgagatacaccaagatagtgacttcccagcttttctccccaaagcacccctaatagctgagaagaatctggaggcatagctaccatcacagctacactaaccaccatactttactgtatccttcaggtgtctgtcctagctagttttgtggtctggctccttcagtccctgcaacaagcctgtttattttcattatattgatgaggttatagagcttggacaagttacatgacttttcgaagatcacatagctaataagtgtcaagagtcttattctcaaaaccctggtctgtccaactacaagcctgtgctcctgactccactattctgcttaccctaagcctaaagctgcccacttcaagctcaaatcctcttggaggcttcatgctttaaaaaaaaaaaatccatgcaattttttgcatcctaattaataatatatctgtgtgttttagtgtaaatttttttttttaaattaccaattcagttatttagctttttattccccaaatctttggtaccctaggcagatgtgtcatatttatcctgggctttatgtacctctggtttgagggactcttgaacttcattttaagaaacatggcccaatgagtacacagtcaagtcttcatgtccctgaacactgcattataaaatcagcactccttgttctttgtatatttgtgttatcaaataactatgtgattataatctggcttctcatataccataagtgcagaagagaatcaaaagattgagtacctgattccctaaactgtcaaatttcccgttgtatattaataaaatttgtatcgtttcacaaataaga

SEQ ID NO: 17895 - DNA, 243 bp, Homo sapiens
  misc_feature (168)..(170): n is a, c, g, or t
ttttcctgcctcaggtttatttgtacaaatagcacaggaggaccccagccccatgcagatgatagcccaggggtgggggtggggggtcgcaccagtccttctgtcctcatgttggcagagatatctactctgaagcctttgtaggggcctggtgcgaccccccacccnnncccctggctaccatctgcatggggctggggtcctcctgtgctatttgtacaaataaacctgaggcaggattaa

SEQ ID NO: 17896 - DNA, 600 bp, Homo sapiens
ggaggatccctgagtgggggttgaggctgcagtgagccatgatcaagccactgcactccagcctgggcaacactgagacactctctcaaaaacaaaaataaaataaaggcaaggataaaataaaggcaaggatatggctatcactaaagtcagaatcatgagcatgtttaggaataagctggctatgttcagggaggcacagacaggggctttggggagggatcttctcacttctattccttcaactgggtattaatgagttattttttaaaccttacatacaagttttttttgcatttttctaggtactatatacaacatgtgctatatacaacagactcatgtatataaatgtgtatttgttgttgagaattttttttggaaggagacacaggaaattggtaagcctgattacttccataaaggagaactggggttggggtatctgaatgacagaggctgggaggtggaagctgtagtgagccatgatcacaccactgcactccagtctgggcaacagaacaaaacctgtctcaaaaaaaaataaatagaaaataaaagaaagaaaacaaaaataaaacatgtagttttgagccactt

SEQ ID NO: 17897 - DNA, 300 bp, Homo sapiens
ggctgacagtaagttatatacttgctatcagcttgtgttttttttttttaagccttattagggtgtgtctaaaatacttctactctaacactagtttactttttttttttcttttgtgagacaggatcttgctgtcacccagggctagagtgcagtggccaatcatgggctactgcaggccttgaactcctgggtttaagcaatcctcctgtctcactctcctgagtaggctgaaccacagggtgcatacccaccatgctagggctaatttttaaattttagggtctccctttgttgccc

SEQ ID NO: 17898 - DNA, 503 bp, Homo sapiens
gggaaaaaagcttttagggcaaaaatgctttggataaaattccaaaggtttaaatttcacacctttgacagaagtcaaaggtctagataaaacctagatatatgcaggaaagaaaaagatcttctagataaaactgagatatttgcaagaaagaaaaaatgaagacgtcatttttattttctaaaactcactacaggccgggcattgtggctcacacccataagcccaacatttgggagatcaaggcaagaggatcactttaggctgggagttggagaccagcctgggcaatgtagtgagactccatctgtacaaaaaaaatttttttttaattagtcaggtgtggtgacacatgcctgtagtcccagctacttgggaggctgaagtgggaggatcacttgagaccagaagttcaaggctgcaatgagctgtgatcatgccacttcactccagcctgggtgacagagcaagaccctgtctatctctacaataaataaaataaa

SEQ ID NO: 17899 - DNA, 758 bp, Homo sapiens
ccacctataattttcccttgtaagacaattatttcaatgcttgtggcatttcattttatgtgaactcctccaggtttgagtgagctattcaggtcctgcttttctatttgtcatcactccttagaagggaaccaatatgtgctgagcccccctcatggacctgttcacacaatcccattcattccttccccgccaaggtatcattcaccttacctgacagatgaagagactgaggctcagagaggctgggtaactcgcccaggattccaacctcacgctcttcccaggccctgctcctctcctagagctcagggaccacttctgacacttttcttgttttgagatggagtctctgtcacgcaggctgaagtacagtggtgcgatctaggctcgctgcaacctccgcctcccgggttcaagtgattctcctgccttagcctcccgagtagctgggactacaggtgcacgccaccatgaccagctaatgtttgtatttttagtagagacggggtttcaccaggttggccagcctgatcacaaactcttgacctcaggtgatctgcctgcctctgcctgccaaagtgctgggattacagaagtgagttctgacccatttttaatgctgtccctccaagccctcctcaccgccttccatgacatctggggcaaccacagcctagactgtcaaggggtacccacccatctcggagcaaacagagcgcatcgctttccttccttgggccctgactgcacccgcc

SEQ ID NO: 17900 - DNA, 481 bp, Homo sapiens
gctgagaaagctcttcatttccttcattaattttgaaattcctttattccttctacttgttaatagtttagtattattttatgaaagtagatttccaagctgttagggattttatgtagtgttgtgttttttttgttttgttttgttttgttttcagataaaatttattttgaagagccagattagaaacaaatatttagaggtttaagacttttaggccgggtgcagtggctcatgcctgtaatcccagcactttgggaggccgaggcaggcagatcacaaggtcaagagatcgagaccatcttggccaacatggtgaaaccccgtctctgccaaaaatacaaaaagtagctgggcgtggtggtgcgtgcctgtagtcccagctacttaggaggctgaggcaggagaaacacttgaacccaggaggcagagattgcattgagctgagatcacgccactgcactccagcctggcgacagaa

SEQ ID NO: 17901 - DNA, 481 bp, Homo sapiens
tgtacttcctactggacttttccatttgctgaagtcaggagaaccaacatggcttgtttgaattaaataaggtcactgttcgaagaatcaatcttgaggaagagaagtaagagccagtagtagtattgcaaagcataaccctgttcccaaagacacgctgagccctggagactagggcatgaggcaaaggagctgaagaacgctcaaaactgttctcaatgattattccattttggggcaaatgtacatgaaaatggtagtaccagagaaacagctatatgccagaaagcctgagctctgaagagaggcatggagaactcaatttcactaagtccagaggatgactaaaaatgccaagataggctcaaggtgaaatagatcccactggaagttcagaaggacagttttgagggtttctaccccagggaaaccacttagaattgtaaactggatgtttacatgatgaaattggccttgagcc

SEQ ID NO: 17902 - DNA, 485 bp, Homo sapiens
gcaaaacatttaatagaagtattatacaggagagcaaattgaggctcacaggggtaagggaacctgcatgtagtcacacaggcaagctggggccaagcacgactcccctactctgactcaagtgctctttctgccaacaggttccaggtctgagggctctagctatgggatggtgaagagacggagttggcctcgggccttggtcacgctgaaacaagaagtggcccaggtgagcctcatacagactctgtacccaactcagggaacaggagaccactgtgggagaaaagtatgaccaggaagatttttatgtatttgcagaaaatatggtgcaatttctcaatgaaattgatttctgagaccacagagctgccatttaaaaaaaaaaaaaaaaggccaggtgcggtggctcacacctgtaatcccagcactttgggatgccaaggcaggtggatcacgaggtcaggagttcaagaccagcctgg

SEQ ID NO: 17903 - DNA, 424 bp, Homo sapiens
agtacactttgattaatgttattaattggctattgaatctatccaactgattggtctgctcctgattaacacccttttccagtccaaaaggagagcaagagaaatcctgcctggagccctgaagaaatagaatatataatctttgttgcattcttacattttacctctccaagaagagtttcataaaagtaaataaagttaggttagtctaatacatgtttagtaaactcatactgcctccctgaaatgttcacagctttcttaataacgtaggagccatggccacatgggtgaagatgctaactcttctagaaaagaacaacccacggcaacagatctataccaacatatacatatgagacaagcatgctccagctttttactttagaaagggatgggggaaaaggcatgctttgtagggaaa

SEQ ID NO: 17904 - DNA, 335 bp, Homo sapiens
acatatgccctcctggcttctgcacatctagattcctgttcccctctccaaaagctgttgctagcagtcacatttttttctgctgatcaaagaagaaaagcaaaatccatctctccttctctccctccctccttttctctctccctccctccttaaatccctttttcccacttaacttttggaaaaacaattgcgcaagaaattagaaaaccccaaagatagtattttcaaatttcaacaaaattataaaagatacacctttttatttgtgcctcaggatgcacagaaaataatggattttcatatggaaaaaaataaatttcaatgtttcaaga

SEQ ID NO: 17905 - DNA, 302 bp, Homo sapiens
ctcaagccatccacccgccttggccttccaaagtgctggaattacaggcatcagccacgacggccggcacagaggtctaattattaatcagaaggttgcctgttgaggccgggcatggtggctcatgcctgtaatcccaggactttgggagcctgagacaggaggctctcttgagctcaggagttcaagaccagcctgagcaacatggagagaccctgtctctacaaaaaatacaaaaattagccgggcatggtaactcacgcctgtggttccagccacatgggaagctgaggtgggaggat

SEQ ID NO: 17906 - DNA, 492 bp, Homo sapiens
ctctctctcatgctctaataactttgttcccggttactcagtccctgcctcctattaacctggccttttctacccttcagttaacctaaccccactatcaatcaccttgattgtctggccctcagaatgtactttctgcccctagtcatctcacccagcccagtgctggccaatagaaatgtaatgagagccacagatgtaatttaaaattttctagtagccacagtgaaaatgtagaaggatataggtgagcttcattttagtactgttttatttggcacaaaatatcaaaaatattatttcaacacataatcaattatgaaaattattaatgagatgttttatactcctcttgtaaaagtaagtctttggccaggcatggtggtttacacatgtaatcccagcactttgagaggccaaggcagggggaccacttgagcccagaagtctgagaccagcctgggcaatgcagtgagacctcattctgcgaaa

SEQ ID NO: 17907 - DNA, 420 bp, Homo sapiens
tttggaaatttggggaatttccaaaaccatgggaaaggccacagctacaaaggccacagtccacagtcaccctcaagcagcagtaaaccttaaaggaacccagggtcacccacccatcccggctcacctgtatccatttaccttcatcctaattcttaagaaagttgtctttaggaccgggcgcggtggctcacgcctgtaaccccagcactttgggaggccgaggagggcggatcacgaggtcaggagatcaagaccatcctggctaacagggtgaaaccctgtctctactaaaaatacaaaaaattagccgggcgtggtggcgggcgcctgtatcccagctactcaggaggcttgggcaagggaaatccttttaccccgggggcgaaggtttccatgtgtgtggacgcgcccattcac

SEQ ID NO: 17908 - DNA, 584 bp, Homo sapiens
cagtaatttgcatagagaagagaaagcagttcctacaaggaagcatggggcagtggagtaagaacatagggtgaggaactgacgtccattggagtatgaaaagatgacttctgggtgaggtactcaatgtctggtctactctgctggagtaagaagcgtggtgggtagggggatgtggaaatacaatgttctaaaatgtcacctaaacaagaactggttggtgcaagagggcattcccttagaacatcttagcatgttcacagaacaggcaccatcacccaggcccagcatgggggacagggaagaagttgtgcttcttcaaaaacggttccttttcaacatttttattttttatttgtctgggttttttgtttgtttgtttgtttgtttttgtttttgttttgagaccctgtctcttaaaaaaaaaaaaatgctgggagcattttgcatgcctgagtgcctgaggtcccagttactccacagactgaggtgggaggatcttgagtccaggaggttgaggctgcagtgagccatgatcataccactgcaccccagcctgggtgacagtaagacactgtctcagg

SEQ ID NO: 17909 - DNA, 307 bp, Homo sapiens
gaatgttgagccatgtgattgctttagttattcaaaagtaaataaagttttaaagtgttgaaaaatatctaaaaaataaaaacaaaaaaaaaggaccaggcatggtggcatgtgcctgtaatctcagcactttgggaagctgaggcaggaggatcacttgagcccaggagtttgagaccagcctgcacagcacagtgagactctgtctctaaaaaacaaaaagaaaagaaaaacagaccgggtgcggtggctcacacctgtaatcccagcactttgggaggctgaggcaggtggatcacctgaggtc

SEQ ID NO: 17910 - DNA, 159 bp, Homo sapiens
tttcaaaagtttgaaatgtaaaattaattatgattttcaatgtaacccacatacattattaataattgttacattattaatggctcacacctgcacaaggattgtattcattatttacatatgttaaatgtgtttttaaacttaatactcttttcttgc

SEQ ID NO: 17911 - DNA, 532 bp, Homo sapiens
ccagcatgagtggtctatctagtgagtggctgggcacagttgtccccatccatggcggatgcctggtggcagcacccactgggtctcagcccaagtcttccgtggatcctggcaaaatattgatgtccttttccacataatatttaaggtatttgtgtagagtcttatgtacttgcaggagcagttggttaaattaggtacctagaagttgagtaattggcttgagaaacgtgtgcattgaaaatcggtaagttaccaggcgcagtggctcatgcctgtaatcccagtgctctgggaggctgaggtgggttgattgctttgagcccaggagttcaagaccagcctgggcaacatggtcaaaccacgtctctacaaaaaatatgaaaattagctgggcttggtggcgtgcgcttgtagtcccagatactcaggaggctgaggtggaaggatcacttgagtcagggatatgaggctgcagtgagccgtgatcgagccactgcactccaacctgggcaacaaggagaccctgtct

SEQ ID NO: 17912 - DNA, 288 bp, Homo sapiens
gttaaagccaacaagcaccagatcagacaggctgtgaagaagctctatgacagtgatgtggccaaggtcaccaccctgatttgtcctgataaagagaaggcatatgttcgacttgctcctgattatgatgctttcgatgttgtaacaaaattgggatcacctaaactgagtccagctggctaactctaaatatatgtgtatcttttcagcataaaaaaaataatgtttttcataagaatgacaacttaattagaatcaaatctataagctttaagattttacgtttct

SEQ ID NO: 17913 - DNA, 433 bp, Homo sapiens
ccgttaaaaaatactgttaagaaaatgaaaatgcaagccacagacttgaagaaaaattacaaaacacatccgacaaatgacttgtgtctagaatatataaagtcctaaaaagaagcaaccgtccataagacacattcactcgtgtgccatgtcagtttaccattgccttggcaacacccggacattacttccccttcccatggcaaggactcaacaacccagaagttaccacccttttcctagaaactcctgcataatctgccctttaatttacatataattaaaagtggctataaataggactgcagcactgcctctgagctgttactctggacgcactgcctatggggtagccctgctctgcagggagcagcacctgtgctgccgctatgcatggccgcttcaataaaaattgctgtcttaacaccaccag

SEQ ID NO: 17914 - DNA, 188 bp, Homo sapiens
ctggacagacaaggaaggctcaaaagctaaaatagctattgcattagcaaagtgacgtcagcgcactgttgctttaatgtaatggtttttatagtttgtaaaattttaaaatcaggcatagattttttgaaaaggaagtttccccgtgtggttttggagtgctctgtcagctcatgcagtgaaagcct

SEQ ID NO: 17915 - DNA, 463 bp, Homo sapiens
aaattaataattttcataacataaaagttaaaacttacgaatgacagtagaaaccatttttaagaggtggaaatacaagaccttcattgggagaagatatttgcaacatgtaacaaaaaactaattcaggctacccaaaggcctcccaggattcagtaagaaaatcactaacaaacagtccaggtgcagtggctcacgcctgtaatcccagcactttgggaggccgaggcgggcggatcacctgaggtcaggagttcaacaccagcctggtcaacatggtgaaaccccgtctatattaaaaaacacaaaaaattagctgggcgtggtggcaggtgcctgcaatcccagctactcaggaggctgagacaggagaatttattgaacttgagaggcggaggttgcagtgagccgagatcgtgccattgcactccagcctgggcaacaggagtgaaactccatctca

SEQ ID NO: 17916 - DNA, 502 bp, Homo sapiens
gcatcttgtgttgtaatatttcgtattttgtccttggttcatgaagcatttgcatgtcttacaacaaatcttgtaaccatgcctgactttatattactgaggtgatttttggaaagcctttaaataatcacagaataagggctggttgccaagggaatcaaccatgtgattagagggttagaactttcaaccctccctctcgacctctggagaagggaggactggaggctgaattaatcaccagtggccaatcatttattaataatcaatcatgtctatgcaatgaaaccgccattaaaaattactaattaaaagggtttttggagctactgcatgatgaacaagaacacatctgtgtgctggaagggtggtgcattccaaactccacaaggacagaagcttctgtgctcaggacccttccagaccttgccctatgtaccccttcatctggctgtgcatctgtatcctttaatatatcctctgcaataaatctgtaatcgta

SEQ ID NO: 17917 - DNA, 392 bp, Homo sapiens
ctcaggggtaaggaatcaagacccacctagtgtgatgaataaacccagactctcagcaatgcagaaagaaaccagctggcgacttgggggaaaggatcctcagatacaactgcgaccaggtaactctgtgcacagaccaagcctagtcaatgtaaagacaatgaggatgaagacctttatgaagatgacttccacttaatgaataggtttttggagctactgcatgatgaacaagaacacatctgtgtgctggaagggtggtgcattccaaactccacaaggacagaagcttctgtgctcaggacccttccagaccttgccctatgtaccccttcatctggctgtgcatctgtatcctttaatatatcctctgcaataaatctgtaatcgta

SEQ ID NO: 17918 - DNA, 512 bp, Homo sapiens
acacagcttcagctccaggaaggtgggctccttgctggccccacctggagctcctctgtccagctgtttatgcacacagcaacctgggcatgcctctcccaagtgcctaaccgtgccaggtgctgggttcaaaaacctccccctcaagagaggctgccacatgcctcgtgttgagagaccaatgccccaggagctgtgggatccctcctccccaacagagccaaatcctttctttcagggctttcaagttccactcatcctgggacccactccttcctgatcttggcctcgctgctgcccacgtgtagaatcaagtcactctctgactgctacgtgttgttctgggcttaacccttgctgagtggtcagttctgagaaggcagaaattgcctcttgttttatgtgtcttcctattcctctgtccagtcccctgtggacacagggtaggtgcttaataaggatggaatcttggactgtctgaaggaccctcattgctcattggtcccctgccc

SEQ ID NO: 17919 - DNA, 398 bp, Homo sapiens
atgcagcataccagggagtgcagagggcctcgagaagcttgaaaggttaaggaagagaattctccccggagcctccagaaaggagcgcagctctgccatcgcctggatttcagcccaataacaccagtgttagacttttgatctgtagaactataagacatttgtgttattttaagccactacatttgtggtaatttctttacagcagcaaaagaaaactaatacaccagtggaaattaaaaactacataaaataataatgttacatatcaaagcttttgagattctgttaaggcagtaattatagaaagtagacagccttaaaatgcccatactgaaaaaaatttcagataataaagtatacaacccaagaagttagattaatagcagagtaaatgc

SEQ ID NO: 17920 - DNA, 1248 bp, Homo sapiens
gtttttgtttgtttttattgttcttatttgttcattaaacaaaaacttttgatctctgcagtattcccggcattatggtaggcaatgggtttatagaaatgagagatacattcccaacctgagtggaaatccagttcagtttaattggatctttttcctgatttcccatgaaaccttggactaattacttctctaagtttccatttccttgtatgtaaaataggattggatcagatggttagtttataaagtttccttcaccactgtaagattgtttggtttaaagtaaataaatatgaccaccttccttgccattttaaacttgaagctattttctttaattctgcctgttgtagtttgaatttcaaagtatcttactgtaggtgttactgttgttttacgctgaagaagtaagaagccaaattttatagagatggttttatcattaagtaaatgatgaatttatttattagttagaatcattgtaaacatctattaatgtggttactttgcccatggtgtgacatagttcatattgcctcaggtgaaggcttcctgttatactcacaacaacaaatatctcaaataatttttccagaagtcattatccttgctgcttttttccctctccctctatccagtccaccagcaagtcctgttagctatactttcaaaacatatccatatctatccatttatttccccctccctttactaaccaccaggatccaagctactattgtctttcacctgcactaccgcagcagcctcctacctggtctctctgcttctcttggtgctccccaataattcattcaccacagcatgatcttttcaaaacttctgtatgattacctgttaaaaaactgcagtctattctcatttcaattaaaatgaaatccagttcattaactttgttgtctgaagctggatgtgacctggtgcctgcctgcctctccacctcattgagtttccctgtcccctttgcccactatgctctagccctgtgctatccagtaagctagccactagtcttaggagctgttgaacccttgaaatgtggctagtccaaattgagatgtgctgtgagtataaaatataccttgaatttcagacttatgaaaaatcatgtaatattatctcagataataatgttatctcattaataatttttatattatttacatgtttatgataacattttggatatattgggttaaataaaatattttgttaaaattaagttta

SEQ ID NO: 17921 - DNA, 801 bp, Homo sapiens
cagaaggaggtgttctcaactcccccactctcaacctttggttagcttaaacctttcccttattactcagctctttcatgatagtctatagttacatttaggcctttcccaactgaaagagcaaaacaaacccttcttcactcttgtgtcttctctaattactactttcttgttccctccacagcaaaagctctggagacagaagtaggtaaacactgttcctgcttcctctcctcccctcccctctacttgcaacccattgcagcctgctctgtgccttcacgccactgcctctgccggcaggagccactagtggactgtattggatgaattcgaggaatgctctttaaggccttatcctacttgacatctctgtagcatttgacacttgaccaccatcaccttaaacactctcctcccctgttgtctgggttttcttctacctttttgtacgtgccttaatctcctttggaggctgctgttcccactcctcctccagggctctgtcctcaaccatcttttctcattctgcagcctttccctggtgacctcatttgcacttaagattcaactgccgttgctcacgaacaccagagtgattttctagcctaaaactcttaaaacgtattttgagatctaggttctgttatccacctgcccactggacttttctagtaggtgttgcacaggcatcttaattgaacctgtctaaaatggatttttttgtgcccccctctccctgtatcacttcacacacagaatgttctccttcctcctggtcatcagttctcaattcctttc

SEQ ID NO: 17922 - DNA, 446 bp, Homo sapiens
aagaactaggctgatgtcagttatgcatcctgctattagctcccttgttatttaataccatggaataaaaaggcagcgtgaaagtctttttgccactattgcctggcttttattgcagctactcttgcatctataatagtggaagggaagagcaatacggattgtaaaatgaactccatagaagatccactgtggtcagtagatcaaggcatgacagtattgacgttaagaatggacactggagtccagtatatacggattcaaatctgaatgctcagtagctgtatgacttgggcagttacttaacctatttgggtttgagttttcttgtcttcatctgtaaaagtagggctgttagaggtttaagtgaatatatgtgcacatatgtatatatattaagagatatacatgatatatataaataaaatatatatctattcccttga

SEQ ID NO: 17923 - DNA, 321 bp, Homo sapiens
cctcccaaagtgctgggattataggtgtgagccactgcacccagctagctttgtacttcaagaaaaaaaaaaaaaaaacctttctttttaggaaaaccagactaattggtattctggggtttatacatgtaaaaacatatttgcatatgaaaggtaatgtacaaaagctaaaatagtagagtgatgaaatgtaggcaattgctattatttggaatattctagaatagtgtttattaaaaatgtaaagtacagacatgagaagccctaatcgtgtgccataagtaacaatgcaacataataaagacattaaaatctcaagtt

SEQ ID NO: 17924 - DNA, 429 bp, Homo sapiens
taatgtcattatgtacatgatcttaaattatccttttggaagataagtctttttcttttttagtagaaatattaggtcctctgttttcattgttaaccacatcagaatctgtattattacttttttttttggaaatcaattgcagtacagcaggcttaccatatggtggcacccaaaagcccagaaaccaacatcatgcggcccagtattagacatgtgttcaaaaatgtaggcagtcagctttctagtaggtagcaacaggaaataaagcgtcgtaagacagtcatcttaagagggtgctggaaatgttctacatttttatctgggtggtgattacataggtgtatatgtaaaaattcataaagctgtatttttatttgttcattttattatttgtatgttgcacaacaataaaaaaatttaggctgg

SEQ ID NO: 17925 - DNA, 400 bp, Homo sapiens
tcccacagccatgcagttaaggaaaagcatggactctgaagtcaaggtaacctggattctaatcagacccaggctaatctctggcatcctgaccctgggtacactgcttaaccactgtgagcctcactttcctcatcggtaaagtggggaggctgggcgaagtggctcacacctgtaatcccaacactttggatcgcttgagcccaggagtttgaggccagcctgggcaacatagcgagaccctgtctctacaaaaaatttaaaaactagccaggtgtggtggcttatccttgtggtcccagctactctggaggctgaggtgggaggattgcttgagccctggaggtcaaggctgcagtgacctatgatcatcataccactgcactccagcctgggaaaa

SEQ ID NO: 17926 - DNA, 1321 bp, Homo sapiens
actgcttcaacggaactttggtgaatatcaagatgcacagatgctcaaatctctgatataaatggcatagtatttgcatataacctgtgcatatcctcccaaatactttatatcatttctagattacttataatacctaatagaatataaatgctatgtaaatagttgttatactgtattgtttggggaataaagacaagaaaaaaaagtctgcatgtttcaaatacagatgctatattaaactttttggatccaagcttggttgaatccacagacataagagcccatggatatggagggccaactgtataatgtaaaaaaattccttctcatgcgctagtttccagttttcatcctttgtagataaccaggggcaacagtttgatataggtcttttcacctctctttgtgtgcatatacaagtaattatttgcagatttgtctgcatattcagaatttaaaaattacacttttttttagcagctttagatgtacagaaatttgagccgatagcacagaaagttcccatattcccttcccttccctcgtttctcctattgcaaacatcttgcattaatttggcacatttattgcatttgatgagcccatatcaatatgttgttatttattggtctatagtttacatagggcttattctttgtgttgcagtttttttttttttttgttttgtttttttaagatctcactctgtatctcaggctggagtgcactggtgccgtcatggctctgcagcctcgacctcccgggctcaagcgatcctcccaccttagcctcccaaagtgttagggttacagacatgagccactgcacttggccgagagttattttttacaaaaatgggatcaagcccagtggtggcttgcgcctgtagttccagctacttgggaggttgaggtgggaggattgcttgaggctaggagtttgagaccagtctgggcaacacagcatgactctgaccagtctgggcaacacagcatgactctgtctcttaaaaaaaaaaaaaagtgggctgagggtggtggctaacgtcggtaatccttgcactttgggaggccaaggcaggtggatcacctgaggtcaggagttcgggaccagcctggccaacatgaatgaaaccccctctctaccaaaaatatattaaaaaaaaaattatctgggtatggtggcgcgcgcctgtaatcccaactactcaggaggctgaggcaggagaatcgcttgaaactgggaggtggaggttgcagtgaaccgagattgcaccactgcgctctagcctgggcaacaggagcaaaactccatctca

SEQ ID NO: 17927 - DNA, 531 bp, Homo sapiens
tatcacacaaaatcaaattccctccgcagagagcttgaattgctgggaagagcagcagagtcaacacaacaatcacacacccctgtcctcggcgcagaattggagattgtatatatttatttggaaaaggcctgggctacttgtggcatcctgccaagacaatttgaaaggtatcaacagtttaaatgacattttcaccttcagcaaatacatctctgcctgctcggaatgcgacgctatcctgccccggcaatctatgatacagtcgcgtcagaaataggtgtcagctctcattacattcccgaggataaatcccacttatcagggcctgcagagtcccaggcctcctgacatcccatttcagacagcagcctcccacccccgcccctcctctccctaagagatgccgtcggagttttcaatcgctgaacttctgctggatgggaggagacgggcaggcatcgctgagctcctgctggatgggagaagatggagaggcagcctgagattttcggggcatggtggacagga

SEQ ID NO: 17928 - DNA, 383 bp, Homo sapiens
tcacctagaagagttcctgcccatccttcttccagatgccacctctcccatggcccatccaggagagaggtaaatgaggcttttctgtatgtctctgaatttcagttgaagccaaattcttgaggacaataggtgaaaagaactcctacattctactgagaggtgctggctcctgctacacctggacatcctgcaccctgacttgacaccccctccagcccatgcataaaggctggaaaaggattcttccaagggagggacagctggtaggtgaaacttacccctcgctcccagccaagcctggagagaatatgttccatgtccccaagtctggaggtgacagagacaggtacatgactctctcaggaaaaactgtgaaggcc

SEQ ID NO: 17929 - DNA, 1946 bp, Homo sapiens
caggtctcccggcaacggctgcggcctcgcccacgttatggcgcccgaggagaacgcggggaccgaactcttgctgcagggttttgagcgccgcttcctggcggtgcgcacactgcgctccttcccctggcagactgtgaggcatcctgtgtgtgtgaagcacccgccgtcagtcaagtatgcctggttctttctctcagaactcatcaaaaagtcctcaggaggctcggtcacactctccaagagcacagccatcatctcccacggtaccacaggcctggtcacatgggatgccgccctctaccttgcagaatgggccatcgagaacccggcagccttgattaacagacgtgctgtattgcccagaagccatcgtgtcgctggtcggggtcctgcagaggctggctgcctgccgggagcacaagcgggctcctgaggtctacgtggcctttaccgtccgcaacccagagacgtgccagctgttcaccaccgagctaggccgggatgggatcagatgggaagcagaagctcatcatgaccagaaactgtttccctatggagagcacttggagatggcaatgctgaacctcacactgtaggactcacacatgactccaaagggattgtgagaatcaagtcactctcgtgggaagaatttttatatgggaaagtggataaaactttcattggactggaatgtttggagattattaaattccaaatcaggaatcaaaactgccctctaataagacattagctgtctaggcgtgtgggtgccccctttctgccagcagttctggttctcaagaaaatcatcataaatcagacatgaaaattctggctccaaaaatagcattttctttctgcaaataaaaacgtgtgtatcaaggatgacgttcccccaacgtggacacactcggttcctcagaaagccaagcccgctgcagctgccacatcccagggcttatggtgcagcaggcgcttttttcaagacaggaatgaaagtgttaggaacatggcagaaaggtgacacctggagaccaaatgcaggatgaggagtactgcagaggtcacagggaagtcacagaacagtaatacgctagcaggggcatggggcatgaagaacagaagacaggaagcatttcagagactccaaagaagaaatcagggccaaccacagcttcccgggtcattcaccaggtgacaccactgccgtcatttcagcttctggccactgggaggcgctgctcgaaaggctttgccctgagactccaagaagctgcgggaaggacagcaggggccctggggttttagcctctggcccaggagttatgtgtccataaccaaagggagcacagtctgcacccagctctcatcccatcagagctgctgagactcttgcaggttcttccagaactggtttagcttgcctgcaggatcagaaaagtttgagaaaagcatctgcaaaatgctaaagagcagagcttaactcattgcctgtccccaccccatcccaggtcaccacttggatgaccccaggtccccgacccaacaacaacccctcccaagtccctaactccctcacttggacttgagacccttcacaacccccctcacttggacttgagacccttcacaacccagcagcgctccacctccaacttgacatcatgctttctggaaacttccccgtatgtcccactttcccacacttggtgccctggagcaccttccggcctctacatgctgtacgttcccctgtgagcaccctcctctcggcctctggccaacacagtcccacccatctgtgggtaacaagggggtgtgggtgttcttttcagccttgctaaactgtctgaatcaaggatcacaaactacagcctgcaggccaaatccagcccacagcctgtgtttgtaaataaagctttgttggaacaaagccacac

SEQ ID NO: 17930 - DNA, 1928 bp, Homo sapiens
caggtctcccggcaacggctgcggcctcgcccacgttatggcgcccgaggagaacgcggggaccgaactcttgctgcagggttttgagcgccgcttcctggcggtgcgcacactgcgctccttcccctggcagagcttagaggcaaagttaagagactcatcatattctgagctgctgcgggatattttgcagaagtcctcaggaggctcggtcacactctccaagagcacagccatcatctcccacggtaccacaggcctggtcacatgggatgccgccctctaccttgcagaatgggccatcgagaacccggcagccttgattaacagacgtgctgtattgcccagaagccatcgtgtcgctggtcggggtcctgcagaggctggctgcctgccgggagcacaagcgggctcctgaggtctacgtggcctttaccgtccgcaacccagagacgtgccagctgttcaccaccgagctaggccgggatgggatcagatgggaagcagaagctcatcatgaccagaaactgtttccctatggagagcacttggagatggcaatgctgaacctcacactgtaggactcacacatgactccaaagggattgtgagaatcaagtcactctcgtgggaagaatttttatatgggaaagtggataaaactttcattggactggaatgtttggagattattaaattccaaatcaggaatcaaaactgccctctaataagacattagctgtctaggcgtgtgggtgccccctttctgccagcagttctggttctcaagaaaatcatcataaatcagacatgaaaattctggctccaaaaatagcattttctttctgcaaataaaaacgtgtgtatcaaggatgacgttcccccaacgtggacacactcggttcctcagaaagccaagcccgctgcagctgccacatcccagggcttatggtgcagcaggcgcttttttcaagacaggaatgaaagtgttaggaacatggcagaaaggtgacacctggagaccaaatgcaggatgaggagtactgcagaggtcacagggaagtcacagaacagtaatacgctagcaggggcatggggcatgaagaacagaagacaggaagcatttcagagactccaaagaagaaatcagggccaaccacagcttcccgggtcattcaccaggtgacaccactgccgtcatttcagcttctggccactgggaggcgctgctcgaaaggctttgccctgagactccaagaagctgcgggaaggacagcaggggccctggggttttagcctctggcccaggagttatgtgtccataaccaaagggagcacagtctgcacccagctctcatcccatcagagctgctgagactcttgcaggttcttccagaactggtttagcttgcctgcaggatcagaaaagtttgagaaaagcatctgcaaaatgctaaagagcagagcttaactcattgcctgtccccaccccatcccaggtcaccacttggatgaccccaggtccccgacccaacaacaacccctcccaagtccctaactccctcacttggacttgagacccttcacaacccccctcacttggacttgagacccttcacaacccagcagcgctccacctccaacttgacatcatgctttctggaaacttccccgtatgtcccactttcccacacttggtgccctggagcaccttccggcctctacatgctgtacgttcccctgtgagcaccctcctctcggcctctggccaacacagtcccacccatctgtgggtaacaagggggtgtgggtgttcttttcagccttgctaaactgtctgaatcaaggatcacaaactacagcctgcaggccaaatccagcccacagcctgtgtttgtaaataaagctttgttggaacaaagccacac

SEQ ID NO: 17931 - DNA, 2107 bp, Homo sapiens
caggtctcccggcaacggctgcggcctcgcccacgttatggcgcccgaggagaacgcggggaccgaactcttgctgcagggttttgagcgccgcttcctggcggtgcgcacactgcgctccttcccctggcaggtgggcggcggggcgagcggagaggcccgcgggggtcgcgggagtccaggggcagacgggatgggtctccgtgctgaaacccccggcgctccggccacagcttagaggcaaagttaagagactcatcatattctgagctgctgcgggatattttgcagaagactgtgaggcatcctgtgtgtgtgaagcacccgccgtcagtcaagtatgcctggttctttctctcagaactcatcaaaaagtcctcaggaggctcggtcacactctccaagagcacagccatcatctcccacggtaccacaggcctggtcacatgggatgccgccctctaccttgcagaatgggccatcgagaacccggcagccttgattaacagacgtgctgtattgcccagaagccatcgtgtcgctggtcggggtcctgcagaggctggctgcctgccgggagcacaagcgggctcctgaggtctacgtggcctttaccgtccgcaacccagagacgtgccagctgttcaccaccgagctaggccgggatgggatcagatgggaagcagaagctcatcatgaccagaaactgtttccctatggagagcacttggagatggcaatgctgaacctcacactgtaggactcacacatgactccaaagggattgtgagaatcaagtcactctcgtgggaagaatttttatatgggaaagtggataaaactttcattggactggaatgtttggagattattaaattccaaatcaggaatcaaaactgccctctaataagacattagctgtctaggcgtgtgggtgccccctttctgccagcagttctggttctcaagaaaatcatcataaatcagacatgaaaattctggctccaaaaatagcattttctttctgcaaataaaaacgtgtgtatcaaggatgacgttcccccaacgtggacacactcggttcctcagaaagccaagcccgctgcagctgccacatcccagggcttatggtgcagcaggcgcttttttcaagacaggaatgaaagtgttaggaacatggcagaaaggtgacacctggagaccaaatgcaggatgaggagtactgcagaggtcacagggaagtcacagaacagtaatacgctagcaggggcatggggcatgaagaacagaagacaggaagcatttcagagactccaaagaagaaatcagggccaaccacagcttcccgggtcattcaccaggtgacaccactgccgtcatttcagcttctggccactgggaggcgctgctcgaaaggctttgccctgagactccaagaagctgcgggaaggacagcaggggccctggggttttagcctctggcccaggagttatgtgtccataaccaaagggagcacagtctgcacccagctctcatcccatcagagctgctgagactcttgcaggttcttccagaactggtttagcttgcctgcaggatcagaaaagtttgagaaaagcatctgcaaaatgctaaagagcagagcttaactcattgcctgtccccaccccatcccaggtcaccacttggatgaccccaggtccccgacccaacaacaacccctcccaagtccctaactccctcacttggacttgagacccttcacaacccccctcacttggacttgagacccttcacaacccagcagcgctccacctccaacttgacatcatgctttctggaaacttccccgtatgtcccactttcccacacttggtgccctggagcaccttccggcctctacatgctgtacgttcccctgtgagcaccctcctctcggcctctggccaacacagtcccacccatctgtgggtaacaagggggtgtgggtgttcttttcagccttgctaaactgtctgaatcaaggatcacaaactacagcctgcaggccaaatccagcccacagcctgtgtttgtaaataaagctttgttggaacaaagccacac

SEQ ID NO: 17932 - DNA, 1835 bp, Homo sapiens
caggtctcccggcaacggctgcggcctcgcccacgttatggcgcccgaggagaacgcggggaccgaactcttgctgcagggttttgagcgccgcttcctggcgtcctcaggaggctcggtcacactctccaagagcacagccatcatctcccacggtaccacaggcctggtcacatgggatgccgccctctaccttgcagaatgggccatcgagaacccggcagccttgattaacagacgtgctgtattgcccagaagccatcgtgtcgctggtcggggtcctgcagaggctggctgcctgccgggagcacaagcgggctcctgaggtctacgtggcctttaccgtccgcaacccagagacgtgccagctgttcaccaccgagctaggccgggatgggatcagatgggaagcagaagctcatcatgaccagaaactgtttccctatggagagcacttggagatggcaatgctgaacctcacactgtaggactcacacatgactccaaagggattgtgagaatcaagtcactctcgtgggaagaatttttatatgggaaagtggataaaactttcattggactggaatgtttggagattattaaattccaaatcaggaatcaaaactgccctctaataagacattagctgtctaggcgtgtgggtgccccctttctgccagcagttctggttctcaagaaaatcatcataaatcagacatgaaaattctggctccaaaaatagcattttctttctgcaaataaaaacgtgtgtatcaaggatgacgttcccccaacgtggacacactcggttcctcagaaagccaagcccgctgcagctgccacatcccagggcttatggtgcagcaggcgcttttttcaagacaggaatgaaagtgttaggaacatggcagaaaggtgacacctggagaccaaatgcaggatgaggagtactgcagaggtcacagggaagtcacagaacagtaatacgctagcaggggcatggggcatgaagaacagaagacaggaagcatttcagagactccaaagaagaaatcagggccaaccacagcttcccgggtcattcaccaggtgacaccactgccgtcatttcagcttctggccactgggaggcgctgctcgaaaggctttgccctgagactccaagaagctgcgggaaggacagcaggggccctggggttttagcctctggcccaggagttatgtgtccataaccaaagggagcacagtctgcacccagctctcatcccatcagagctgctgagactcttgcaggttcttccagaactggtttagcttgcctgcaggatcagaaaagtttgagaaaagcatctgcaaaatgctaaagagcagagcttaactcattgcctgtccccaccccatcccaggtcaccacttggatgaccccaggtccccgacccaacaacaacccctcccaagtccctaactccctcacttggacttgagacccttcacaacccccctcacttggacttgagacccttcacaacccagcagcgctccacctccaacttgacatcatgctttctggaaacttccccgtatgtcccactttcccacacttggtgccctggagcaccttccggcctctacatgctgtacgttcccctgtgagcaccctcctctcggcctctggccaacacagtcccacccatctgtgggtaacaagggggtgtgggtgttcttttcagccttgctaaactgtctgaatcaaggatcacaaactacagcctgcaggccaaatccagcccacagcctgtgtttgtaaataaagctttgttggaacaaagccacac

SEQ ID NO: 17933 - DNA, 906 bp, Homo sapiens
cggtaccacaggcctggtcacatgggatgccgccctctaccttgcagaatgggccatcgagaacccggcagccttgattaacaggtgacctcggggcacagggcagggcaccgaggcaggcttaccctggtgcagtcgaaaacacggtcccctttcctcccgccaggactgtcctagagcttggcagtggtgccggcctcacaggccttgccatctgcaagatgtgccgcccccgggcatacatcttcagcgaccctcacagccgggtcctcgagcagctccgagggaatgtccttctcaatggcctctcattagaggcagacatcactggcaacttagacagccccagggtgacagtggcccagctggactgggacgtagcaatggtccatcagctctctgccttccagccagatgttgtcattgcagcaggtaatgcccagccccgggcatcctgtgcaggcggtgtccttgcagctctacccagctcttggctctgggaaaagggaacaatggacactgtcgggcatggacgtgatggggcttccagaagagttactctgggcctccagggtgacatcaaaggacaggggtgcctcttaaggtgaccttcaagccacagccctgttgttggagacaggcatactcccgttacagtcgtcaccacatggctctgtcccagagccatgccctgtgtccttcagagaccgcaggaggaaaacaaccacttctggtacgaggtcagggcccttgagagaaggtgctgtttggctgggccaccaaaaacccctcacccctgtgagcacactcagtcccctctctggtggaacagagctctgcctgtagtcctgggtcccagccctgaaacccacaggtccagcggtggccagggacacaggcccaccc

SEQ ID NO: 17934 - DNA, 493 bp, Homo sapiens
cactagggatatttaattcaattcatatacattcagttcaattcaaatcagcatatatttgctaaatgctttctctttgccaggcattgcagctgcatctggaggagggttgagctatttcaccatatagatctcctacgactttgagactgtgatgtaaagaaataggcaactgtgatggttattttatttgacaacttggctgggctgtggtacccagatatttggttaaacgttattctggatgttttggtgaaggtgtttttggatgagattaacattttaaccagtggattttaagtaaagcagattactttccataatatggacgggcctcatcaatcggttgaaggccttcataaatcaaagactgacctccccagagaaggaaggaattctgccagcaggttgcctttggactcaagcagaaactgagtccccacaatcatgtgtgccaattccttaaaataaacatctatatctataatatcta

SEQ ID NO: 17935 - DNA, 130 bp, Homo sapiens
ggtaaccaatgctgtcactatgttaatctgctgttcttcatcactacactacggtttcctccaaggttaatgttgtgagaaacagaatgaagggtggaagggaactctttgctctctatctgcaactcca

SEQ ID NO: 17936 - DNA, 1705 bp, Homo sapiens
  misc_feature (1294)..(1294): n is a, c, g, or t
  misc_feature (1309)..(1309): n is a, c, g, or t
  misc_feature (1354)..(1354): n is a, c, g, or t
  misc_feature (1370)..(1370): n is a, c, g, or t
  misc_feature (1392)..(1392): n is a, c, g, or t
  misc_feature (1401)..(1401): n is a, c, g, or t
  misc_feature (1409)..(1409): n is a, c, g, or t
  misc_feature (1430)..(1430): n is a, c, g, or t
  misc_feature (1563)..(1563): n is a, c, g, or t
  misc_feature (1637)..(1637): n is a, c, g, or t
  misc_feature (1699)..(1699): n is a, c, g, or t
aaattttaggagattctttgaataaacctcatttagtctctctcctataaaaggaaaagcagaacctcaagtccacatttattttgcatttgctctcttgttcacattcttctctatgtcaataaaagttagatggcattttttatagctgtgtatcaaatatgtgaatatagaattccaactaaaatagcaatagatgggaaaactttctagttcattcattgtcaaaagtgagtgctgagaggacatctgaagccccacctaaaagtaaatcctcagcaggaaagataatgcagataaattttgggtccaaattcttaatctgggcaaagaaagaaaacaaacacacttactagatggatttttcataaaagttcctttccatgctgtccaaagtgattaaattagtcatccattcttttatctcttctgttgataatcatataagcaactcctgaatctatatgagtattcagtcttctttattattcagaagatttgccattttagtcaactcaaatatcagtactatttcatagcatgctagttcaggttacacaaagcccaccaggtacacctggaatctagccagaatgcagtccaatcatgagcactttaaacatttacctcattttactatttgtcttagagctatggaaacattattctgtttctggagtatctcacacttcaggagcattagttgaagcagtacagatacagttagtgtcctctctggacattcatttgttaactttgaaacaactggattcaaagaccttaagttaaaaacaaacttattgcctatttatggaagaaaaacctgttattttattctggtttaaaagttaaaagcgttgcctctaccactggataacctgtttgcacaattaaatgatttccggagttaaaacattatgattataaattttctctgaataagttgataggagattattcctgttcttataatgaggtttttcccttagcacttttcaagtgtgcctttcaaccaatgatatgtttttaaaaaataatgtaacttaagtaccttatgattaaccatcatggagtctagaaaatgtggagattctaaaacagtattgtctgaaaacatagaatagttggacttaatgttctcttcagaaaatctaactgtaaacttggtactttcctacagttcacttgtgaaaaataatatctatgaagatggagagattcctaaaggaattccactattttaccatagagcccaaagtttccttgacccaagcaagaccatcaaggagctatntggattgtatgatantggacctcagtagaactacttttactgaattgctggagccaaaantaggctgcagcaaganaaggcaattagggtacaaaatntaaggaagntgtcattntgaggatcatatgatagatgntgggttaagacatatggctgggcatggtggctcatgcctgtaatcccagccctttgagaggccaaggcaggtggatcacttgaggtcaggagttcaagaccagcctgggcaacatggtgaaaccccacatctnctaaaaatacaaaaacagctgggcgtggtggcatggacctctaatcccagttacttaggaggctgaggcagganaatagcttgaacccaggaggtggacgttgcagtgagccgagatcatgccactcgactccagngtgggc

SEQ ID NO: 17937 - DNA, 249 bp, Homo sapiens
gctgagtttgcattgcaaaaggaaggtagagcacgggccatctctccctcctccacttatatttattctgcacctacctgcacgtgacactctgctattcttcagagaaggttctgacctttgtgaccacgctttacattttcacattgcaaggcaatttctaaagagcttttcccagctaagatctcatttgagcctcacaacaactctggggcaaaggagactgtaaaacaaacaaaaacaaaaaca

SEQ ID NO: 17938 - DNA, 826 bp, Homo sapiens
ataactactgctttgaggatatttacccataatatcaaaggactaactaccacataaatgtatcacgcatacttatttgcatctctaaaatttgatgtcatattggaaagaatttttagtgaaatagtaaatacagatgatgagaatgccacctggagaaagagataatgtgattgttaagaactcaaggattgttttattatatggctgttattagaaaaaatgatcttaagaaattaccttggctttagcctgtgtagaaaattaagtattaaaatataagagatattttaattttgcaatgctgactagaagtaaaatctaagaagaaaatttaactttccttggaagttacattttagtgtttaatttctgctaccaattcatttctgaaagcacatgaccattcttagctgatttgctgctgctaggaagtctctgtatactgtattatgatagagaatgttgtgctgtaattcatggaattctgaatgaattgccaaatcaagatacggttgtttgatgtgaggttctgggaagaaaaaaaaaaaaaaaaaaaacggcagagtttataccctccccttgttttcttgctttattctgggcaagtttgaaggggaaaatttgtgctgctgttagtgcaactgctgtgtatgttgagccactgttgtcatgccagccaggtgcaaaggcagcttagctactgaggtagcgaatgttctgaggacattctagactacagcttaggtcctttttcaggctcatttgcttgtgcttttttgttgaatgattccaatcgtaaataaagcttttaataattttgtga

SEQ ID NO: 17939 - DNA, 277 bp, Homo sapiens
gcagaatttgtgcatgggatttctctcagatctcccagtatttgtctgcactgtttcatttgctgcagtcttttatctttaaataaagaccttattaagtatgctgtatgaatttatatgttccaaagagaataagtgtgttctatgaagtctggtggctctttcaaatatctgaacttgagaaacctttgcaatgcctcaaacaaatacttgataacttccaaaaatagaattaacataagcaatattcacttactacagtgcaataaactagatg

SEQ ID NO: 17940 - DNA, 305 bp, Homo sapiens
ttctttagtcaattagttctcatctccagaaaaaggagacaggaagacagaccgtccctatatagatcggatgtgtttcagcaaggctggctctcaaacaaaaatgttgaaacacatggtgttttctcattgatttccataacagaatttgggatgcacacttctgaggaaaatcaggtcttctgcagaacaagggcacacacaaagccacacacacagtattttccaaaagataaaatgggatcttgaggcactgtgtcttctggcccatgggaaccacccagggtatgccctgtgttctttct

SEQ ID NO: 17941 - DNA, 221 bp, Homo sapiens
gaggaatatgatttcagtttcatgaacatcaagtttgaagtacagatgggacaacccaagagaagtgttcctctgatagaaattcagaactggatgccaagcagagttcaatattagagataaattcagagagtcgtttccagatgtgttagtgttaacgacatggaatatatgcagttccctgaaactgggcctggagactcaaaaaagacccctcaatc

SEQ ID NO: 17942 - DNA, 903 bp, Homo sapiens
caaccttttaatatgcgtatcttaaaggaaaatattataaaacaagatattaatactaaagtgttaacattaatatgttgttctcatggaagaaaagtagaaaatgtgataggcttagaaattattttttatcagcattaagtgcttcaatttctccccataaagattctaaggaaatttcagttcctcatattatagttttccccataatttaatattactaagtatttctctgcccagtaatgttgatgcagtttgcataaatagccttggaagtaaggaggcaggacagaaagccaaatatcgaaatctctggccttgatttagtgacagtttattctaatggggaccataggtgttattagtaaaaagatagtgtacaaggcctaagttcagtttacattgttctttgaaatgagttcatcttttgtgttgaataattgtattctaagtaggagatgcctgtatttaacataatcatgctttctatataatcaaatatgtatttgttggaatactggtagaaataaccttcccttcctccactgtgcagtggaaaaaaaactcccgatttatactgtatataaattaggaaattatgttacatatttacatttttaaaaatataaaaatgacatattattttgaagtgattgtattatagtttctgaagcttatgactggctataaatataacaacatacccatgagaaaccagaccaaaattgaatatatatcatcactgtgaccttgaacttatagtcatttgggataaaacagagtgtgccttgaaatgataaagagtgccctgcaattttataactgtacattttattatgggtggtcctctcaaattggccccaaatccttgtcttcgaggttggtgaaataaaagtttaaaat

SEQ ID NO: 17943 - DNA, 301 bp, Homo sapiens
ggagatcatagattttggatatttcaacatctttactgattctatcactgtttaaagaatttaactaagtgacctaaacatgctccttcggacagccaacaacaaataagaatttcttgatttgcttcaaaattaaaatcgctattttctctattatagtataatagttatacgtttagtaaatgcttgttgattaatgtctagtaacaaataagttttataaatttaagggtctgttacttactattacgctaagaagatcctcctactactattaaattttctagttggggaaaaaaaa

SEQ ID NO: 17944 - DNA, 342 bp, Homo sapiens
gtgctgggataactgctagccatctgcagaagattgaagctggatccctaactttcactgtatgcaaaaattaattcaaaatggatcaaagatttaaatgtaaggcctcaaattattaaaatcctggacaacaacctaactcttctcaacattggccttgacaaagaattttttactaagtccccaaaggcaattgcgataaaaacaaaaacgaacaatgggacctttttaagctaaagagcttctgcacagcaaaataaactatcaacagaacaaatagacaacctacagaatgggagaagataactcaacctatgcatctgacaaaggcttaatattcag

SEQ ID NO: 17945 - DNA, 296 bp, Homo sapiens
ttttttttttggtaggtttttaattactgcttcaagtttggaattccgtattggtctgttcagggtttcagtttcttactgattcaatcttgggagagtgtgtatttctaggactttatccacttcctctagattttctagtttgtgtgcatagaggtgctcattatagtctctgaggatcttttgtatttctgtgagatcacttgtaatgtcacttctgttgtttctgattgtacttatttggatcatcttttgtttgtttgtttgttaatctagctagcagtctatcaatatgg

SEQ ID NO: 17946 - DNA, 310 bp, Homo sapiens
gcccaagcaggtgagcatcaagcaatcgtggggaactgtagggggccacagagcagattttcaagaagtcaccagtggagttcttgctgctagtaacccagaaatgagaaaagtgtccccaaaaggccacctggaggttatacctagaagtagatggagatggccagaaatcttgtggagttctgttcagatgtcgctgcattttggattattgactttccataacacaaataattttgttttagttgaaattgtatttttctgtcaaaaccctacattcatattaaacagtgcaaatcttagagaaaca

SEQ ID NO: 17947 - DNA, 371 bp, Homo sapiens
tgaaatgtgagaagaacatgagatttgggagaggccaagggtggaatgatatggttcggctctatgtccccacccaaatctcatctcaaattgtaatcctcacatgttgtgggaggggcctggtgggacgtgattgaatcatgggggtggatttcccccttgctgttctcttgatagtgagtgagttcttgcaagatctggttgtctgaaagtgtgtgacatgtctccctttgctctttctccatcctgccaccatgtgaaggaggtccttacttccccttcaccttctgccttaatgttaagtttcctgaggccttccagccatgctttctgttaagcctgtgggtcaattaaacctctcttcataaatt

SEQ ID NO: 17948 - DNA, 329 bp, Homo sapiens
ttagttatccctttaatagcatgtttcctcggttaatgacaaactttcccactaggctgtctttgtgaccgcaggagccctgctcttgtttacccctgtggtaatccagtgcctatctcaggctggcacctaggcattcagagggataaatgaaggaaagaattggccaacctgttgaccaatgacgttggctggcctccttccttgcttggtatcggttttgtttctaacacttgcaccaagaaaaccacacagggttatactgtctgcctagtttaggaacttcctttaacagtatttctttactctctgagtttctggtgagctaa

SEQ ID NO: 17949 - DNA, 457 bp, Homo sapiens
tcctgtgcccctgaaaccttgagtacagccaagctaagcattaaggtgggaaaagtttttcctcaaatcagttgccttggctgtatctcatgctcatgcacagatctagcatgctcttactttctctcttctgtatattggaatctacatgatttggccgaaaattgagcttttgtcgtgaagctgtccctcttcttcctaccattgccctcattagaccaaagtaagcagtacccctcagcaaaccaccttgaactcaatttttgtattttttctaatcgttaacactttgtcattagccaggtgtagtggtgcgtgcctgtagtcccagccagctacccgggaggctgaggtgggaggatcacctgagcctgggaggtcaaggctgcggtgagccgagatgacaccactgtactccagcctgggtgacagagtgagagcttgtctcaaaaaaaaa

SEQ ID NO: 17950 - DNA, 417 bp, Homo sapiens
acatctgctcaacaattccctgtccagtctcagacttgttattgatctttgtagccaaggataattatttcaaaacaattatgtaatcctcctcattttttcatttaaaaacccttgtcttcctttatctccctgaatttgcacatatttcactatggtatacagattcccattgcaatgctctattgctaaacaaatatcttttctttcagagagactctttctgtttgttaaataggttgacatatatggtgtttgaaacaggacctgaaaaagttcactagcagaagaaatggtgaccaggcatagtgtctcacacctgtaatcccagcactctgggaggctgaggcgggcagatcacctgaggttgggaggtccagaccagcctggccaacatggtgaaaccccgtctatact

SEQ ID NO: 17951 - DNA, 587 bp, Homo sapiens
atagtgcttttgtgaacattctttacatttctcatatatatgtacatggatttccttaggttgtattcttacaaatgacatttttcaggtcatagggcatgtgtatcttcatcattattaattaggccctatttcttcccccaaactggttgtaacaatatataccacactcagcagagtttgcgtgttcatgatgctccaggctcctgccaacgctgatatgtcagactttaacattttcaaacttgtcgtgtatgaaatattttctaactgtgttgtaatttgtttttccctaattactaatgagattgatcacatagtcacatgattattattggccacttgggatttttttcctgcgaagcgccttttcaagtctcttgctgatttttcttagggtcgttaatgtagtagaatttgtcagtctgttcctccaagattcacactatattctggtcttctctatcttgaggtcatgaaaatgttcatattgttttctaaacatttctgaaaacatacttttgacttttaagtctaaagtcttcactttacctgagtcccccttctttacttttttccttccatct

SEQ ID NO: 17952 - DNA, 302 bp, Homo sapiens
agacaatgaggttattggactgatcagagaacctcaatatataataaaggaaaatgtataagttataaaaggtatggtcttagaatcaaatgaaaaagcctgggtgacaaagtgacagcctgtctcaaaataataataacaaaaacaataacaaaagaaataaaaatatatataatttcacatattttgtgctaaatcagcttatattagatttttatgtagagaaacagcaagatctacaaatataaaagaaacagttattaaaagttttagtttttacctatcatttaatgcaaaactgt

SEQ ID NO: 17953 - DNA, 408 bp, Homo sapiens
tatactgtctccacatactactatttacaatactaaaacatctgaggagctacctattaataaaataaaggatctgatttaatattttggtatttttatatatttgaataaaatatgacatgtaaaagtattattattatttttttaattcctgggccaggcacggtggctcatgcctgtaatctcagcactgtgggaggccgaggcaggtggatcacgaggtcagaagttcgagaccagcctggccaacgtggtgaagccccgtctgtactgaaaatacaaagattagctgggcttggtggtgagtgcctgtaatcccagctactagggaggctgaggcaggagaatggcttgaactcaggaggcggaggttgcagtcagccaagatcgtgccactgcactgtagcc

SEQ ID NO: 17954 - DNA, 304 bp, Homo sapiens
tttttatggattaaggtaaaacaaacacctttcctttattttagaaacacgttatttttgggaaccgagacgggaggattgcttgaggccgggagtttgagaccagcctgagcaacatagtgagattccacttgtaccaaaaaaagaaaaaaattagccagatgtggtggcatgtacctgtagtccccactacttgggaggctgcaatggaaggattgtttgagcccaggagatccaggttgcagtgagctatgaccataccactgcactccagcttgggcaacagagtgcaaccctatctcgg

SEQ ID NO: 17955 - DNA, 401 bp, Homo sapiens
gactgtgttttccaaaccaaaatctgacacacatgggctggcagataggaatgtagttatgaaaagaacagggcaggatgttgggaatcatgatcatggtggaaaatttgggatttgcagtcccgacttgtggagaagactccagaacccagaagtgctgcccttgagtcctggccatgactatctgtgtggccttgagccaggaggtgctgttgcctctctgtgaccctctggaaggtgcagacatcagccgctccaggacagtgagctgccaagtctctcctaatcccaacagtctgatcagctcctatcaagatgcccaggccggcttcccaggctgccctggatcaagccacactaaacttaatccagcaggaatgccatttcttttgagttttttt

SEQ ID NO: 17956 - DNA, 215 bp, Homo sapiens
tgatttattgatgagtactgcttccacagatgaaacgataggaattgttgaagaataaactgctaagcactcccttccctgggctctgggccccctgctccaattataagcacatactccaggctgagatttcttgtcttgtgttcacagggaattcacatagtaaggaggtcaccggactttctaatattgaaaaactcagtctcagtagcagc

SEQ ID NO: 17957 - DNA, 10317 bp, Homo sapiens
  misc_feature (5000)..(5000): n is a, c, g, or t
  misc_feature (9302)..(9302): n is a, c, g, or t
tgagcgaggagctcccctccctcgctcgctcctcgcaagctcccgctcgctccctgcccactcccggggggacgttccgtgccgcggccgccgcggccgctgcttctttcacactttagttgggagctgcgcgccgcgctcagttactggagagctggccgcgcgccgccgcctcccgcacgcttgcacgcgggcccggcttcggggttttgggttcttactccaagcggcggggaggagggggagccccggacacactgtggggaggaggaggaagaagaggaggagggaggaagaaaaaagacgaggaggacaggggcggggggcgggaggcttgccaccttcagcccccccgcgaacgcccaaggtgcacacatcttgaccaactcagcagcaaggtggattttctttgtgtttaaagaaaaaaaatgtccctgtgtctgtagagatgatttgcagttcagcccggctgaagctgaccgaatgagactatgggctgtgcctccgccaagcatgttgccactgttcaaaatgaagaggaagcccagaaagggaaaaactaccagaacggagatgtgtttggcgatgagtataggatcaaaccagtggaagaggtcaaatacatgaaaaatggggcagaagaagagcagaaaatagcagccaggaaccaagaaaacttggaaaaaagtgccagctcaaatgtaagacttaaaactaataaagaggttccgggattagttcatcaacccagagcaaacatgcacatctctgaaagccaacaagaattcttcagaatgctggatgaaaaaattgaaaagggtcgggattactgttcggaagaagaggatatcacatagcaccaattttaccactcaaaccaggagctactactgtgtaaataggttacaccccagttgaaatctttgcaaaggtcggttctattcagcgaacagcactatagcaaaagaagatcgttccatattgtacgccccattaaattacagtgtttcttaatgaacttgcaaaggaatattgctaaaaacaaacaaaaaaaactgttatcgaactttctttgttgctgctagttaaaacttgttgcaacttttcacttctcttgtgtccaggtatgcagcaaaattctgcaatttcaccttaaagatactgttggttttacagatgctctccaacctattttctataagatgaggtagtggtgaactcagataacaaacttctcttctaaactggttctgcttctaagacaagcatctcctgccctctctccttcctccccatctctcgcacgcagtctagagatggactgagccttgcttctcactggcagtgttgagctttggagatgggatggttgctatgccaagccttgtttctctgctcagaagaagtagagaagctattatcaattaaaagcatgctgtgatgtgactcctggaagtgacgtaggagtgagtggcaggttgtttgatttaataggtatcttaatcaagaattaagcttgcaacattggctttgctcagatgcagatggaagtgtgatcacaatcattttgaatccctcttcctcacttttttttctaagaaaataaacattttactgtttttatggatccttgtcttctcccattcatccagctcagtgttttaagatgatcctgggtgcagaagttgagccctcctttgcattgacactgataattagcctatagggctccctacccttccattaagaatctaccaagcattagcaaggctgaaagtggtctaagaggtgaggggacatcctatgactttttaggaaggcctgaaaccaccttgttacctttcattttgttagcaaataaaccatcctattttgtaactctcccccttcaaaatgctacatgagccttgccacttcctttttctcttacttccagcacactagacatagcaaaagtgtttgcctactcaaaaacataatacttttatgctgatgatggtatttggagatgtgaaagccaaaagcccctggcagtggtggggaatgttgactgagtgttcagcagagtttatttttccatactatatgaagagaatgatctcttctcaaagacagaagtgatatttttaacaaatattgtcacaagtaaatagcaatcaaaaggagaaaataacttttgtatttttttaatgtgtttgatagctttgacgagggttctctttgttactttcaggggagggcatcctattaaatgccacgccagcagtccgggtctgggtttgtcccacaaaatcacaggagcactgtatgttcctctcttttggagttgtgactttgaagggcctcaatattagccacactgccgcctgcagaaggtggagagttaagatgttctatgtcaatttgctcttgccgaaaagatgagcctcgattttaaaatctatccacatccaactgatggcaccattgatgtgcaaataatgagattccctatctccttttagacctgggacggcaaaagggaagggaaggaaacttagcagagtgctattgactatagattcacatattagcaacaaaatcccgtaattcttttggccaacagcagctattttggggagcagctgtggctgttacataaatagagatgcagccaaaattttaggccttttatcctgcttctagcagaaaaatgcagggagagtcaagtagtctagggtttcaggttgcctcccctcatatggtttttggccaagtgactaaaacagttttccacaactgtaaacaaactggtaagccccacctcaaacttgttcactggggactttgcttaccgttctgtgggtgaccttttccgggatttcttgttcttatcaagcaagaattaagcacatgctaaacgtcttccatttgacttctctactcggtgtctcagacagtgtcttcccagaaaaccaccaccctctacccaaagatgaaacatgctcatgtcatttttctcatggtcacatttaacagttttgacatgttatacttgcgcatagatccaagcgtttcttgggaacctgacttttgagtgtttaataaagccggaagtggtgttgccctgaaccagcagattttcacctgggttctggctccggtgtttaacactggatacatctttgatgtgcgaaagtgagttcatcttcagacacatttggtacatccagaaatagatccaagaaatggggtggttgagtgggtccgcacgaaatgcttgattatgtcagcaacacccaacactgtctgttttccatttgttggttttaatcataaaattgtcaagtgattcgtgttgtactttatttttgtgccttctgaacggatctaaaacaaaagtattttgccttttttaccccacgtgtatctgaacattaagcagattggctcagacaccatgaaaaggatactccaatgtacgtgctggtgcactctgctagttgttatctctgtagggctcaagaagctggaaggaggaagggagggtaagtggcctggtgagtggaggtagaaaaatgatgagaaatgaactgagagcattaagcagagagggttgataggctggccgtgtccggggtgaaattggaaatccagctgcctagtggccagtgggtggggcaagactgtcaacgagatttacagctggcttacacatgccttatgtcctctgagttgtagagttgtaaaagttcagcagtgtgtgcacagctttcttttggttggcagagattcaggatcatggagtactgctctcataattgaagacgtgtttgttattggcagagaaccttaaaaaaggcctttacctcagcgatgcttcctagccccaggcttgcagagaacacagagtggtgttgtggtctatttagggacaaagaaggtataaagtccagagatgagaaaactgggtcagccctcagaaactgcagcagccacgcacacagaagcctgctggaagacaggtctctctccgtccacagtgcccatcatctgagcctgggctgggatgactcaacttagcaaagacggacccaggaggagtgctggttcttcagtctttgtactggccccatcctctcctcactgtaatgtgaggaagcacctctgtgtcagggctcacctgggcatccaaagcggccacgcccacaatccgacagcccccaggagcaggtccagggatgatgcagcccccttcttggtcccatgtgatgtcatcctgctttgttatcttcttataactttatcctgctataactttatcctcttcccagcctcatccctgtttttctgttagggcaagactcttccataagcctgctaaaaaacagagatgatacctcttacaaactttacctcatagcctgtgaagcaggttggcatgtggattacaagtcctgctttgacactgggcaagaatttaagattgttctatctctactagtcatagaaaagaaacattgttaaacatgttgagttttaaaggaagaaatattttcaaattcttaatccaagaaaatactgagttggaatcttagacttcgggactctgacacgttctttatgaaaggcaaaataattggtatctaaagttctctccttcctgcctcccctaaagaaaaaggatattagattgcacactataattttacataagatctgccttccacacttccctgctggaaggcattctcagagctttatgtcttcgtacctctcagagattggactttttcttgtttaaaaccccaaccaaaaaaaataataaggcatgattggtggggagggaatgtgtatttaggggcataataaaaaggtggctcgaagcaggaactttggcctcatggtgtcatgggtggatgcctggactccagtgtgcctgtgaggggctgggttaggcagtcggctgtcacactcacatgtgcctgcaataaaccttttggaatttcatgaacgaggtnctatgaattgccttttgccaatgaatggatgtatttttccaaggggggaatagtatccttgactttggcagtcacctttttgtatgtctctagaaaggggtcaaaaaaactatggtaaagatgaggcttatgagtgaatacctctgggacaaaccttaggactcacaagctatgccatgtttttcaggagactcttgtaccttatctggaatccaatcctgggagaagaggaaaaaggagctaatatttgtcctttatactcactctgtgccagatactgtgccaggcattttataattgttttgtgtcatccccatgatatccgttaaattaatctattacccccgtgttctaaataatagatcttaagtgtggaatgcatctatccaacataaatgcccatgttgaaagaaggaaagatgtcattcaagtatttttcaaattctttttattatgactatgcccttcgcaacactgtgaaaacaacccctgggggcatctgccttccagaatctctctctggcttctcaccagcttggtttcctcatggggagtgttttatttggcctcccctatctgagctgcacacacaccagggggaggccactggctaacagtaggacttcagtgccctgaggaaaaggctttgggaatttaggcacacgtttctctccttggaatccttctagcatctggaaaaggaacctggtatttctgcagttagataccagatgcaaccagaacaggctttcgagtgctgtgatttctttcctgggttcccaagtcttgttgtttcatcacaaactgtatctttttaaggttaaaagtcttgaccttcatgggggtctgggacaatccgatctccaagcatggaggaaaggcaatgcctggaccactgacttgcattgaaatcctttcttgtgggctagggtttgatgtctctttttcatctttggactggggatctgcatcttccaggtccatttaagcactgaaactagatgcaaatctctttcgagaccttacatgttttagatagtcatgtaatgacttggatagacatttaaataacttgttccaaggtcggaagagcccaagaactcctcagagttcctcttcttgcttcttgaatcacatcctctaaagatgactcatgtctccatagcaactgttaaaggtgctgcctagacgggacccgctcccacctttacttactttgctcgaaggaaccaaaacaatgtccttgtgtaaaggggctgtcatatccagttttcctttgaaatctggcccccaagatcctgcttctttctaacctggcagctgtcatgtcccttcaagatgatgtgggaaatggcccttacaacttgggaaccacagaaattgctgtatttcgggaagattcacctctaaactgaaggcttcattctgatagtgtctgccctctctaccctgatttcgcccttctttgcttccatttttagcccaaggctttgaatttgattgagtaagacttagaggcagtataaagaacaccataaacttaggcagaggtcccttagggtctctagagttgaaaataattctacagccttagggggacctcttggcattgactctaaagggagagaatagcccctgtgtcctggcatttcagtctagaccttcaaggactgttctctcttgacaggcaagcaagcaaagaaagttttgcaatagatttcaagccagtttttccattcaaaccaagatgcaaattcataaaattactcttttcctggaatagatccaggcagctgccttattagaactttagattcggatctattttcttaacacacatacacatacacgcgcatacatacatatacagagagatacgtggagaaaggaaatttactctatcattgcaatacttcaagaaagagctgtattttgcctttctgtaatctccaagatagtgtctaggaaagtaatagtataactatagggataccgaaacaggaaaaaccagccatcactcttgagaaagtttgagttcgactcacatgggagaatcgaggtctgctactcgtcttgctttgtgccccatctgtgcctggatgccctactacatctgcttgactcgtctgggctgctagccggggtgttgtggctgacatcctttcctggccttacacacataatagacacatccctaacggcgtgtgcctggtccagccacatacagccaccacatgtgtcacacactgtccccctcatccatgtggacttgactggcatttcagcagctccactgggatgctctaaccccagtgtgtggagttggggtcccttcatctaggttgacccaggtatagcatttttagcattgcctttccagtcttgatgattcattcattgaactcatttatttctggagcccctggtacactccaggcactgcgctaattgccagcaaagcacaactgaactaaatccaccttcaaggaacctagccataacgagggaggcagcatggaagtaccctacaggggaaagtcctgagtgctgtgggagcatctcaccgtggcagccagcccagttttggcaatcaggggcttcctgaaagaggtgacatcaaagcccggatgtgtcagaggactgagggagagtgttactaaaggactttcaggctgagaggatagcacaggactcagcccaaaggagggccagtgtggactgtccagggccagcctgcagtacagaggctggagcttggacttgtagagggagagagaagagcaagggacgtggacggggcagtgagccaggctagccacagagggttcccggggctttgctggggattcagggagcataaataagagctttaggtggtgctgtgtcctctgcagcccactgctgaggtcctccagacaggtaaggtgtggtcacaatcagggccggggtttccctgctcactgcggcagtgcaggggtgcttgctgagatgattcatcccagggtgtcctctgtcccttacccagccccaactcctcttcctctgccaaaagctatttgaattcaaggactttaacctgggccggatctggtttggagacaaaggggacagctctgggtcagcatgaccttctttagagccactaaggcgaaaaataccgtttgggaccaggctggcctagacccagggatgagaatgcaccctaaaataaatatacgggaagcagcagagggcttccctgtctagtgtgtgatcctaactaaaggcagctctcttggacagccttcccctggattaggtcacatacacctggtggccaagcctctgctgggtcccaaatacacacccgagtcctgccaaagaaaggagatttttaaaaagcacagacaaattgtatgcaagtggaaaatacccataggcctagacagctgtggagggaagacctcgtgggtacctggaggctgccagagctgggagctctgcaggtatgagtcagggaaggctcagagacaagcagaatctctctatggagacaacttgcagtgccttttaggttttccaaataacctcggagttcagagcattgggtttttttctcccctccccacccccagaaaaataattagaaaaatgtttaggagaaaggaaaagaattagatgcatcagaataccagctataagccaacactgtttccagaaactcaagaaaaagctcaaacagaagacagttcccctgagaggctggaggcgttggtgctgaaggcaattttcctagctaaggggcactgggccttgctgcaccttggggctgaccttttttgcaaaacacccacccctgccctcctggcatactcaacagcaacgccagctttctggacccttggaaagatgttagctcaaacacccactttttccagatcttcctcttgctcttcactgaggaatttgtaattctgaggctagcgatgccgactcggatattccgcaggcccaggtgtttagattagaatttgtccagcggtaatcctgatgctggaaaccaacaaacatttggcctcatattcacccatttaaaaactagagcccctggcaggtccccttagggccatgtgttcatggaatataagccaagtttgccttagcgcttgttcatggaatataagccaagtttacctctccccattttctgccctggcccacttcccactcacctccacctcattgccaggaagggatcaaaatgcctccatgccagttgttaaatggctacatatttgcccttcccaagggtatttgcatttntatttaggaacatggccttatattcaaggaaaatctagcatcaagattacgaggcatcacctctcaatcaggtctgggaggtatcttggggcattgctcttctgaacacctgcagaggcttcctcaggtgagtgtgggagcccggaaggtggcctccctaaccactctgcctgcacatgaattctccaaagcagtgggcccccatctgtttcaattacacatgcctgtcagcaaaaacttcgtgagatgcactctctctgtgtgtttattaatttatttaaagcatatatccctttacttttgtactactatattaggcacattataaaaagtatacagcatagaaactttaaatgaataagacacaaaatattataaacagaggttctggcattttctctctgaactcctgagggggaccttgggcacctcctggtatgtgcacaccccactttgaacacccttgctttagtgcaaatcagcacgcctaaatagcatcccaaaccactgtgcgacatttggcctgcagaataagaaagtcctaaggcagaatccccaggaacttcaaatctgggagatgaggaaagaaaactcactcacaaacaacataaatgtaaataattcaaaaccctaaaggagagctgtccctagacagtagtggctacaggtgctaagcaaaagtcaggtacactggacagagccatgcgattgattgttcatcttccctctctgggtctccagaaaaggacactggcaatatccccagctctctcctgattggaattctttgaaccctcgaagtgctccagcagtactaccccccacgtagcagtgggcccatgtcgcttgaatattatttttgatttgaccaccaagatgtaatgatgattctattccattttgaaaagggtctgagaaagtgtacaggtctaattatatatacatatttatacatgtgtatttttgtttattgttacattttgacattggactttctattaaataatttttaaga

SEQ ID NO: 17958 - DNA, 1119 bp, Homo sapiens
aaaaagaagctgtaccgtccggaattcccggatagcccagaaagggaaaaactaccagaacggagatgtgtttggcgatgagtataggatcaaaccagtggaagaggtcaaatacatgaaaaatggggcagaagaagagcagaaaatagcagccaggaaccaagaaaacttggaaaaaagtgccagctcaaatgtaagacttaaaactaataaagaggttccgggattagttcatcaacccagagcaaacatgcacatctctgaaagccaacaagaattcttcagaatgctggatgaaaaaattgaaaagggtcgggattactgttcggaagaagaggatatcacatagcaccaattttaccactcaaaccaggagctactactgtgtaaataggttacaccccagttgaaatctttgcaaaggtcggttctattcagcgaacagcactatagcaaaagaagatcgttccatattgtacgccccattaaattacagtgtttcttaatgaacttgcaaaggaatattgctaaaaacaaacaaaaaaaactgttatcgaactttctttgttgctgctagttaaaacttgttgcaacttttcacttctcttgtgtccaggtatgcagcaaaattctgcaatttcaccttaaagatactgttggttttacagatgctctccaacctattttctataagatgaggtagtggtgaactcagataacaaacttctcttctaaactggttctgcttctaagacaagcatctcctgccctctctccttcctccccatctctcgcacgcagtctagagatggactgagccttgcttctcactggcagtgttgagctttggagatgggatggttgctatgccaagccttgtttctctgctcagaagaagtagagaagctattatcaattaaaagcatgctgtgatgtgactcctggaagtgacgtaggagtgagtggcaggttgtttgatttaataggtatcttaatcaagaattaagcttgcaacattggctttgctcagatgcagatggaagtgtgatcacaatcattttgaatccctcttcctcacttttttttctaagaaaataaacattttactgtttttatgga

SEQ ID NO: 17959 - DNA, 452 bp, Homo sapiens
tgagcgaggagctcccctccctcgctcgctcctcgcaagctcccgctcgctccctgcccactcccggggggacgttccgtgccgcggccgccgcggccgctgcttctttcacactttagttgggagctgcgcgccgcgctcagttactggagagctggccgcgcgccgccgcctcccgcacgcttgcacgcgggcccggcttcggggttttgggttcttactccaagcggcggggaggagggggagccccggacacactgtggggaggaggaggaagaagaggaggagggaggaagaaaaaagacgaggaggacaggggcggggggcgggagcctcaaaggattttgaagccagctgaagggaacccaactgatcaggctggcttttctgaagacagagattttggttacagtgtgggcctgaatcctgcagaggaggaagctgtgacatcc

SEQ ID NO: 17960 - DNA, 428 bp, Homo sapiens
agaaataaacccttgttgttttaagccattctgttttggggatgtttgttactacaacataaccaaactaaaatacctcacctatggataatgagtggtaacatgtcaggttgtagatgaagtacctggcaagcatgtcagaattctgagctgccactggatgagaaacttccatgtcagagaatcctttctccttcctacatggagaggtgccctagggtgaaatgcttcagtggaaattctccttcgattatgaagttgcaaagtctgtccttcggtctgccaacttttccttcttactatctgtcaaatcctgatttattcagaaaaaagtgccagctcaaatgtaagacttaaaactaataaagaggttccgggattagttcatcaacccagagcaaagtacatcacaattggaaagttaaaaa

SEQ ID NO: 17961 - DNA, 10117 bp, Homo sapiens
  misc_feature (4800)..(4800): n is a, c, g, or t
  misc_feature (9102)..(9102): n is a, c, g, or t
ttaccagggccgtgtcttttctttggttcgtagccacgtggtcatcccatgtacaaactgtggggaggaggaggaagaagaggaggagggaggaagaaaaaagacgaggaggacaggggcggggggcgggaggcttgccaccttcagcccccccgcgaacgcccaaggtgcacacatcttgaccaactcagcagcaaggtggattttctttgtgtttaaagaaaaaaaatgtccctgtgtctgtagagatgatttgcagttcagcccggctgaagctgaccgaatgagactatgggctgtgcctccgccaagcatgttgccactgttcaaaatgaagaggaagcccagaaagggaaaaactaccagaacggagatgtgtttggcgatgagtataggatcaaaccagtggaagaggtcaaatacatgaaaaatggggcagaagaagagcagaaaatagcagccaggaaccaagaaaacttggaaaaaagtgccagctcaaatgtaagacttaaaactaataaagaggttccgggattagttcatcaacccagagcaaacatgcacatctctgaaagccaacaagaattcttcagaatgctggatgaaaaaattgaaaagggtcgggattactgttcggaagaagaggatatcacatagcaccaattttaccactcaaaccaggagctactactgtgtaaataggttacaccccagttgaaatctttgcaaaggtcggttctattcagcgaacagcactatagcaaaagaagatcgttccatattgtacgccccattaaattacagtgtttcttaatgaacttgcaaaggaatattgctaaaaacaaacaaaaaaaactgttatcgaactttctttgttgctgctagttaaaacttgttgcaacttttcacttctcttgtgtccaggtatgcagcaaaattctgcaatttcaccttaaagatactgttggttttacagatgctctccaacctattttctataagatgaggtagtggtgaactcagataacaaacttctcttctaaactggttctgcttctaagacaagcatctcctgccctctctccttcctccccatctctcgcacgcagtctagagatggactgagccttgcttctcactggcagtgttgagctttggagatgggatggttgctatgccaagccttgtttctctgctcagaagaagtagagaagctattatcaattaaaagcatgctgtgatgtgactcctggaagtgacgtaggagtgagtggcaggttgtttgatttaataggtatcttaatcaagaattaagcttgcaacattggctttgctcagatgcagatggaagtgtgatcacaatcattttgaatccctcttcctcacttttttttctaagaaaataaacattttactgtttttatggatccttgtcttctcccattcatccagctcagtgttttaagatgatcctgggtgcagaagttgagccctcctttgcattgacactgataattagcctatagggctccctacccttccattaagaatctaccaagcattagcaaggctgaaagtggtctaagaggtgaggggacatcctatgactttttaggaaggcctgaaaccaccttgttacctttcattttgttagcaaataaaccatcctattttgtaactctcccccttcaaaatgctacatgagccttgccacttcctttttctcttacttccagcacactagacatagcaaaagtgtttgcctactcaaaaacataatacttttatgctgatgatggtatttggagatgtgaaagccaaaagcccctggcagtggtggggaatgttgactgagtgttcagcagagtttatttttccatactatatgaagagaatgatctcttctcaaagacagaagtgatatttttaacaaatattgtcacaagtaaatagcaatcaaaaggagaaaataacttttgtatttttttaatgtgtttgatagctttgacgagggttctctttgttactttcaggggagggcatcctattaaatgccacgccagcagtccgggtctgggtttgtcccacaaaatcacaggagcactgtatgttcctctcttttggagttgtgactttgaagggcctcaatattagccacactgccgcctgcagaaggtggagagttaagatgttctatgtcaatttgctcttgccgaaaagatgagcctcgattttaaaatctatccacatccaactgatggcaccattgatgtgcaaataatgagattccctatctccttttagacctgggacggcaaaagggaagggaaggaaacttagcagagtgctattgactatagattcacatattagcaacaaaatcccgtaattcttttggccaacagcagctattttggggagcagctgtggctgttacataaatagagatgcagccaaaattttaggccttttatcctgcttctagcagaaaaatgcagggagagtcaagtagtctagggtttcaggttgcctcccctcatatggtttttggccaagtgactaaaacagttttccacaactgtaaacaaactggtaagccccacctcaaacttgttcactggggactttgcttaccgttctgtgggtgaccttttccgggatttcttgttcttatcaagcaagaattaagcacatgctaaacgtcttccatttgacttctctactcggtgtctcagacagtgtcttcccagaaaaccaccaccctctacccaaagatgaaacatgctcatgtcatttttctcatggtcacatttaacagttttgacatgttatacttgcgcatagatccaagcgtttcttgggaacctgacttttgagtgtttaataaagccggaagtggtgttgccctgaaccagcagattttcacctgggttctggctccggtgtttaacactggatacatctttgatgtgcgaaagtgagttcatcttcagacacatttggtacatccagaaatagatccaagaaatggggtggttgagtgggtccgcacgaaatgcttgattatgtcagcaacacccaacactgtctgttttccatttgttggttttaatcataaaattgtcaagtgattcgtgttgtactttatttttgtgccttctgaacggatctaaaacaaaagtattttgccttttttaccccacgtgtatctgaacattaagcagattggctcagacaccatgaaaaggatactccaatgtacgtgctggtgcactctgctagttgttatctctgtagggctcaagaagctggaaggaggaagggagggtaagtggcctggtgagtggaggtagaaaaatgatgagaaatgaactgagagcattaagcagagagggttgataggctggccgtgtccggggtgaaattggaaatccagctgcctagtggccagtgggtggggcaagactgtcaacgagatttacagctggcttacacatgccttatgtcctctgagttgtagagttgtaaaagttcagcagtgtgtgcacagctttcttttggttggcagagattcaggatcatggagtactgctctcataattgaagacgtgtttgttattggcagagaaccttaaaaaaggcctttacctcagcgatgcttcctagccccaggcttgcagagaacacagagtggtgttgtggtctatttagggacaaagaaggtataaagtccagagatgagaaaactgggtcagccctcagaaactgcagcagccacgcacacagaagcctgctggaagacaggtctctctccgtccacagtgcccatcatctgagcctgggctgggatgactcaacttagcaaagacggacccaggaggagtgctggttcttcagtctttgtactggccccatcctctcctcactgtaatgtgaggaagcacctctgtgtcagggctcacctgggcatccaaagcggccacgcccacaatccgacagcccccaggagcaggtccagggatgatgcagcccccttcttggtcccatgtgatgtcatcctgctttgttatcttcttataactttatcctgctataactttatcctcttcccagcctcatccctgtttttctgttagggcaagactcttccataagcctgctaaaaaacagagatgatacctcttacaaactttacctcatagcctgtgaagcaggttggcatgtggattacaagtcctgctttgacactgggcaagaatttaagattgttctatctctactagtcatagaaaagaaacattgttaaacatgttgagttttaaaggaagaaatattttcaaattcttaatccaagaaaatactgagttggaatcttagacttcgggactctgacacgttctttatgaaaggcaaaataattggtatctaaagttctctccttcctgcctcccctaaagaaaaaggatattagattgcacactataattttacataagatctgccttccacacttccctgctggaaggcattctcagagctttatgtcttcgtacctctcagagattggactttttcttgtttaaaaccccaaccaaaaaaaataataaggcatgattggtggggagggaatgtgtatttaggggcataataaaaaggtggctcgaagcaggaactttggcctcatggtgtcatgggtggatgcctggactccagtgtgcctgtgaggggctgggttaggcagtcggctgtcacactcacatgtgcctgcaataaaccttttggaatttcatgaacgaggtnctatgaattgccttttgccaatgaatggatgtatttttccaaggggggaatagtatccttgactttggcagtcacctttttgtatgtctctagaaaggggtcaaaaaaactatggtaaagatgaggcttatgagtgaatacctctgggacaaaccttaggactcacaagctatgccatgtttttcaggagactcttgtaccttatctggaatccaatcctgggagaagaggaaaaaggagctaatatttgtcctttatactcactctgtgccagatactgtgccaggcattttataattgttttgtgtcatccccatgatatccgttaaattaatctattacccccgtgttctaaataatagatcttaagtgtggaatgcatctatccaacataaatgcccatgttgaaagaaggaaagatgtcattcaagtatttttcaaattctttttattatgactatgcccttcgcaacactgtgaaaacaacccctgggggcatctgccttccagaatctctctctggcttctcaccagcttggtttcctcatggggagtgttttatttggcctcccctatctgagctgcacacacaccagggggaggccactggctaacagtaggacttcagtgccctgaggaaaaggctttgggaatttaggcacacgtttctctccttggaatccttctagcatctggaaaaggaacctggtatttctgcagttagataccagatgcaaccagaacaggctttcgagtgctgtgatttctttcctgggttcccaagtcttgttgtttcatcacaaactgtatctttttaaggttaaaagtcttgaccttcatgggggtctgggacaatccgatctccaagcatggaggaaaggcaatgcctggaccactgacttgcattgaaatcctttcttgtgggctagggtttgatgtctctttttcatctttggactggggatctgcatcttccaggtccatttaagcactgaaactagatgcaaatctctttcgagaccttacatgttttagatagtcatgtaatgacttggatagacatttaaataacttgttccaaggtcggaagagcccaagaactcctcagagttcctcttcttgcttcttgaatcacatcctctaaagatgactcatgtctccatagcaactgttaaaggtgctgcctagacgggacccgctcccacctttacttactttgctcgaaggaaccaaaacaatgtccttgtgtaaaggggctgtcatatccagttttcctttgaaatctggcccccaagatcctgcttctttctaacctggcagctgtcatgtcccttcaagatgatgtgggaaatggcccttacaacttgggaaccacagaaattgctgtatttcgggaagattcacctctaaactgaaggcttcattctgatagtgtctgccctctctaccctgatttcgcccttctttgcttccatttttagcccaaggctttgaatttgattgagtaagacttagaggcagtataaagaacaccataaacttaggcagaggtcccttagggtctctagagttgaaaataattctacagccttagggggacctcttggcattgactctaaagggagagaatagcccctgtgtcctggcatttcagtctagaccttcaaggactgttctctcttgacaggcaagcaagcaaagaaagttttgcaatagatttcaagccagtttttccattcaaaccaagatgcaaattcataaaattactcttttcctggaatagatccaggcagctgccttattagaactttagattcggatctattttcttaacacacatacacatacacgcgcatacatacatatacagagagatacgtggagaaaggaaatttactctatcattgcaatacttcaagaaagagctgtattttgcctttctgtaatctccaagatagtgtctaggaaagtaatagtataactatagggataccgaaacaggaaaaaccagccatcactcttgagaaagtttgagttcgactcacatgggagaatcgaggtctgctactcgtcttgctttgtgccccatctgtgcctggatgccctactacatctgcttgactcgtctgggctgctagccggggtgttgtggctgacatcctttcctggccttacacacataatagacacatccctaacggcgtgtgcctggtccagccacatacagccaccacatgtgtcacacactgtccccctcatccatgtggacttgactggcatttcagcagctccactgggatgctctaaccccagtgtgtggagttggggtcccttcatctaggttgacccaggtatagcatttttagcattgcctttccagtcttgatgattcattcattgaactcatttatttctggagcccctggtacactccaggcactgcgctaattgccagcaaagcacaactgaactaaatccaccttcaaggaacctagccataacgagggaggcagcatggaagtaccctacaggggaaagtcctgagtgctgtgggagcatctcaccgtggcagccagcccagttttggcaatcaggggcttcctgaaagaggtgacatcaaagcccggatgtgtcagaggactgagggagagtgttactaaaggactttcaggctgagaggatagcacaggactcagcccaaaggagggccagtgtggactgtccagggccagcctgcagtacagaggctggagcttggacttgtagagggagagagaagagcaagggacgtggacggggcagtgagccaggctagccacagagggttcccggggctttgctggggattcagggagcataaataagagctttaggtggtgctgtgtcctctgcagcccactgctgaggtcctccagacaggtaaggtgtggtcacaatcagggccggggtttccctgctcactgcggcagtgcaggggtgcttgctgagatgattcatcccagggtgtcctctgtcccttacccagccccaactcctcttcctctgccaaaagctatttgaattcaaggactttaacctgggccggatctggtttggagacaaaggggacagctctgggtcagcatgaccttctttagagccactaaggcgaaaaataccgtttgggaccaggctggcctagacccagggatgagaatgcaccctaaaataaatatacgggaagcagcagagggcttccctgtctagtgtgtgatcctaactaaaggcagctctcttggacagccttcccctggattaggtcacatacacctggtggccaagcctctgctgggtcccaaatacacacccgagtcctgccaaagaaaggagatttttaaaaagcacagacaaattgtatgcaagtggaaaatacccataggcctagacagctgtggagggaagacctcgtgggtacctggaggctgccagagctgggagctctgcaggtatgagtcagggaaggctcagagacaagcagaatctctctatggagacaacttgcagtgccttttaggttttccaaataacctcggagttcagagcattgggtttttttctcccctccccacccccagaaaaataattagaaaaatgtttaggagaaaggaaaagaattagatgcatcagaataccagctataagccaacactgtttccagaaactcaagaaaaagctcaaacagaagacagttcccctgagaggctggaggcgttggtgctgaaggcaattttcctagctaaggggcactgggccttgctgcaccttggggctgaccttttttgcaaaacacccacccctgccctcctggcatactcaacagcaacgccagctttctggacccttggaaagatgttagctcaaacacccactttttccagatcttcctcttgctcttcactgaggaatttgtaattctgaggctagcgatgccgactcggatattccgcaggcccaggtgtttagattagaatttgtccagcggtaatcctgatgctggaaaccaacaaacatttggcctcatattcacccatttaaaaactagagcccctggcaggtccccttagggccatgtgttcatggaatataagccaagtttgccttagcgcttgttcatggaatataagccaagtttacctctccccattttctgccctggcccacttcccactcacctccacctcattgccaggaagggatcaaaatgcctccatgccagttgttaaatggctacatatttgcccttcccaagggtatttgcatttntatttaggaacatggccttatattcaaggaaaatctagcatcaagattacgaggcatcacctctcaatcaggtctgggaggtatcttggggcattgctcttctgaacacctgcagaggcttcctcaggtgagtgtgggagcccggaaggtggcctccctaaccactctgcctgcacatgaattctccaaagcagtgggcccccatctgtttcaattacacatgcctgtcagcaaaaacttcgtgagatgcactctctctgtgtgtttattaatttatttaaagcatatatccctttacttttgtactactatattaggcacattataaaaagtatacagcatagaaactttaaatgaataagacacaaaatattataaacagaggttctggcattttctctctgaactcctgagggggaccttgggcacctcctggtatgtgcacaccccactttgaacacccttgctttagtgcaaatcagcacgcctaaatagcatcccaaaccactgtgcgacatttggcctgcagaataagaaagtcctaaggcagaatccccaggaacttcaaatctgggagatgaggaaagaaaactcactcacaaacaacataaatgtaaataattcaaaaccctaaaggagagctgtccctagacagtagtggctacaggtgctaagcaaaagtcaggtacactggacagagccatgcgattgattgttcatcttccctctctgggtctccagaaaaggacactggcaatatccccagctctctcctgattggaattctttgaaccctcgaagtgctccagcagtactaccccccacgtagcagtgggcccatgtcgcttgaatattatttttgatttgaccaccaagatgtaatgatgattctattccattttgaaaagggtctgagaaagtgtacaggtctaattatatatacatatttatacatgtgtatttttgtttattgttacattttgacattggactttctattaaataatttttaaga

SEQ ID NO: 17962 - DNA, 10174 bp, Homo sapiens
  misc_feature (4857)..(4857): n is a, c, g, or t
  misc_feature (9159)..(9159): n is a, c, g, or t
tgagcgaggagctcccctccctcgctcgctcctcgcaagctcccgctcgctccctgcccactcccggggggacgttccgtgccgcggccgccgcggccgctgcttctttcacactttagttgggagctgcgcgccgcgctcagttactggagagctggccgcgcgccgccgcctcccgcacgcttgcacgcttgccaccttcagcccccccgcgaacgcccaaggtgcacacatcttgaccaactcagcagcaaggtggattttctttgtgtttaaagaaaaaaaatgtccctgtgtctgtagagatgatttgcagttcagcccggctgaagctgaccgaatgagactatgggctgtgcctccgccaagcatgttgccactgttcaaaatgaagaggaagcccagaaagggaaaaactaccagaacggagatgtgtttggcgatgagtataggatcaaaccagtggaagaggtcaaatacatgaaaaatggggcagaagaagagcagaaaatagcagccaggaaccaagaaaacttggaaaaaagtgccagctcaaatgtaagacttaaaactaataaagaggttccgggattagttcatcaacccagagcaaacatgcacatctctgaaagccaacaagaattcttcagaatgctggatgaaaaaattgaaaagggtcgggattactgttcggaagaagaggatatcacatagcaccaattttaccactcaaaccaggagctactactgtgtaaataggttacaccccagttgaaatctttgcaaaggtcggttctattcagcgaacagcactatagcaaaagaagatcgttccatattgtacgccccattaaattacagtgtttcttaatgaacttgcaaaggaatattgctaaaaacaaacaaaaaaaactgttatcgaactttctttgttgctgctagttaaaacttgttgcaacttttcacttctcttgtgtccaggtatgcagcaaaattctgcaatttcaccttaaagatactgttggttttacagatgctctccaacctattttctataagatgaggtagtggtgaactcagataacaaacttctcttctaaactggttctgcttctaagacaagcatctcctgccctctctccttcctccccatctctcgcacgcagtctagagatggactgagccttgcttctcactggcagtgttgagctttggagatgggatggttgctatgccaagccttgtttctctgctcagaagaagtagagaagctattatcaattaaaagcatgctgtgatgtgactcctggaagtgacgtaggagtgagtggcaggttgtttgatttaataggtatcttaatcaagaattaagcttgcaacattggctttgctcagatgcagatggaagtgtgatcacaatcattttgaatccctcttcctcacttttttttctaagaaaataaacattttactgtttttatggatccttgtcttctcccattcatccagctcagtgttttaagatgatcctgggtgcagaagttgagccctcctttgcattgacactgataattagcctatagggctccctacccttccattaagaatctaccaagcattagcaaggctgaaagtggtctaagaggtgaggggacatcctatgactttttaggaaggcctgaaaccaccttgttacctttcattttgttagcaaataaaccatcctattttgtaactctcccccttcaaaatgctacatgagccttgccacttcctttttctcttacttccagcacactagacatagcaaaagtgtttgcctactcaaaaacataatacttttatgctgatgatggtatttggagatgtgaaagccaaaagcccctggcagtggtggggaatgttgactgagtgttcagcagagtttatttttccatactatatgaagagaatgatctcttctcaaagacagaagtgatatttttaacaaatattgtcacaagtaaatagcaatcaaaaggagaaaataacttttgtatttttttaatgtgtttgatagctttgacgagggttctctttgttactttcaggggagggcatcctattaaatgccacgccagcagtccgggtctgggtttgtcccacaaaatcacaggagcactgtatgttcctctcttttggagttgtgactttgaagggcctcaatattagccacactgccgcctgcagaaggtggagagttaagatgttctatgtcaatttgctcttgccgaaaagatgagcctcgattttaaaatctatccacatccaactgatggcaccattgatgtgcaaataatgagattccctatctccttttagacctgggacggcaaaagggaagggaaggaaacttagcagagtgctattgactatagattcacatattagcaacaaaatcccgtaattcttttggccaacagcagctattttggggagcagctgtggctgttacataaatagagatgcagccaaaattttaggccttttatcctgcttctagcagaaaaatgcagggagagtcaagtagtctagggtttcaggttgcctcccctcatatggtttttggccaagtgactaaaacagttttccacaactgtaaacaaactggtaagccccacctcaaacttgttcactggggactttgcttaccgttctgtgggtgaccttttccgggatttcttgttcttatcaagcaagaattaagcacatgctaaacgtcttccatttgacttctctactcggtgtctcagacagtgtcttcccagaaaaccaccaccctctacccaaagatgaaacatgctcatgtcatttttctcatggtcacatttaacagttttgacatgttatacttgcgcatagatccaagcgtttcttgggaacctgacttttgagtgtttaataaagccggaagtggtgttgccctgaaccagcagattttcacctgggttctggctccggtgtttaacactggatacatctttgatgtgcgaaagtgagttcatcttcagacacatttggtacatccagaaatagatccaagaaatggggtggttgagtgggtccgcacgaaatgcttgattatgtcagcaacacccaacactgtctgttttccatttgttggttttaatcataaaattgtcaagtgattcgtgttgtactttatttttgtgccttctgaacggatctaaaacaaaagtattttgccttttttaccccacgtgtatctgaacattaagcagattggctcagacaccatgaaaaggatactccaatgtacgtgctggtgcactctgctagttgttatctctgtagggctcaagaagctggaaggaggaagggagggtaagtggcctggtgagtggaggtagaaaaatgatgagaaatgaactgagagcattaagcagagagggttgataggctggccgtgtccggggtgaaattggaaatccagctgcctagtggccagtgggtggggcaagactgtcaacgagatttacagctggcttacacatgccttatgtcctctgagttgtagagttgtaaaagttcagcagtgtgtgcacagctttcttttggttggcagagattcaggatcatggagtactgctctcataattgaagacgtgtttgttattggcagagaaccttaaaaaaggcctttacctcagcgatgcttcctagccccaggcttgcagagaacacagagtggtgttgtggtctatttagggacaaagaaggtataaagtccagagatgagaaaactgggtcagccctcagaaactgcagcagccacgcacacagaagcctgctggaagacaggtctctctccgtccacagtgcccatcatctgagcctgggctgggatgactcaacttagcaaagacggacccaggaggagtgctggttcttcagtctttgtactggccccatcctctcctcactgtaatgtgaggaagcacctctgtgtcagggctcacctgggcatccaaagcggccacgcccacaatccgacagcccccaggagcaggtccagggatgatgcagcccccttcttggtcccatgtgatgtcatcctgctttgttatcttcttataactttatcctgctataactttatcctcttcccagcctcatccctgtttttctgttagggcaagactcttccataagcctgctaaaaaacagagatgatacctcttacaaactttacctcatagcctgtgaagcaggttggcatgtggattacaagtcctgctttgacactgggcaagaatttaagattgttctatctctactagtcatagaaaagaaacattgttaaacatgttgagttttaaaggaagaaatattttcaaattcttaatccaagaaaatactgagttggaatcttagacttcgggactctgacacgttctttatgaaaggcaaaataattggtatctaaagttctctccttcctgcctcccctaaagaaaaaggatattagattgcacactataattttacataagatctgccttccacacttccctgctggaaggcattctcagagctttatgtcttcgtacctctcagagattggactttttcttgtttaaaaccccaaccaaaaaaaataataaggcatgattggtggggagggaatgtgtatttaggggcataataaaaaggtggctcgaagcaggaactttggcctcatggtgtcatgggtggatgcctggactccagtgtgcctgtgaggggctgggttaggcagtcggctgtcacactcacatgtgcctgcaataaaccttttggaatttcatgaacgaggtnctatgaattgccttttgccaatgaatggatgtatttttccaaggggggaatagtatccttgactttggcagtcacctttttgtatgtctctagaaaggggtcaaaaaaactatggtaaagatgaggcttatgagtgaatacctctgggacaaaccttaggactcacaagctatgccatgtttttcaggagactcttgtaccttatctggaatccaatcctgggagaagaggaaaaaggagctaatatttgtcctttatactcactctgtgccagatactgtgccaggcattttataattgttttgtgtcatccccatgatatccgttaaattaatctattacccccgtgttctaaataatagatcttaagtgtggaatgcatctatccaacataaatgcccatgttgaaagaaggaaagatgtcattcaagtatttttcaaattctttttattatgactatgcccttcgcaacactgtgaaaacaacccctgggggcatctgccttccagaatctctctctggcttctcaccagcttggtttcctcatggggagtgttttatttggcctcccctatctgagctgcacacacaccagggggaggccactggctaacagtaggacttcagtgccctgaggaaaaggctttgggaatttaggcacacgtttctctccttggaatccttctagcatctggaaaaggaacctggtatttctgcagttagataccagatgcaaccagaacaggctttcgagtgctgtgatttctttcctgggttcccaagtcttgttgtttcatcacaaactgtatctttttaaggttaaaagtcttgaccttcatgggggtctgggacaatccgatctccaagcatggaggaaaggcaatgcctggaccactgacttgcattgaaatcctttcttgtgggctagggtttgatgtctctttttcatctttggactggggatctgcatcttccaggtccatttaagcactgaaactagatgcaaatctctttcgagaccttacatgttttagatagtcatgtaatgacttggatagacatttaaataacttgttccaaggtcggaagagcccaagaactcctcagagttcctcttcttgcttcttgaatcacatcctctaaagatgactcatgtctccatagcaactgttaaaggtgctgcctagacgggacccgctcccacctttacttactttgctcgaaggaaccaaaacaatgtccttgtgtaaaggggctgtcatatccagttttcctttgaaatctggcccccaagatcctgcttctttctaacctggcagctgtcatgtcccttcaagatgatgtgggaaatggcccttacaacttgggaaccacagaaattgctgtatttcgggaagattcacctctaaactgaaggcttcattctgatagtgtctgccctctctaccctgatttcgcccttctttgcttccatttttagcccaaggctttgaatttgattgagtaagacttagaggcagtataaagaacaccataaacttaggcagaggtcccttagggtctctagagttgaaaataattctacagccttagggggacctcttggcattgactctaaagggagagaatagcccctgtgtcctggcatttcagtctagaccttcaaggactgttctctcttgacaggcaagcaagcaaagaaagttttgcaatagatttcaagccagtttttccattcaaaccaagatgcaaattcataaaattactcttttcctggaatagatccaggcagctgccttattagaactttagattcggatctattttcttaacacacatacacatacacgcgcatacatacatatacagagagatacgtggagaaaggaaatttactctatcattgcaatacttcaagaaagagctgtattttgcctttctgtaatctccaagatagtgtctaggaaagtaatagtataactatagggataccgaaacaggaaaaaccagccatcactcttgagaaagtttgagttcgactcacatgggagaatcgaggtctgctactcgtcttgctttgtgccccatctgtgcctggatgccctactacatctgcttgactcgtctgggctgctagccggggtgttgtggctgacatcctttcctggccttacacacataatagacacatccctaacggcgtgtgcctggtccagccacatacagccaccacatgtgtcacacactgtccccctcatccatgtggacttgactggcatttcagcagctccactgggatgctctaaccccagtgtgtggagttggggtcccttcatctaggttgacccaggtatagcatttttagcattgcctttccagtcttgatgattcattcattgaactcatttatttctggagcccctggtacactccaggcactgcgctaattgccagcaaagcacaactgaactaaatccaccttcaaggaacctagccataacgagggaggcagcatggaagtaccctacaggggaaagtcctgagtgctgtgggagcatctcaccgtggcagccagcccagttttggcaatcaggggcttcctgaaagaggtgacatcaaagcccggatgtgtcagaggactgagggagagtgttactaaaggactttcaggctgagaggatagcacaggactcagcccaaaggagggccagtgtggactgtccagggccagcctgcagtacagaggctggagcttggacttgtagagggagagagaagagcaagggacgtggacggggcagtgagccaggctagccacagagggttcccggggctttgctggggattcagggagcataaataagagctttaggtggtgctgtgtcctctgcagcccactgctgaggtcctccagacaggtaaggtgtggtcacaatcagggccggggtttccctgctcactgcggcagtgcaggggtgcttgctgagatgattcatcccagggtgtcctctgtcccttacccagccccaactcctcttcctctgccaaaagctatttgaattcaaggactttaacctgggccggatctggtttggagacaaaggggacagctctgggtcagcatgaccttctttagagccactaaggcgaaaaataccgtttgggaccaggctggcctagacccagggatgagaatgcaccctaaaataaatatacgggaagcagcagagggcttccctgtctagtgtgtgatcctaactaaaggcagctctcttggacagccttcccctggattaggtcacatacacctggtggccaagcctctgctgggtcccaaatacacacccgagtcctgccaaagaaaggagatttttaaaaagcacagacaaattgtatgcaagtggaaaatacccataggcctagacagctgtggagggaagacctcgtgggtacctggaggctgccagagctgggagctctgcaggtatgagtcagggaaggctcagagacaagcagaatctctctatggagacaacttgcagtgccttttaggttttccaaataacctcggagttcagagcattgggtttttttctcccctccccacccccagaaaaataattagaaaaatgtttaggagaaaggaaaagaattagatgcatcagaataccagctataagccaacactgtttccagaaactcaagaaaaagctcaaacagaagacagttcccctgagaggctggaggcgttggtgctgaaggcaattttcctagctaaggggcactgggccttgctgcaccttggggctgaccttttttgcaaaacacccacccctgccctcctggcatactcaacagcaacgccagctttctggacccttggaaagatgttagctcaaacacccactttttccagatcttcctcttgctcttcactgaggaatttgtaattctgaggctagcgatgccgactcggatattccgcaggcccaggtgtttagattagaatttgtccagcggtaatcctgatgctggaaaccaacaaacatttggcctcatattcacccatttaaaaactagagcccctggcaggtccccttagggccatgtgttcatggaatataagccaagtttgccttagcgcttgttcatggaatataagccaagtttacctctccccattttctgccctggcccacttcccactcacctccacctcattgccaggaagggatcaaaatgcctccatgccagttgttaaatggctacatatttgcccttcccaagggtatttgcatttntatttaggaacatggccttatattcaaggaaaatctagcatcaagattacgaggcatcacctctcaatcaggtctgggaggtatcttggggcattgctcttctgaacacctgcagaggcttcctcaggtgagtgtgggagcccggaaggtggcctccctaaccactctgcctgcacatgaattctccaaagcagtgggcccccatctgtttcaattacacatgcctgtcagcaaaaacttcgtgagatgcactctctctgtgtgtttattaatttatttaaagcatatatccctttacttttgtactactatattaggcacattataaaaagtatacagcatagaaactttaaatgaataagacacaaaatattataaacagaggttctggcattttctctctgaactcctgagggggaccttgggcacctcctggtatgtgcacaccccactttgaacacccttgctttagtgcaaatcagcacgcctaaatagcatcccaaaccactgtgcgacatttggcctgcagaataagaaagtcctaaggcagaatccccaggaacttcaaatctgggagatgaggaaagaaaactcactcacaaacaacataaatgtaaataattcaaaaccctaaaggagagctgtccctagacagtagtggctacaggtgctaagcaaaagtcaggtacactggacagagccatgcgattgattgttcatcttccctctctgggtctccagaaaaggacactggcaatatccccagctctctcctgattggaattctttgaaccctcgaagtgctccagcagtactaccccccacgtagcagtgggcccatgtcgcttgaatattatttttgatttgaccaccaagatgtaatgatgattctattccattttgaaaagggtctgagaaagtgtacaggtctaattatatatacatatttatacatgtgtatttttgtttattgttacattttgacattggactttctattaaataatttttaaga

SEQ ID NO: 17963 - DNA, 9825 bp, Homo sapiens
  misc_feature (4508)..(4508): n is a, c, g, or t
  misc_feature (8810)..(8810): n is a, c, g, or t
ggcttcctcttcattttgaacagtggcaacatgcttggcggaggcacagagcccagaaagggaaaaactaccagaacggagatgtgtttggcgatgagtataggatcaaaccagtggaagaggtcaaatacatgaaaaatggggcagaagaagagcagaaaatagcagccaggaaccaagaaaacttggaaaaaagtgccagctcaaatgtaagacttaaaactaataaagaggttccgggattagttcatcaacccagagcaaacatgcacatctctgaaagccaacaagaattcttcagaatgctggatgaaaaaattgaaaagggtcgggattactgttcggaagaagaggatatcacatagcaccaattttaccactcaaaccaggagctactactgtgtaaataggttacaccccagttgaaatctttgcaaaggtcggttctattcagcgaacagcactatagcaaaagaagatcgttccatattgtacgccccattaaattacagtgtttcttaatgaacttgcaaaggaatattgctaaaaacaaacaaaaaaaactgttatcgaactttctttgttgctgctagttaaaacttgttgcaacttttcacttctcttgtgtccaggtatgcagcaaaattctgcaatttcaccttaaagatactgttggttttacagatgctctccaacctattttctataagatgaggtagtggtgaactcagataacaaacttctcttctaaactggttctgcttctaagacaagcatctcctgccctctctccttcctccccatctctcgcacgcagtctagagatggactgagccttgcttctcactggcagtgttgagctttggagatgggatggttgctatgccaagccttgtttctctgctcagaagaagtagagaagctattatcaattaaaagcatgctgtgatgtgactcctggaagtgacgtaggagtgagtggcaggttgtttgatttaataggtatcttaatcaagaattaagcttgcaacattggctttgctcagatgcagatggaagtgtgatcacaatcattttgaatccctcttcctcacttttttttctaagaaaataaacattttactgtttttatggatccttgtcttctcccattcatccagctcagtgttttaagatgatcctgggtgcagaagttgagccctcctttgcattgacactgataattagcctatagggctccctacccttccattaagaatctaccaagcattagcaaggctgaaagtggtctaagaggtgaggggacatcctatgactttttaggaaggcctgaaaccaccttgttacctttcattttgttagcaaataaaccatcctattttgtaactctcccccttcaaaatgctacatgagccttgccacttcctttttctcttacttccagcacactagacatagcaaaagtgtttgcctactcaaaaacataatacttttatgctgatgatggtatttggagatgtgaaagccaaaagcccctggcagtggtggggaatgttgactgagtgttcagcagagtttatttttccatactatatgaagagaatgatctcttctcaaagacagaagtgatatttttaacaaatattgtcacaagtaaatagcaatcaaaaggagaaaataacttttgtatttttttaatgtgtttgatagctttgacgagggttctctttgttactttcaggggagggcatcctattaaatgccacgccagcagtccgggtctgggtttgtcccacaaaatcacaggagcactgtatgttcctctcttttggagttgtgactttgaagggcctcaatattagccacactgccgcctgcagaaggtggagagttaagatgttctatgtcaatttgctcttgccgaaaagatgagcctcgattttaaaatctatccacatccaactgatggcaccattgatgtgcaaataatgagattccctatctccttttagacctgggacggcaaaagggaagggaaggaaacttagcagagtgctattgactatagattcacatattagcaacaaaatcccgtaattcttttggccaacagcagctattttggggagcagctgtggctgttacataaatagagatgcagccaaaattttaggccttttatcctgcttctagcagaaaaatgcagggagagtcaagtagtctagggtttcaggttgcctcccctcatatggtttttggccaagtgactaaaacagttttccacaactgtaaacaaactggtaagccccacctcaaacttgttcactggggactttgcttaccgttctgtgggtgaccttttccgggatttcttgttcttatcaagcaagaattaagcacatgctaaacgtcttccatttgacttctctactcggtgtctcagacagtgtcttcccagaaaaccaccaccctctacccaaagatgaaacatgctcatgtcatttttctcatggtcacatttaacagttttgacatgttatacttgcgcatagatccaagcgtttcttgggaacctgacttttgagtgtttaataaagccggaagtggtgttgccctgaaccagcagattttcacctgggttctggctccggtgtttaacactggatacatctttgatgtgcgaaagtgagttcatcttcagacacatttggtacatccagaaatagatccaagaaatggggtggttgagtgggtccgcacgaaatgcttgattatgtcagcaacacccaacactgtctgttttccatttgttggttttaatcataaaattgtcaagtgattcgtgttgtactttatttttgtgccttctgaacggatctaaaacaaaagtattttgccttttttaccccacgtgtatctgaacattaagcagattggctcagacaccatgaaaaggatactccaatgtacgtgctggtgcactctgctagttgttatctctgtagggctcaagaagctggaaggaggaagggagggtaagtggcctggtgagtggaggtagaaaaatgatgagaaatgaactgagagcattaagcagagagggttgataggctggccgtgtccggggtgaaattggaaatccagctgcctagtggccagtgggtggggcaagactgtcaacgagatttacagctggcttacacatgccttatgtcctctgagttgtagagttgtaaaagttcagcagtgtgtgcacagctttcttttggttggcagagattcaggatcatggagtactgctctcataattgaagacgtgtttgttattggcagagaaccttaaaaaaggcctttacctcagcgatgcttcctagccccaggcttgcagagaacacagagtggtgttgtggtctatttagggacaaagaaggtataaagtccagagatgagaaaactgggtcagccctcagaaactgcagcagccacgcacacagaagcctgctggaagacaggtctctctccgtccacagtgcccatcatctgagcctgggctgggatgactcaacttagcaaagacggacccaggaggagtgctggttcttcagtctttgtactggccccatcctctcctcactgtaatgtgaggaagcacctctgtgtcagggctcacctgggcatccaaagcggccacgcccacaatccgacagcccccaggagcaggtccagggatgatgcagcccccttcttggtcccatgtgatgtcatcctgctttgttatcttcttataactttatcctgctataactttatcctcttcccagcctcatccctgtttttctgttagggcaagactcttccataagcctgctaaaaaacagagatgatacctcttacaaactttacctcatagcctgtgaagcaggttggcatgtggattacaagtcctgctttgacactgggcaagaatttaagattgttctatctctactagtcatagaaaagaaacattgttaaacatgttgagttttaaaggaagaaatattttcaaattcttaatccaagaaaatactgagttggaatcttagacttcgggactctgacacgttctttatgaaaggcaaaataattggtatctaaagttctctccttcctgcctcccctaaagaaaaaggatattagattgcacactataattttacataagatctgccttccacacttccctgctggaaggcattctcagagctttatgtcttcgtacctctcagagattggactttttcttgtttaaaaccccaaccaaaaaaaataataaggcatgattggtggggagggaatgtgtatttaggggcataataaaaaggtggctcgaagcaggaactttggcctcatggtgtcatgggtggatgcctggactccagtgtgcctgtgaggggctgggttaggcagtcggctgtcacactcacatgtgcctgcaataaaccttttggaatttcatgaacgaggtnctatgaattgccttttgccaatgaatggatgtatttttccaaggggggaatagtatccttgactttggcagtcacctttttgtatgtctctagaaaggggtcaaaaaaactatggtaaagatgaggcttatgagtgaatacctctgggacaaaccttaggactcacaagctatgccatgtttttcaggagactcttgtaccttatctggaatccaatcctgggagaagaggaaaaaggagctaatatttgtcctttatactcactctgtgccagatactgtgccaggcattttataattgttttgtgtcatccccatgatatccgttaaattaatctattacccccgtgttctaaataatagatcttaagtgtggaatgcatctatccaacataaatgcccatgttgaaagaaggaaagatgtcattcaagtatttttcaaattctttttattatgactatgcccttcgcaacactgtgaaaacaacccctgggggcatctgccttccagaatctctctctggcttctcaccagcttggtttcctcatggggagtgttttatttggcctcccctatctgagctgcacacacaccagggggaggccactggctaacagtaggacttcagtgccctgaggaaaaggctttgggaatttaggcacacgtttctctccttggaatccttctagcatctggaaaaggaacctggtatttctgcagttagataccagatgcaaccagaacaggctttcgagtgctgtgatttctttcctgggttcccaagtcttgttgtttcatcacaaactgtatctttttaaggttaaaagtcttgaccttcatgggggtctgggacaatccgatctccaagcatggaggaaaggcaatgcctggaccactgacttgcattgaaatcctttcttgtgggctagggtttgatgtctctttttcatctttggactggggatctgcatcttccaggtccatttaagcactgaaactagatgcaaatctctttcgagaccttacatgttttagatagtcatgtaatgacttggatagacatttaaataacttgttccaaggtcggaagagcccaagaactcctcagagttcctcttcttgcttcttgaatcacatcctctaaagatgactcatgtctccatagcaactgttaaaggtgctgcctagacgggacccgctcccacctttacttactttgctcgaaggaaccaaaacaatgtccttgtgtaaaggggctgtcatatccagttttcctttgaaatctggcccccaagatcctgcttctttctaacctggcagctgtcatgtcccttcaagatgatgtgggaaatggcccttacaacttgggaaccacagaaattgctgtatttcgggaagattcacctctaaactgaaggcttcattctgatagtgtctgccctctctaccctgatttcgcccttctttgcttccatttttagcccaaggctttgaatttgattgagtaagacttagaggcagtataaagaacaccataaacttaggcagaggtcccttagggtctctagagttgaaaataattctacagccttagggggacctcttggcattgactctaaagggagagaatagcccctgtgtcctggcatttcagtctagaccttcaaggactgttctctcttgacaggcaagcaagcaaagaaagttttgcaatagatttcaagccagtttttccattcaaaccaagatgcaaattcataaaattactcttttcctggaatagatccaggcagctgccttattagaactttagattcggatctattttcttaacacacatacacatacacgcgcatacatacatatacagagagatacgtggagaaaggaaatttactctatcattgcaatacttcaagaaagagctgtattttgcctttctgtaatctccaagatagtgtctaggaaagtaatagtataactatagggataccgaaacaggaaaaaccagccatcactcttgagaaagtttgagttcgactcacatgggagaatcgaggtctgctactcgtcttgctttgtgccccatctgtgcctggatgccctactacatctgcttgactcgtctgggctgctagccggggtgttgtggctgacatcctttcctggccttacacacataatagacacatccctaacggcgtgtgcctggtccagccacatacagccaccacatgtgtcacacactgtccccctcatccatgtggacttgactggcatttcagcagctccactgggatgctctaaccccagtgtgtggagttggggtcccttcatctaggttgacccaggtatagcatttttagcattgcctttccagtcttgatgattcattcattgaactcatttatttctggagcccctggtacactccaggcactgcgctaattgccagcaaagcacaactgaactaaatccaccttcaaggaacctagccataacgagggaggcagcatggaagtaccctacaggggaaagtcctgagtgctgtgggagcatctcaccgtggcagccagcccagttttggcaatcaggggcttcctgaaagaggtgacatcaaagcccggatgtgtcagaggactgagggagagtgttactaaaggactttcaggctgagaggatagcacaggactcagcccaaaggagggccagtgtggactgtccagggccagcctgcagtacagaggctggagcttggacttgtagagggagagagaagagcaagggacgtggacggggcagtgagccaggctagccacagagggttcccggggctttgctggggattcagggagcataaataagagctttaggtggtgctgtgtcctctgcagcccactgctgaggtcctccagacaggtaaggtgtggtcacaatcagggccggggtttccctgctcactgcggcagtgcaggggtgcttgctgagatgattcatcccagggtgtcctctgtcccttacccagccccaactcctcttcctctgccaaaagctatttgaattcaaggactttaacctgggccggatctggtttggagacaaaggggacagctctgggtcagcatgaccttctttagagccactaaggcgaaaaataccgtttgggaccaggctggcctagacccagggatgagaatgcaccctaaaataaatatacgggaagcagcagagggcttccctgtctagtgtgtgatcctaactaaaggcagctctcttggacagccttcccctggattaggtcacatacacctggtggccaagcctctgctgggtcccaaatacacacccgagtcctgccaaagaaaggagatttttaaaaagcacagacaaattgtatgcaagtggaaaatacccataggcctagacagctgtggagggaagacctcgtgggtacctggaggctgccagagctgggagctctgcaggtatgagtcagggaaggctcagagacaagcagaatctctctatggagacaacttgcagtgccttttaggttttccaaataacctcggagttcagagcattgggtttttttctcccctccccacccccagaaaaataattagaaaaatgtttaggagaaaggaaaagaattagatgcatcagaataccagctataagccaacactgtttccagaaactcaagaaaaagctcaaacagaagacagttcccctgagaggctggaggcgttggtgctgaaggcaattttcctagctaaggggcactgggccttgctgcaccttggggctgaccttttttgcaaaacacccacccctgccctcctggcatactcaacagcaacgccagctttctggacccttggaaagatgttagctcaaacacccactttttccagatcttcctcttgctcttcactgaggaatttgtaattctgaggctagcgatgccgactcggatattccgcaggcccaggtgtttagattagaatttgtccagcggtaatcctgatgctggaaaccaacaaacatttggcctcatattcacccatttaaaaactagagcccctggcaggtccccttagggccatgtgttcatggaatataagccaagtttgccttagcgcttgttcatggaatataagccaagtttacctctccccattttctgccctggcccacttcccactcacctccacctcattgccaggaagggatcaaaatgcctccatgccagttgttaaatggctacatatttgcccttcccaagggtatttgcatttntatttaggaacatggccttatattcaaggaaaatctagcatcaagattacgaggcatcacctctcaatcaggtctgggaggtatcttggggcattgctcttctgaacacctgcagaggcttcctcaggtgagtgtgggagcccggaaggtggcctccctaaccactctgcctgcacatgaattctccaaagcagtgggcccccatctgtttcaattacacatgcctgtcagcaaaaacttcgtgagatgcactctctctgtgtgtttattaatttatttaaagcatatatccctttacttttgtactactatattaggcacattataaaaagtatacagcatagaaactttaaatgaataagacacaaaatattataaacagaggttctggcattttctctctgaactcctgagggggaccttgggcacctcctggtatgtgcacaccccactttgaacacccttgctttagtgcaaatcagcacgcctaaatagcatcccaaaccactgtgcgacatttggcctgcagaataagaaagtcctaaggcagaatccccaggaacttcaaatctgggagatgaggaaagaaaactcactcacaaacaacataaatgtaaataattcaaaaccctaaaggagagctgtccctagacagtagtggctacaggtgctaagcaaaagtcaggtacactggacagagccatgcgattgattgttcatcttccctctctgggtctccagaaaaggacactggcaatatccccagctctctcctgattggaattctttgaaccctcgaagtgctccagcagtactaccccccacgtagcagtgggcccatgtcgcttgaatattatttttgatttgaccaccaagatgtaatgatgattctattccattttgaaaagggtctgagaaagtgtacaggtctaattatatatacatatttatacatgtgtatttttgtttattgttacattttgacattggactttctattaaataatttttaaga

SEQ ID NO: 17964 - DNA, 9725 bp, Homo sapiens
  misc_feature (4408)..(4408): n is a, c, g, or t
  misc_feature (8710)..(8710): n is a, c, g, or t
cactggcaaccaccattctactttctgtctccatgaatttgactactccaggctgctgtgcattttagagaagttcttatgtgatactgaaaaaagtgccagctcaaatgtaagacttaaaactaataaagaggttccgggattagttcatcaacccagagcaaacatgcacatctctgaaagccaacaagaattcttcagaatgctggatgaaaaaattgaaaagggtcgggattactgttcggaagaagaggatatcacatagcaccaattttaccactcaaaccaggagctactactgtgtaaataggttacaccccagttgaaatctttgcaaaggtcggttctattcagcgaacagcactatagcaaaagaagatcgttccatattgtacgccccattaaattacagtgtttcttaatgaacttgcaaaggaatattgctaaaaacaaacaaaaaaaactgttatcgaactttctttgttgctgctagttaaaacttgttgcaacttttcacttctcttgtgtccaggtatgcagcaaaattctgcaatttcaccttaaagatactgttggttttacagatgctctccaacctattttctataagatgaggtagtggtgaactcagataacaaacttctcttctaaactggttctgcttctaagacaagcatctcctgccctctctccttcctccccatctctcgcacgcagtctagagatggactgagccttgcttctcactggcagtgttgagctttggagatgggatggttgctatgccaagccttgtttctctgctcagaagaagtagagaagctattatcaattaaaagcatgctgtgatgtgactcctggaagtgacgtaggagtgagtggcaggttgtttgatttaataggtatcttaatcaagaattaagcttgcaacattggctttgctcagatgcagatggaagtgtgatcacaatcattttgaatccctcttcctcacttttttttctaagaaaataaacattttactgtttttatggatccttgtcttctcccattcatccagctcagtgttttaagatgatcctgggtgcagaagttgagccctcctttgcattgacactgataattagcctatagggctccctacccttccattaagaatctaccaagcattagcaaggctgaaagtggtctaagaggtgaggggacatcctatgactttttaggaaggcctgaaaccaccttgttacctttcattttgttagcaaataaaccatcctattttgtaactctcccccttcaaaatgctacatgagccttgccacttcctttttctcttacttccagcacactagacatagcaaaagtgtttgcctactcaaaaacataatacttttatgctgatgatggtatttggagatgtgaaagccaaaagcccctggcagtggtggggaatgttgactgagtgttcagcagagtttatttttccatactatatgaagagaatgatctcttctcaaagacagaagtgatatttttaacaaatattgtcacaagtaaatagcaatcaaaaggagaaaataacttttgtatttttttaatgtgtttgatagctttgacgagggttctctttgttactttcaggggagggcatcctattaaatgccacgccagcagtccgggtctgggtttgtcccacaaaatcacaggagcactgtatgttcctctcttttggagttgtgactttgaagggcctcaatattagccacactgccgcctgcagaaggtggagagttaagatgttctatgtcaatttgctcttgccgaaaagatgagcctcgattttaaaatctatccacatccaactgatggcaccattgatgtgcaaataatgagattccctatctccttttagacctgggacggcaaaagggaagggaaggaaacttagcagagtgctattgactatagattcacatattagcaacaaaatcccgtaattcttttggccaacagcagctattttggggagcagctgtggctgttacataaatagagatgcagccaaaattttaggccttttatcctgcttctagcagaaaaatgcagggagagtcaagtagtctagggtttcaggttgcctcccctcatatggtttttggccaagtgactaaaacagttttccacaactgtaaacaaactggtaagccccacctcaaacttgttcactggggactttgcttaccgttctgtgggtgaccttttccgggatttcttgttcttatcaagcaagaattaagcacatgctaaacgtcttccatttgacttctctactcggtgtctcagacagtgtcttcccagaaaaccaccaccctctacccaaagatgaaacatgctcatgtcatttttctcatggtcacatttaacagttttgacatgttatacttgcgcatagatccaagcgtttcttgggaacctgacttttgagtgtttaataaagccggaagtggtgttgccctgaaccagcagattttcacctgggttctggctccggtgtttaacactggatacatctttgatgtgcgaaagtgagttcatcttcagacacatttggtacatccagaaatagatccaagaaatggggtggttgagtgggtccgcacgaaatgcttgattatgtcagcaacacccaacactgtctgttttccatttgttggttttaatcataaaattgtcaagtgattcgtgttgtactttatttttgtgccttctgaacggatctaaaacaaaagtattttgccttttttaccccacgtgtatctgaacattaagcagattggctcagacaccatgaaaaggatactccaatgtacgtgctggtgcactctgctagttgttatctctgtagggctcaagaagctggaaggaggaagggagggtaagtggcctggtgagtggaggtagaaaaatgatgagaaatgaactgagagcattaagcagagagggttgataggctggccgtgtccggggtgaaattggaaatccagctgcctagtggccagtgggtggggcaagactgtcaacgagatttacagctggcttacacatgccttatgtcctctgagttgtagagttgtaaaagttcagcagtgtgtgcacagctttcttttggttggcagagattcaggatcatggagtactgctctcataattgaagacgtgtttgttattggcagagaaccttaaaaaaggcctttacctcagcgatgcttcctagccccaggcttgcagagaacacagagtggtgttgtggtctatttagggacaaagaaggtataaagtccagagatgagaaaactgggtcagccctcagaaactgcagcagccacgcacacagaagcctgctggaagacaggtctctctccgtccacagtgcccatcatctgagcctgggctgggatgactcaacttagcaaagacggacccaggaggagtgctggttcttcagtctttgtactggccccatcctctcctcactgtaatgtgaggaagcacctctgtgtcagggctcacctgggcatccaaagcggccacgcccacaatccgacagcccccaggagcaggtccagggatgatgcagcccccttcttggtcccatgtgatgtcatcctgctttgttatcttcttataactttatcctgctataactttatcctcttcccagcctcatccctgtttttctgttagggcaagactcttccataagcctgctaaaaaacagagatgatacctcttacaaactttacctcatagcctgtgaagcaggttggcatgtggattacaagtcctgctttgacactgggcaagaatttaagattgttctatctctactagtcatagaaaagaaacattgttaaacatgttgagttttaaaggaagaaatattttcaaattcttaatccaagaaaatactgagttggaatcttagacttcgggactctgacacgttctttatgaaaggcaaaataattggtatctaaagttctctccttcctgcctcccctaaagaaaaaggatattagattgcacactataattttacataagatctgccttccacacttccctgctggaaggcattctcagagctttatgtcttcgtacctctcagagattggactttttcttgtttaaaaccccaaccaaaaaaaataataaggcatgattggtggggagggaatgtgtatttaggggcataataaaaaggtggctcgaagcaggaactttggcctcatggtgtcatgggtggatgcctggactccagtgtgcctgtgaggggctgggttaggcagtcggctgtcacactcacatgtgcctgcaataaaccttttggaatttcatgaacgaggtnctatgaattgccttttgccaatgaatggatgtatttttccaaggggggaatagtatccttgactttggcagtcacctttttgtatgtctctagaaaggggtcaaaaaaactatggtaaagatgaggcttatgagtgaatacctctgggacaaaccttaggactcacaagctatgccatgtttttcaggagactcttgtaccttatctggaatccaatcctgggagaagaggaaaaaggagctaatatttgtcctttatactcactctgtgccagatactgtgccaggcattttataattgttttgtgtcatccccatgatatccgttaaattaatctattacccccgtgttctaaataatagatcttaagtgtggaatgcatctatccaacataaatgcccatgttgaaagaaggaaagatgtcattcaagtatttttcaaattctttttattatgactatgcccttcgcaacactgtgaaaacaacccctgggggcatctgccttccagaatctctctctggcttctcaccagcttggtttcctcatggggagtgttttatttggcctcccctatctgagctgcacacacaccagggggaggccactggctaacagtaggacttcagtgccctgaggaaaaggctttgggaatttaggcacacgtttctctccttggaatccttctagcatctggaaaaggaacctggtatttctgcagttagataccagatgcaaccagaacaggctttcgagtgctgtgatttctttcctgggttcccaagtcttgttgtttcatcacaaactgtatctttttaaggttaaaagtcttgaccttcatgggggtctgggacaatccgatctccaagcatggaggaaaggcaatgcctggaccactgacttgcattgaaatcctttcttgtgggctagggtttgatgtctctttttcatctttggactggggatctgcatcttccaggtccatttaagcactgaaactagatgcaaatctctttcgagaccttacatgttttagatagtcatgtaatgacttggatagacatttaaataacttgttccaaggtcggaagagcccaagaactcctcagagttcctcttcttgcttcttgaatcacatcctctaaagatgactcatgtctccatagcaactgttaaaggtgctgcctagacgggacccgctcccacctttacttactttgctcgaaggaaccaaaacaatgtccttgtgtaaaggggctgtcatatccagttttcctttgaaatctggcccccaagatcctgcttctttctaacctggcagctgtcatgtcccttcaagatgatgtgggaaatggcccttacaacttgggaaccacagaaattgctgtatttcgggaagattcacctctaaactgaaggcttcattctgatagtgtctgccctctctaccctgatttcgcccttctttgcttccatttttagcccaaggctttgaatttgattgagtaagacttagaggcagtataaagaacaccataaacttaggcagaggtcccttagggtctctagagttgaaaataattctacagccttagggggacctcttggcattgactctaaagggagagaatagcccctgtgtcctggcatttcagtctagaccttcaaggactgttctctcttgacaggcaagcaagcaaagaaagttttgcaatagatttcaagccagtttttccattcaaaccaagatgcaaattcataaaattactcttttcctggaatagatccaggcagctgccttattagaactttagattcggatctattttcttaacacacatacacatacacgcgcatacatacatatacagagagatacgtggagaaaggaaatttactctatcattgcaatacttcaagaaagagctgtattttgcctttctgtaatctccaagatagtgtctaggaaagtaatagtataactatagggataccgaaacaggaaaaaccagccatcactcttgagaaagtttgagttcgactcacatgggagaatcgaggtctgctactcgtcttgctttgtgccccatctgtgcctggatgccctactacatctgcttgactcgtctgggctgctagccggggtgttgtggctgacatcctttcctggccttacacacataatagacacatccctaacggcgtgtgcctggtccagccacatacagccaccacatgtgtcacacactgtccccctcatccatgtggacttgactggcatttcagcagctccactgggatgctctaaccccagtgtgtggagttggggtcccttcatctaggttgacccaggtatagcatttttagcattgcctttccagtcttgatgattcattcattgaactcatttatttctggagcccctggtacactccaggcactgcgctaattgccagcaaagcacaactgaactaaatccaccttcaaggaacctagccataacgagggaggcagcatggaagtaccctacaggggaaagtcctgagtgctgtgggagcatctcaccgtggcagccagcccagttttggcaatcaggggcttcctgaaagaggtgacatcaaagcccggatgtgtcagaggactgagggagagtgttactaaaggactttcaggctgagaggatagcacaggactcagcccaaaggagggccagtgtggactgtccagggccagcctgcagtacagaggctggagcttggacttgtagagggagagagaagagcaagggacgtggacggggcagtgagccaggctagccacagagggttcccggggctttgctggggattcagggagcataaataagagctttaggtggtgctgtgtcctctgcagcccactgctgaggtcctccagacaggtaaggtgtggtcacaatcagggccggggtttccctgctcactgcggcagtgcaggggtgcttgctgagatgattcatcccagggtgtcctctgtcccttacccagccccaactcctcttcctctgccaaaagctatttgaattcaaggactttaacctgggccggatctggtttggagacaaaggggacagctctgggtcagcatgaccttctttagagccactaaggcgaaaaataccgtttgggaccaggctggcctagacccagggatgagaatgcaccctaaaataaatatacgggaagcagcagagggcttccctgtctagtgtgtgatcctaactaaaggcagctctcttggacagccttcccctggattaggtcacatacacctggtggccaagcctctgctgggtcccaaatacacacccgagtcctgccaaagaaaggagatttttaaaaagcacagacaaattgtatgcaagtggaaaatacccataggcctagacagctgtggagggaagacctcgtgggtacctggaggctgccagagctgggagctctgcaggtatgagtcagggaaggctcagagacaagcagaatctctctatggagacaacttgcagtgccttttaggttttccaaataacctcggagttcagagcattgggtttttttctcccctccccacccccagaaaaataattagaaaaatgtttaggagaaaggaaaagaattagatgcatcagaataccagctataagccaacactgtttccagaaactcaagaaaaagctcaaacagaagacagttcccctgagaggctggaggcgttggtgctgaaggcaattttcctagctaaggggcactgggccttgctgcaccttggggctgaccttttttgcaaaacacccacccctgccctcctggcatactcaacagcaacgccagctttctggacccttggaaagatgttagctcaaacacccactttttccagatcttcctcttgctcttcactgaggaatttgtaattctgaggctagcgatgccgactcggatattccgcaggcccaggtgtttagattagaatttgtccagcggtaatcctgatgctggaaaccaacaaacatttggcctcatattcacccatttaaaaactagagcccctggcaggtccccttagggccatgtgttcatggaatataagccaagtttgccttagcgcttgttcatggaatataagccaagtttacctctccccattttctgccctggcccacttcccactcacctccacctcattgccaggaagggatcaaaatgcctccatgccagttgttaaatggctacatatttgcccttcccaagggtatttgcatttntatttaggaacatggccttatattcaaggaaaatctagcatcaagattacgaggcatcacctctcaatcaggtctgggaggtatcttggggcattgctcttctgaacacctgcagaggcttcctcaggtgagtgtgggagcccggaaggtggcctccctaaccactctgcctgcacatgaattctccaaagcagtgggcccccatctgtttcaattacacatgcctgtcagcaaaaacttcgtgagatgcactctctctgtgtgtttattaatttatttaaagcatatatccctttacttttgtactactatattaggcacattataaaaagtatacagcatagaaactttaaatgaataagacacaaaatattataaacagaggttctggcattttctctctgaactcctgagggggaccttgggcacctcctggtatgtgcacaccccactttgaacacccttgctttagtgcaaatcagcacgcctaaatagcatcccaaaccactgtgcgacatttggcctgcagaataagaaagtcctaaggcagaatccccaggaacttcaaatctgggagatgaggaaagaaaactcactcacaaacaacataaatgtaaataattcaaaaccctaaaggagagctgtccctagacagtagtggctacaggtgctaagcaaaagtcaggtacactggacagagccatgcgattgattgttcatcttccctctctgggtctccagaaaaggacactggcaatatccccagctctctcctgattggaattctttgaaccctcgaagtgctccagcagtactaccccccacgtagcagtgggcccatgtcgcttgaatattatttttgatttgaccaccaagatgtaatgatgattctattccattttgaaaagggtctgagaaagtgtacaggtctaattatatatacatatttatacatgtgtatttttgtttattgttacattttgacattggactttctattaaataatttttaaga

SEQ ID NO: 17965 - DNA, 9687 bp, Homo sapiens
  misc_feature (37)..(37): n is a, c, g, or t
  misc_feature (4370)..(4370): n is a, c, g, or t
  misc_feature (8672)..(8672): n is a, c, g, or t
tcgtctatattccgcaaatgtaacatattaaaatttntttttttcattaagaaaaaagtgccagctcaaatgtaagacttaaaactaataaagaggttccgggattagttcatcaacccagagcaaacatgcacatctctgaaagccaacaagaattcttcagaatgctggatgaaaaaattgaaaagggtcgggattactgttcggaagaagaggatatcacatagcaccaattttaccactcaaaccaggagctactactgtgtaaataggttacaccccagttgaaatctttgcaaaggtcggttctattcagcgaacagcactatagcaaaagaagatcgttccatattgtacgccccattaaattacagtgtttcttaatgaacttgcaaaggaatattgctaaaaacaaacaaaaaaaactgttatcgaactttctttgttgctgctagttaaaacttgttgcaacttttcacttctcttgtgtccaggtatgcagcaaaattctgcaatttcaccttaaagatactgttggttttacagatgctctccaacctattttctataagatgaggtagtggtgaactcagataacaaacttctcttctaaactggttctgcttctaagacaagcatctcctgccctctctccttcctccccatctctcgcacgcagtctagagatggactgagccttgcttctcactggcagtgttgagctttggagatgggatggttgctatgccaagccttgtttctctgctcagaagaagtagagaagctattatcaattaaaagcatgctgtgatgtgactcctggaagtgacgtaggagtgagtggcaggttgtttgatttaataggtatcttaatcaagaattaagcttgcaacattggctttgctcagatgcagatggaagtgtgatcacaatcattttgaatccctcttcctcacttttttttctaagaaaataaacattttactgtttttatggatccttgtcttctcccattcatccagctcagtgttttaagatgatcctgggtgcagaagttgagccctcctttgcattgacactgataattagcctatagggctccctacccttccattaagaatctaccaagcattagcaaggctgaaagtggtctaagaggtgaggggacatcctatgactttttaggaaggcctgaaaccaccttgttacctttcattttgttagcaaataaaccatcctattttgtaactctcccccttcaaaatgctacatgagccttgccacttcctttttctcttacttccagcacactagacatagcaaaagtgtttgcctactcaaaaacataatacttttatgctgatgatggtatttggagatgtgaaagccaaaagcccctggcagtggtggggaatgttgactgagtgttcagcagagtttatttttccatactatatgaagagaatgatctcttctcaaagacagaagtgatatttttaacaaatattgtcacaagtaaatagcaatcaaaaggagaaaataacttttgtatttttttaatgtgtttgatagctttgacgagggttctctttgttactttcaggggagggcatcctattaaatgccacgccagcagtccgggtctgggtttgtcccacaaaatcacaggagcactgtatgttcctctcttttggagttgtgactttgaagggcctcaatattagccacactgccgcctgcagaaggtggagagttaagatgttctatgtcaatttgctcttgccgaaaagatgagcctcgattttaaaatctatccacatccaactgatggcaccattgatgtgcaaataatgagattccctatctccttttagacctgggacggcaaaagggaagggaaggaaacttagcagagtgctattgactatagattcacatattagcaacaaaatcccgtaattcttttggccaacagcagctattttggggagcagctgtggctgttacataaatagagatgcagccaaaattttaggccttttatcctgcttctagcagaaaaatgcagggagagtcaagtagtctagggtttcaggttgcctcccctcatatggtttttggccaagtgactaaaacagttttccacaactgtaaacaaactggtaagccccacctcaaacttgttcactggggactttgcttaccgttctgtgggtgaccttttccgggatttcttgttcttatcaagcaagaattaagcacatgctaaacgtcttccatttgacttctctactcggtgtctcagacagtgtcttcccagaaaaccaccaccctctacccaaagatgaaacatgctcatgtcatttttctcatggtcacatttaacagttttgacatgttatacttgcgcatagatccaagcgtttcttgggaacctgacttttgagtgtttaataaagccggaagtggtgttgccctgaaccagcagattttcacctgggttctggctccggtgtttaacactggatacatctttgatgtgcgaaagtgagttcatcttcagacacatttggtacatccagaaatagatccaagaaatggggtggttgagtgggtccgcacgaaatgcttgattatgtcagcaacacccaacactgtctgttttccatttgttggttttaatcataaaattgtcaagtgattcgtgttgtactttatttttgtgccttctgaacggatctaaaacaaaagtattttgccttttttaccccacgtgtatctgaacattaagcagattggctcagacaccatgaaaaggatactccaatgtacgtgctggtgcactctgctagttgttatctctgtagggctcaagaagctggaaggaggaagggagggtaagtggcctggtgagtggaggtagaaaaatgatgagaaatgaactgagagcattaagcagagagggttgataggctggccgtgtccggggtgaaattggaaatccagctgcctagtggccagtgggtggggcaagactgtcaacgagatttacagctggcttacacatgccttatgtcctctgagttgtagagttgtaaaagttcagcagtgtgtgcacagctttcttttggttggcagagattcaggatcatggagtactgctctcataattgaagacgtgtttgttattggcagagaaccttaaaaaaggcctttacctcagcgatgcttcctagccccaggcttgcagagaacacagagtggtgttgtggtctatttagggacaaagaaggtataaagtccagagatgagaaaactgggtcagccctcagaaactgcagcagccacgcacacagaagcctgctggaagacaggtctctctccgtccacagtgcccatcatctgagcctgggctgggatgactcaacttagcaaagacggacccaggaggagtgctggttcttcagtctttgtactggccccatcctctcctcactgtaatgtgaggaagcacctctgtgtcagggctcacctgggcatccaaagcggccacgcccacaatccgacagcccccaggagcaggtccagggatgatgcagcccccttcttggtcccatgtgatgtcatcctgctttgttatcttcttataactttatcctgctataactttatcctcttcccagcctcatccctgtttttctgttagggcaagactcttccataagcctgctaaaaaacagagatgatacctcttacaaactttacctcatagcctgtgaagcaggttggcatgtggattacaagtcctgctttgacactgggcaagaatttaagattgttctatctctactagtcatagaaaagaaacattgttaaacatgttgagttttaaaggaagaaatattttcaaattcttaatccaagaaaatactgagttggaatcttagacttcgggactctgacacgttctttatgaaaggcaaaataattggtatctaaagttctctccttcctgcctcccctaaagaaaaaggatattagattgcacactataattttacataagatctgccttccacacttccctgctggaaggcattctcagagctttatgtcttcgtacctctcagagattggactttttcttgtttaaaaccccaaccaaaaaaaataataaggcatgattggtggggagggaatgtgtatttaggggcataataaaaaggtggctcgaagcaggaactttggcctcatggtgtcatgggtggatgcctggactccagtgtgcctgtgaggggctgggttaggcagtcggctgtcacactcacatgtgcctgcaataaaccttttggaatttcatgaacgaggtnctatgaattgccttttgccaatgaatggatgtatttttccaaggggggaatagtatccttgactttggcagtcacctttttgtatgtctctagaaaggggtcaaaaaaactatggtaaagatgaggcttatgagtgaatacctctgggacaaaccttaggactcacaagctatgccatgtttttcaggagactcttgtaccttatctggaatccaatcctgggagaagaggaaaaaggagctaatatttgtcctttatactcactctgtgccagatactgtgccaggcattttataattgttttgtgtcatccccatgatatccgttaaattaatctattacccccgtgttctaaataatagatcttaagtgtggaatgcatctatccaacataaatgcccatgttgaaagaaggaaagatgtcattcaagtatttttcaaattctttttattatgactatgcccttcgcaacactgtgaaaacaacccctgggggcatctgccttccagaatctctctctggcttctcaccagcttggtttcctcatggggagtgttttatttggcctcccctatctgagctgcacacacaccagggggaggccactggctaacagtaggacttcagtgccctgaggaaaaggctttgggaatttaggcacacgtttctctccttggaatccttctagcatctggaaaaggaacctggtatttctgcagttagataccagatgcaaccagaacaggctttcgagtgctgtgatttctttcctgggttcccaagtcttgttgtttcatcacaaactgtatctttttaaggttaaaagtcttgaccttcatgggggtctgggacaatccgatctccaagcatggaggaaaggcaatgcctggaccactgacttgcattgaaatcctttcttgtgggctagggtttgatgtctctttttcatctttggactggggatctgcatcttccaggtccatttaagcactgaaactagatgcaaatctctttcgagaccttacatgttttagatagtcatgtaatgacttggatagacatttaaataacttgttccaaggtcggaagagcccaagaactcctcagagttcctcttcttgcttcttgaatcacatcctctaaagatgactcatgtctccatagcaactgttaaaggtgctgcctagacgggacccgctcccacctttacttactttgctcgaaggaaccaaaacaatgtccttgtgtaaaggggctgtcatatccagttttcctttgaaatctggcccccaagatcctgcttctttctaacctggcagctgtcatgtcccttcaagatgatgtgggaaatggcccttacaacttgggaaccacagaaattgctgtatttcgggaagattcacctctaaactgaaggcttcattctgatagtgtctgccctctctaccctgatttcgcccttctttgcttccatttttagcccaaggctttgaatttgattgagtaagacttagaggcagtataaagaacaccataaacttaggcagaggtcccttagggtctctagagttgaaaataattctacagccttagggggacctcttggcattgactctaaagggagagaatagcccctgtgtcctggcatttcagtctagaccttcaaggactgttctctcttgacaggcaagcaagcaaagaaagttttgcaatagatttcaagccagtttttccattcaaaccaagatgcaaattcataaaattactcttttcctggaatagatccaggcagctgccttattagaactttagattcggatctattttcttaacacacatacacatacacgcgcatacatacatatacagagagatacgtggagaaaggaaatttactctatcattgcaatacttcaagaaagagctgtattttgcctttctgtaatctccaagatagtgtctaggaaagtaatagtataactatagggataccgaaacaggaaaaaccagccatcactcttgagaaagtttgagttcgactcacatgggagaatcgaggtctgctactcgtcttgctttgtgccccatctgtgcctggatgccctactacatctgcttgactcgtctgggctgctagccggggtgttgtggctgacatcctttcctggccttacacacataatagacacatccctaacggcgtgtgcctggtccagccacatacagccaccacatgtgtcacacactgtccccctcatccatgtggacttgactggcatttcagcagctccactgggatgctctaaccccagtgtgtggagttggggtcccttcatctaggttgacccaggtatagcatttttagcattgcctttccagtcttgatgattcattcattgaactcatttatttctggagcccctggtacactccaggcactgcgctaattgccagcaaagcacaactgaactaaatccaccttcaaggaacctagccataacgagggaggcagcatggaagtaccctacaggggaaagtcctgagtgctgtgggagcatctcaccgtggcagccagcccagttttggcaatcaggggcttcctgaaagaggtgacatcaaagcccggatgtgtcagaggactgagggagagtgttactaaaggactttcaggctgagaggatagcacaggactcagcccaaaggagggccagtgtggactgtccagggccagcctgcagtacagaggctggagcttggacttgtagagggagagagaagagcaagggacgtggacggggcagtgagccaggctagccacagagggttcccggggctttgctggggattcagggagcataaataagagctttaggtggtgctgtgtcctctgcagcccactgctgaggtcctccagacaggtaaggtgtggtcacaatcagggccggggtttccctgctcactgcggcagtgcaggggtgcttgctgagatgattcatcccagggtgtcctctgtcccttacccagccccaactcctcttcctctgccaaaagctatttgaattcaaggactttaacctgggccggatctggtttggagacaaaggggacagctctgggtcagcatgaccttctttagagccactaaggcgaaaaataccgtttgggaccaggctggcctagacccagggatgagaatgcaccctaaaataaatatacgggaagcagcagagggcttccctgtctagtgtgtgatcctaactaaaggcagctctcttggacagccttcccctggattaggtcacatacacctggtggccaagcctctgctgggtcccaaatacacacccgagtcctgccaaagaaaggagatttttaaaaagcacagacaaattgtatgcaagtggaaaatacccataggcctagacagctgtggagggaagacctcgtgggtacctggaggctgccagagctgggagctctgcaggtatgagtcagggaaggctcagagacaagcagaatctctctatggagacaacttgcagtgccttttaggttttccaaataacctcggagttcagagcattgggtttttttctcccctccccacccccagaaaaataattagaaaaatgtttaggagaaaggaaaagaattagatgcatcagaataccagctataagccaacactgtttccagaaactcaagaaaaagctcaaacagaagacagttcccctgagaggctggaggcgttggtgctgaaggcaattttcctagctaaggggcactgggccttgctgcaccttggggctgaccttttttgcaaaacacccacccctgccctcctggcatactcaacagcaacgccagctttctggacccttggaaagatgttagctcaaacacccactttttccagatcttcctcttgctcttcactgaggaatttgtaattctgaggctagcgatgccgactcggatattccgcaggcccaggtgtttagattagaatttgtccagcggtaatcctgatgctggaaaccaacaaacatttggcctcatattcacccatttaaaaactagagcccctggcaggtccccttagggccatgtgttcatggaatataagccaagtttgccttagcgcttgttcatggaatataagccaagtttacctctccccattttctgccctggcccacttcccactcacctccacctcattgccaggaagggatcaaaatgcctccatgccagttgttaaatggctacatatttgcccttcccaagggtatttgcatttntatttaggaacatggccttatattcaaggaaaatctagcatcaagattacgaggcatcacctctcaatcaggtctgggaggtatcttggggcattgctcttctgaacacctgcagaggcttcctcaggtgagtgtgggagcccggaaggtggcctccctaaccactctgcctgcacatgaattctccaaagcagtgggcccccatctgtttcaattacacatgcctgtcagcaaaaacttcgtgagatgcactctctctgtgtgtttattaatttatttaaagcatatatccctttacttttgtactactatattaggcacattataaaaagtatacagcatagaaactttaaatgaataagacacaaaatattataaacagaggttctggcattttctctctgaactcctgagggggaccttgggcacctcctggtatgtgcacaccccactttgaacacccttgctttagtgcaaatcagcacgcctaaatagcatcccaaaccactgtgcgacatttggcctgcagaataagaaagtcctaaggcagaatccccaggaacttcaaatctgggagatgaggaaagaaaactcactcacaaacaacataaatgtaaataattcaaaaccctaaaggagagctgtccctagacagtagtggctacaggtgctaagcaaaagtcaggtacactggacagagccatgcgattgattgttcatcttccctctctgggtctccagaaaaggacactggcaatatccccagctctctcctgattggaattctttgaaccctcgaagtgctccagcagtactaccccccacgtagcagtgggcccatgtcgcttgaatattatttttgatttgaccaccaagatgtaatgatgattctattccattttgaaaagggtctgagaaagtgtacaggtctaattatatatacatatttatacatgtgtatttttgtttattgttacattttgacattggactttctattaaataatttttaaga

SEQ ID NO: 17966 - DNA, 1627 bp, Homo sapiens
tgagcgaggagctcccctccctcgctcgctcctcgcaagctcccgctcgctccctgcccactcccggggggacgttccgtgccgcggccgccgcggccgctgcttctttcacactttagttgggagctgcgcgccgcgctcagttactggagagctggccgcgcgccgccgcctcccgcacgcttgcacgcgggcccggcttcggggttttgggttcttactccaagcggcggggaggagggggagccccggacacactgtggggaggaggaggaagaagaggaggagggaggaagaaaaaagacgaggaggacaggggcggggggcgggaggcttgccaccttcagcccccccgcgaacgcccaaggtgcacacatcttgaccaactcagcagcaaggtggattttctttgtgtttaaagaaaaaaaatgtccctgtgtctgtagagatgatttgcagttcagcccggctgaagctgaccgaatgagactatgggctgtgcctccgccaagcatgttgccactgttcaaaatgaagaggaagcccagaaagggaaaaactaccagaacggagatgtgtttggcgatgagtataggatcaaaccagtggaagaggtcaaatacatgaaaaatggggcagaagaagagcagaaaatagcagccaggaaccaagaaaacttggaaaaaagtgccagctcaaatgtaagacttaaaactaataaagaggttccgggattagttcatcaacccagagcaaacatgcacatctctgaaagccaacaagaattcttcagaatgctggatgaaaaaattgaaaagggtcgggattactgttcggaagaagaggatatcacatagcaccaattttaccactcaaaccaggagctactactgtgtaaataggttacaccccagttgaaatctttgcaaaggtcggttctattcagcgaacagcactatagcaaaagaagatcgttccatattgtacgccccattaaattacagtgtttcttaatgaacttgcaaaggaatattgctaaaaacaaacaaaaaaaactgttatcgaactttctttgttgctgctagttaaaacttgttgcaacttttcacttctcttgtgtccaggtatgcagcaaaattctgcaatttcaccttaaagatactgttggttttacagatgctctccaacctattttctataagatgaggtagtggtgaactcagataacaaacttctcttctaaactggttctgcttctaagacaagcatctcctgccctctctccttcctccccatctctcgcacgcagtctagagatggactgagccttgcttctcactggcagtgttgagctttggagatgggatggttgctatgccaagccttgtttctctgctcagaagaagtagagaagctattatcaattaaaagcatgctgtgatgtgactcctggaagtgacgtaggagtgagtggcaggttgtttgatttaataggtatcttaatcaagaattaagcttgcaacattggctttgctcagatgcagatggaagtgtgatcacaatcattttgaatccctcttcctcacttttttttctaagaaaataaacattttactgtttttatgga

SEQ ID NO: 17967 - DNA, 3331 bp, Homo sapiens
tgagcgaggagctcccctccctcgctcgctcctcgcaagctcccgctcgctccctgcccactcccggggggacgttccgtgccgcggccgccgcggccgctgcttctttcacactttagttgggagctgcgcgccgcgctcagttactggagagctggccgcgcgccgccgcctcccgcacgcttgcacgcgggcccggcttcggggttttgggttcttactccaagcggcggggaggagggggagccccggacacactgtggggaggaggaggaagaagaggaggagggaggaagaaaaaagacgaggaggacaggggcggggggcgggaggcttgccaccttcagcccccccgcgaacgcccaaggtgcacacatcttgaccaactcagcagcaaggtggattttctttgtgtttaaagaaaaaaaatgtccctgtgtctgtagagatgatttgcagttcagcccggctgaagctgaccgaatgagactatgggctgtgcctccgccaagcatgttgccactgttcaaaatgaagaggaagcccagaaagggaaaaactaccagaacggagatgtgtttggcgatgagtataggatcaaaccagtggaagaggtcaaatacatgaaaaatggggcagaagaagagcagaaaatagcagccaggaaccaagaaaacttggaaaaaagtgccagctcaaatgtaagacttaaaactaataaagaggttccgggattagttcatcaacccagagcaaacatgcacatctctgaaagccaacaagaattcttcagaatgctggatgaaaaaattgaaaagggtcgggattactgttcggaagaagaggatatcacatagcaccaattttaccactcaaaccaggagctactactgtgtaaataggttacaccccagttgaaatctttgcaaaggtcggttctattcagcgaacagcactatagcaaaagaagatcgttccatattgtacgccccattaaattacagtgtttcttaatgaacttgcaaaggaatattgctaaaaacaaacaaaaaaaactgttatcgaactttctttgttgctgctagttaaaacttgttgcaacttttcacttctcttgtgtccaggtatgcagcaaaattctgcaatttcaccttaaagatactgttggttttacagatgctctccaacctattttctataagatgaggtagtggtgaactcagataacaaacttctcttctaaactggttctgcttctaagacaagcatctcctgccctctctccttcctccccatctctcgcacgcagtctagagatggactgagccttgcttctcactggcagtgttgagctttggagatgggatggttgctatgccaagccttgtttctctgctcagaagaagtagagaagctattatcaattaaaagcatgctgtgatgtgactcctggaagtgacgtaggagtgagtggcaggttgtttgatttaataggtatcttaatcaagaattaagcttgcaacattggctttgctcagatgcagatggaagtgtgatcacaatcattttgaatccctcttcctcacttttttttctaagaaaataaacattttactgtttttatggatccttgtcttctcccattcatccagctcagtgttttaagatgatcctgggtgcagaagttgagccctcctttgcattgacactgataattagcctatagggctccctacccttccattaagaatctaccaagcattagcaaggctgaaagtggtctaagaggtgaggggacatcctatgactttttaggaaggcctgaaaccaccttgttacctttcattttgttagcaaataaaccatcctattttgtaactctcccccttcaaaatgctacatgagccttgccacttcctttttctcttacttccagcacactagacatagcaaaagtgtttgcctactcaaaaacataatacttttatgctgatgatggtatttggagatgtgaaagccaaaagcccctggcagtggtggggaatgttgactgagtgttcagcagagtttatttttccatactatatgaagagaatgatctcttctcaaagacagaagtgatatttttaacaaatattgtcacaagtaaatagcaatcaaaaggagaaaataacttttgtatttttttaatgtgtttgatagctttgacgagggttctctttgttactttcaggggagggcatcctattaaatgccacgccagcagtccgggtctgggtttgtcccacaaaatcacaggagcactgtatgttcctctcttttggagttgtgactttgaagggcctcaatattagccacactgccgcctgcagaaggtggagagttaagatgttctatgtcaatttgctcttgccgaaaagatgagcctcgattttaaaatctatccacatccaactgatggcaccattgatgtgcaaataatgagattccctatctccttttagacctgggacggcaaaagggaagggaaggaaacttagcagagtgctattgactatagattcacatattagcaacaaaatcccgtaattcttttggccaacagcagctattttggggagcagctgtggctgttacataaatagagatgcagccaaaattttaggccttttatcctgcttctagcagaaaaatgcagggagagtcaagtagtctagggtttcaggttgcctcccctcatatggtttttggccaagtgactaaaacagttttccacaactgtaaacaaactggtaagccccacctcaaacttgttcactggggactttgcttaccgttctgtgggtgaccttttccgggatttcttgttcttatcaagcaagaattaagcacatgctaaacgtcttccatttgacttctctactcggtgtctcagacagtgtcttcccagaaaaccaccaccctctacccaaagatgaaacatgctcatgtcatttttctcatggtcacatttaacagttttgacatgttatacttgcgcatagatccaagcgtttcttgggaacctgacttttgagtgtttaataaagccggaagtggtgttgccctgaaccagcagattttcacctgggttctggctccggtgtttaacactggatacatctttgatgtgcgaaagtgagttcatcttcagacacatttggtacatccagaaatagatccaagaaatggggtggttgagtgggtccgcacgaaatgcttgattatgtcagcaacacccaacactgtctgttttccatttgttggttttaatcataaaattgtcaagtga

SEQ ID NO: 17968 - DNA, 9701 bp, Homo sapiens
  misc_feature (4384)..(4384): n is a, c, g, or t
  misc_feature (8686)..(8686): n is a, c, g, or t
acacatttgcaggattactgtactgtttatccttaatgtaacttcagagtatttcagtggaaaagttctgcatttttcctttgaggggaccaggtttagcaaagcactaaaatatgcacttaactaccctttgtttttcagcatgcacatctctgaaagccaacaagaattcttcagaatgctggatgaaaaaattgaaaagggtcgggattactgttcggaagaagaggatatcacatagcaccaattttaccactcaaaccaggagctactactgtgtaaataggttacaccccagttgaaatctttgcaaaggtcggttctattcagcgaacagcactatagcaaaagaagatcgttccatattgtacgccccattaaattacagtgtttcttaatgaacttgcaaaggaatattgctaaaaacaaacaaaaaaaactgttatcgaactttctttgttgctgctagttaaaacttgttgcaacttttcacttctcttgtgtccaggtatgcagcaaaattctgcaatttcaccttaaagatactgttggttttacagatgctctccaacctattttctataagatgaggtagtggtgaactcagataacaaacttctcttctaaactggttctgcttctaagacaagcatctcctgccctctctccttcctccccatctctcgcacgcagtctagagatggactgagccttgcttctcactggcagtgttgagctttggagatgggatggttgctatgccaagccttgtttctctgctcagaagaagtagagaagctattatcaattaaaagcatgctgtgatgtgactcctggaagtgacgtaggagtgagtggcaggttgtttgatttaataggtatcttaatcaagaattaagcttgcaacattggctttgctcagatgcagatggaagtgtgatcacaatcattttgaatccctcttcctcacttttttttctaagaaaataaacattttactgtttttatggatccttgtcttctcccattcatccagctcagtgttttaagatgatcctgggtgcagaagttgagccctcctttgcattgacactgataattagcctatagggctccctacccttccattaagaatctaccaagcattagcaaggctgaaagtggtctaagaggtgaggggacatcctatgactttttaggaaggcctgaaaccaccttgttacctttcattttgttagcaaataaaccatcctattttgtaactctcccccttcaaaatgctacatgagccttgccacttcctttttctcttacttccagcacactagacatagcaaaagtgtttgcctactcaaaaacataatacttttatgctgatgatggtatttggagatgtgaaagccaaaagcccctggcagtggtggggaatgttgactgagtgttcagcagagtttatttttccatactatatgaagagaatgatctcttctcaaagacagaagtgatatttttaacaaatattgtcacaagtaaatagcaatcaaaaggagaaaataacttttgtatttttttaatgtgtttgatagctttgacgagggttctctttgttactttcaggggagggcatcctattaaatgccacgccagcagtccgggtctgggtttgtcccacaaaatcacaggagcactgtatgttcctctcttttggagttgtgactttgaagggcctcaatattagccacactgccgcctgcagaaggtggagagttaagatgttctatgtcaatttgctcttgccgaaaagatgagcctcgattttaaaatctatccacatccaactgatggcaccattgatgtgcaaataatgagattccctatctccttttagacctgggacggcaaaagggaagggaaggaaacttagcagagtgctattgactatagattcacatattagcaacaaaatcccgtaattcttttggccaacagcagctattttggggagcagctgtggctgttacataaatagagatgcagccaaaattttaggccttttatcctgcttctagcagaaaaatgcagggagagtcaagtagtctagggtttcaggttgcctcccctcatatggtttttggccaagtgactaaaacagttttccacaactgtaaacaaactggtaagccccacctcaaacttgttcactggggactttgcttaccgttctgtgggtgaccttttccgggatttcttgttcttatcaagcaagaattaagcacatgctaaacgtcttccatttgacttctctactcggtgtctcagacagtgtcttcccagaaaaccaccaccctctacccaaagatgaaacatgctcatgtcatttttctcatggtcacatttaacagttttgacatgttatacttgcgcatagatccaagcgtttcttgggaacctgacttttgagtgtttaataaagccggaagtggtgttgccctgaaccagcagattttcacctgggttctggctccggtgtttaacactggatacatctttgatgtgcgaaagtgagttcatcttcagacacatttggtacatccagaaatagatccaagaaatggggtggttgagtgggtccgcacgaaatgcttgattatgtcagcaacacccaacactgtctgttttccatttgttggttttaatcataaaattgtcaagtgattcgtgttgtactttatttttgtgccttctgaacggatctaaaacaaaagtattttgccttttttaccccacgtgtatctgaacattaagcagattggctcagacaccatgaaaaggatactccaatgtacgtgctggtgcactctgctagttgttatctctgtagggctcaagaagctggaaggaggaagggagggtaagtggcctggtgagtggaggtagaaaaatgatgagaaatgaactgagagcattaagcagagagggttgataggctggccgtgtccggggtgaaattggaaatccagctgcctagtggccagtgggtggggcaagactgtcaacgagatttacagctggcttacacatgccttatgtcctctgagttgtagagttgtaaaagttcagcagtgtgtgcacagctttcttttggttggcagagattcaggatcatggagtactgctctcataattgaagacgtgtttgttattggcagagaaccttaaaaaaggcctttacctcagcgatgcttcctagccccaggcttgcagagaacacagagtggtgttgtggtctatttagggacaaagaaggtataaagtccagagatgagaaaactgggtcagccctcagaaactgcagcagccacgcacacagaagcctgctggaagacaggtctctctccgtccacagtgcccatcatctgagcctgggctgggatgactcaacttagcaaagacggacccaggaggagtgctggttcttcagtctttgtactggccccatcctctcctcactgtaatgtgaggaagcacctctgtgtcagggctcacctgggcatccaaagcggccacgcccacaatccgacagcccccaggagcaggtccagggatgatgcagcccccttcttggtcccatgtgatgtcatcctgctttgttatcttcttataactttatcctgctataactttatcctcttcccagcctcatccctgtttttctgttagggcaagactcttccataagcctgctaaaaaacagagatgatacctcttacaaactttacctcatagcctgtgaagcaggttggcatgtggattacaagtcctgctttgacactgggcaagaatttaagattgttctatctctactagtcatagaaaagaaacattgttaaacatgttgagttttaaaggaagaaatattttcaaattcttaatccaagaaaatactgagttggaatcttagacttcgggactctgacacgttctttatgaaaggcaaaataattggtatctaaagttctctccttcctgcctcccctaaagaaaaaggatattagattgcacactataattttacataagatctgccttccacacttccctgctggaaggcattctcagagctttatgtcttcgtacctctcagagattggactttttcttgtttaaaaccccaaccaaaaaaaataataaggcatgattggtggggagggaatgtgtatttaggggcataataaaaaggtggctcgaagcaggaactttggcctcatggtgtcatgggtggatgcctggactccagtgtgcctgtgaggggctgggttaggcagtcggctgtcacactcacatgtgcctgcaataaaccttttggaatttcatgaacgaggtnctatgaattgccttttgccaatgaatggatgtatttttccaaggggggaatagtatccttgactttggcagtcacctttttgtatgtctctagaaaggggtcaaaaaaactatggtaaagatgaggcttatgagtgaatacctctgggacaaaccttaggactcacaagctatgccatgtttttcaggagactcttgtaccttatctggaatccaatcctgggagaagaggaaaaaggagctaatatttgtcctttatactcactctgtgccagatactgtgccaggcattttataattgttttgtgtcatccccatgatatccgttaaattaatctattacccccgtgttctaaataatagatcttaagtgtggaatgcatctatccaacataaatgcccatgttgaaagaaggaaagatgtcattcaagtatttttcaaattctttttattatgactatgcccttcgcaacactgtgaaaacaacccctgggggcatctgccttccagaatctctctctggcttctcaccagcttggtttcctcatggggagtgttttatttggcctcccctatctgagctgcacacacaccagggggaggccactggctaacagtaggacttcagtgccctgaggaaaaggctttgggaatttaggcacacgtttctctccttggaatccttctagcatctggaaaaggaacctggtatttctgcagttagataccagatgcaaccagaacaggctttcgagtgctgtgatttctttcctgggttcccaagtcttgttgtttcatcacaaactgtatctttttaaggttaaaagtcttgaccttcatgggggtctgggacaatccgatctccaagcatggaggaaaggcaatgcctggaccactgacttgcattgaaatcctttcttgtgggctagggtttgatgtctctttttcatctttggactggggatctgcatcttccaggtccatttaagcactgaaactagatgcaaatctctttcgagaccttacatgttttagatagtcatgtaatgacttggatagacatttaaataacttgttccaaggtcggaagagcccaagaactcctcagagttcctcttcttgcttcttgaatcacatcctctaaagatgactcatgtctccatagcaactgttaaaggtgctgcctagacgggacccgctcccacctttacttactttgctcgaaggaaccaaaacaatgtccttgtgtaaaggggctgtcatatccagttttcctttgaaatctggcccccaagatcctgcttctttctaacctggcagctgtcatgtcccttcaagatgatgtgggaaatggcccttacaacttgggaaccacagaaattgctgtatttcgggaagattcacctctaaactgaaggcttcattctgatagtgtctgccctctctaccctgatttcgcccttctttgcttccatttttagcccaaggctttgaatttgattgagtaagacttagaggcagtataaagaacaccataaacttaggcagaggtcccttagggtctctagagttgaaaataattctacagccttagggggacctcttggcattgactctaaagggagagaatagcccctgtgtcctggcatttcagtctagaccttcaaggactgttctctcttgacaggcaagcaagcaaagaaagttttgcaatagatttcaagccagtttttccattcaaaccaagatgcaaattcataaaattactcttttcctggaatagatccaggcagctgccttattagaactttagattcggatctattttcttaacacacatacacatacacgcgcatacatacatatacagagagatacgtggagaaaggaaatttactctatcattgcaatacttcaagaaagagctgtattttgcctttctgtaatctccaagatagtgtctaggaaagtaatagtataactatagggataccgaaacaggaaaaaccagccatcactcttgagaaagtttgagttcgactcacatgggagaatcgaggtctgctactcgtcttgctttgtgccccatctgtgcctggatgccctactacatctgcttgactcgtctgggctgctagccggggtgttgtggctgacatcctttcctggccttacacacataatagacacatccctaacggcgtgtgcctggtccagccacatacagccaccacatgtgtcacacactgtccccctcatccatgtggacttgactggcatttcagcagctccactgggatgctctaaccccagtgtgtggagttggggtcccttcatctaggttgacccaggtatagcatttttagcattgcctttccagtcttgatgattcattcattgaactcatttatttctggagcccctggtacactccaggcactgcgctaattgccagcaaagcacaactgaactaaatccaccttcaaggaacctagccataacgagggaggcagcatggaagtaccctacaggggaaagtcctgagtgctgtgggagcatctcaccgtggcagccagcccagttttggcaatcaggggcttcctgaaagaggtgacatcaaagcccggatgtgtcagaggactgagggagagtgttactaaaggactttcaggctgagaggatagcacaggactcagcccaaaggagggccagtgtggactgtccagggccagcctgcagtacagaggctggagcttggacttgtagagggagagagaagagcaagggacgtggacggggcagtgagccaggctagccacagagggttcccggggctttgctggggattcagggagcataaataagagctttaggtggtgctgtgtcctctgcagcccactgctgaggtcctccagacaggtaaggtgtggtcacaatcagggccggggtttccctgctcactgcggcagtgcaggggtgcttgctgagatgattcatcccagggtgtcctctgtcccttacccagccccaactcctcttcctctgccaaaagctatttgaattcaaggactttaacctgggccggatctggtttggagacaaaggggacagctctgggtcagcatgaccttctttagagccactaaggcgaaaaataccgtttgggaccaggctggcctagacccagggatgagaatgcaccctaaaataaatatacgggaagcagcagagggcttccctgtctagtgtgtgatcctaactaaaggcagctctcttggacagccttcccctggattaggtcacatacacctggtggccaagcctctgctgggtcccaaatacacacccgagtcctgccaaagaaaggagatttttaaaaagcacagacaaattgtatgcaagtggaaaatacccataggcctagacagctgtggagggaagacctcgtgggtacctggaggctgccagagctgggagctctgcaggtatgagtcagggaaggctcagagacaagcagaatctctctatggagacaacttgcagtgccttttaggttttccaaataacctcggagttcagagcattgggtttttttctcccctccccacccccagaaaaataattagaaaaatgtttaggagaaaggaaaagaattagatgcatcagaataccagctataagccaacactgtttccagaaactcaagaaaaagctcaaacagaagacagttcccctgagaggctggaggcgttggtgctgaaggcaattttcctagctaaggggcactgggccttgctgcaccttggggctgaccttttttgcaaaacacccacccctgccctcctggcatactcaacagcaacgccagctttctggacccttggaaagatgttagctcaaacacccactttttccagatcttcctcttgctcttcactgaggaatttgtaattctgaggctagcgatgccgactcggatattccgcaggcccaggtgtttagattagaatttgtccagcggtaatcctgatgctggaaaccaacaaacatttggcctcatattcacccatttaaaaactagagcccctggcaggtccccttagggccatgtgttcatggaatataagccaagtttgccttagcgcttgttcatggaatataagccaagtttacctctccccattttctgccctggcccacttcccactcacctccacctcattgccaggaagggatcaaaatgcctccatgccagttgttaaatggctacatatttgcccttcccaagggtatttgcatttntatttaggaacatggccttatattcaaggaaaatctagcatcaagattacgaggcatcacctctcaatcaggtctgggaggtatcttggggcattgctcttctgaacacctgcagaggcttcctcaggtgagtgtgggagcccggaaggtggcctccctaaccactctgcctgcacatgaattctccaaagcagtgggcccccatctgtttcaattacacatgcctgtcagcaaaaacttcgtgagatgcactctctctgtgtgtttattaatttatttaaagcatatatccctttacttttgtactactatattaggcacattataaaaagtatacagcatagaaactttaaatgaataagacacaaaatattataaacagaggttctggcattttctctctgaactcctgagggggaccttgggcacctcctggtatgtgcacaccccactttgaacacccttgctttagtgcaaatcagcacgcctaaatagcatcccaaaccactgtgcgacatttggcctgcagaataagaaagtcctaaggcagaatccccaggaacttcaaatctgggagatgaggaaagaaaactcactcacaaacaacataaatgtaaataattcaaaaccctaaaggagagctgtccctagacagtagtggctacaggtgctaagcaaaagtcaggtacactggacagagccatgcgattgattgttcatcttccctctctgggtctccagaaaaggacactggcaatatccccagctctctcctgattggaattctttgaaccctcgaagtgctccagcagtactaccccccacgtagcagtgggcccatgtcgcttgaatattatttttgatttgaccaccaagatgtaatgatgattctattccattttgaaaagggtctgagaaagtgtacaggtctaattatatatacatatttatacatgtgtatttttgtttattgttacattttgacattggactttctattaaataatttttaaga

SEQ ID NO: 17969 - DNA, 2169 bp, Homo sapiens
  misc_feature (2169)..(2169): n is a, c, g, or t
tgagcgaggagctcccctccctcgctcgctcctcgcaagctcccgctcgctccctgcccactcccggggggacgttccgtgccgcggccgccgcggccgctgcttctttcacactttagttgggagctgcgcgccgcgctcagttactggagagctggccgcgcgccgccgcctcccgcacgcttgcacgcgggcccggcttcggggttttgggttcttactccaagcggcggggaggagggggagccccggacacactgtggggaggaggaggaagaagaggaggagggaggaagaaaaaagacgaggaggacaggggcggggggcgggaggcttgccaccttcagcccccccgcgaacgcccaaggtgcacacatcttgaccaactcagcagcaaggtggattttctttgtgtttaaagaaaaaaaatgtccctgtgtctgtagagatgatttgcagttcagcccggctgaagctgaccgaatgagactatgggctgtgcctccgccaagcatgttgccactgttcaaaatgaagaggaagcccagaaagggaaaaactaccagaacggagatgtgtttggcgatgagtataggatcaaaccagtggaagaggtcaaatacatgaaaaatggggcagaagaagagcagaaaatagcagccaggaaccaagaaaacttggaaaaaagtgccagctcaaatgtaagacttaaaactaataaagaggttccgggattagttcatcaacccagagcaaacatgcacatctctgaaagccaacaagaattcttcagaatgctggatgaaaaaattgaaaagggtcgggattactgttcggaagaagaggatatcacatagcaccaattttaccactcaaaccaggagctactactgtgtaaataggttacaccccagttgaaatctttgcaaaggtcggttctattcagcgaacagcactatagcaaaagaagatcgttccatattgtacgccccattaaattacagtgtttcttaatgaacttgcaaaggaatattgctaaaaacaaacaaaaaaaactgttatcgaactttctttgttgctgctagttaaaacttgttgcaacttttcacttctcttgtgtccaggtatgcagcaaaattctgcaatttcaccttaaagatactgttggttttacagatgctctccaacctattttctataagatgaggtagtggtgaactcagataacaaacttctcttctaaactggttctgcttctaagacaagcatctcctgccctctctccttcctccccatctctcgcacgcagtctagagatggactgagccttgcttctcactggcagtgttgagctttggagatgggatggttgctatgccaagccttgtttctctgctcagaagaagtagagaagctattatcaattaaaagcatgctgtgatgtgactcctggaagtgacgtaggagtgagtggcaggttgtttgatttaataggtatcttaatcaagaattaagcttgcaacattggctttgctcagatgcagatggaagtgtgatcacaatcattttgaatccctcttcctcacttttttttctaagaaaataaacattttactgtttttatggaaaaaaaaaaaaaaaaaaaaaaaaaaaaaaaaaaaaaaaaaagaggggggggcgggcccaaaagattccccccgggggggccccatttcgcgcgcccccccgtttttgtgtgaaaaaagggggggcccccatatatggggaggcacgcgtattatatatagtgcgaggcagcacggggccggcggttataaacacaagcgttggcgtgggcagcgggaaaacaacgcgcgccccggctggggaacaccttctgggggggaggagacccccctctaatctagcgcgcggggcgggggacaccatttatgtgtggcgcacctactctctccatctcccagggaggatttttagacagcggctgcgaggggggatgcatattcctacacgattcttttcacgcggtgtttctagtgggcgtgtttaaccaccaccgcgcggccgtattcatgatcgggggggtccttgggtaagaaatttggggcctgacaggcgggtaattgtttctcttggagggactacattttttttttccgcggggctccn

SEQ ID NO: 17970 - DNA, 402 bp, Homo sapiens
caccaccatgcccggctaatttttgtatttttggcagagatgaggtctcgctatgtggcccaggctggtcttgaactcctgagctcaagtgatcctcccaactcggcctcccaaagtactgggattataggcatgggccaccacgcatggcctaggtcaaatttttattatatattttttagcagataataaaggttaaacatcccaaatcaaaaaatccaaaatccaaaatgctccaaaatctgcaactttttgagcactgacatcaaattctcactggaacatttcggacttcagattttcagattagggatgctcgttcagtaagtataatattctacaatctaaaaaaatctgacacccaaaacacttctggtcccaagctttttcagtaaaggatac

SEQ ID NO: 17971 - DNA, 513 bp, Homo sapiens
tgggtgacaggctgtcattgatagagctagataacgatgaaggtgatgataatgatagccaatcctatgtagcactcattaagtaccaagcactattaagtgcttgagggagaataaatcatacaatcctatgtggctcgtattcttgtcatatgcattttgttgatataaaaaaaaaatcaaggcacagaatgattaagacacatacctgaggtcatacagctagtaagttgcagagcaagaatggaacccaaggccgggcgcggtggctcatgcctgtaatcccagcactttgggaggctgaggctcgtggagcacaaggtcaggagttcgagaccagcctggccaacatagtgaaaccccgtctctactaaaaacacaaaaagtaaaattagccgggcatggtggcacacgcctgtagtcccagatactcaggagcctgaggcaggagaatcacttgaacctgggaggcggacattgcagtgagccgagatcgcgccactgcagtccagc

SEQ ID NO: 17972 - DNA, 748 bp, Homo sapiens
aaaattaaaccacaaagagagaacactgcacacccaccagaattgctaagatgaaatagatggtataccaaatattgacaaagctatgaaaaagcacaaactcatacactggtaatgggagtacaagttgttgcaaccatttggcattatctgcctaagctgcagatacgtgtattgtgtgacccagcattttcactcatccttatgtactgtagagaaatgcatttgtgcatcacgagtaccaagagatatgtaaaagaatgtgtacaacattatgttaaagtcattgtctagaaatagtacagatctctgtcaacagtagaatggataaatataagagtacattcatatgaaagaatattatactgcagtgaaaatgaaatcacagcagttctcaacatggatgaatgtcaccaaacattatgaattaaagaagatagatacatactcaagattctaactatataaagtttgaaaagcaggccaaaaaaactatagtgtttgggatgcttgtgtagatagatggcagagccataaagaaaaaccaagaaattactgtaaaattcacaatagtggttactttgggtaggtgggactctcggaatattttagggggcccaattatggaaacttctggggttctggcagtattcttaatctgaatggtggttacgtggatcttcactttatgataaatccttaacctatacgtttttgttttgtacattttctgtttatgtgttacatt

SEQ ID NO: 17973 - DNA, 430 bp, Homo sapiens
gattttcttatcaataccttgcctttctttctccctggagatggataacaaggaataaactcttaggaggattctacctcccactactgccattccaagcatcagtccctttctcctgacccatggatgtactgactcacttcccaaagggtggagccttcccaagtccctgtgcccatgtgccaatcacagggaccccagcagggtttgtgcacagggagagcaaaagagggacagatcacacgtgatgttttgtatggatctttcccttctccttctttctccccacctcacctcccaccagtggcctctcccactgccagccagtgccttgctcagaacctacctcttcctcctacacagaaaggtatgaaacccatcagcgcttgtttttagctgggaacaaactgttcacacatttcattaacta

SEQ ID NO: 17974 - DNA, 261 bp, Homo sapiens
ccttatctgtagattttgtttttgatagggtgggatagtaatagtaactacaaggtttcacaaggttgtgaaattgaatgagaaatacatggcactttaacaagtcactatggattatttaatttcttttcttcttcttctgctgctgcttctccctgcccgcccctacccttttttttagagacagggtcttgctctgttgtccaggctagagagaaatacaatttatttactcccagtaaggaaaatcttagaaatgtt

SEQ ID NO: 17975 - DNA, 334 bp, Homo sapiens
tttgacagacactaagatgtcattaaatttgcattggatgggctttgacatataattagttttgattgctaaaataattttttaagattatgacatttctgatttatttttcagctttattttattttttgcagttaatattttatttttgctgtgggtgggccttgaaaattagtagttagtttaaaaataattttaaaatcagtaatagtaagtaatcattttatgcattaaaaattgctgtagcttcagtagaaagtttgagtgttactttgaaatggacaggagtactttactgaaaacagctgtgtgtcactagtttatctgacatagc

SEQ ID NO: 17976 - DNA, 784 bp, Homo sapiens
aaaatgtgttgaactagaagacgctaagtttgcaccggcccattttttgaaggcagttttaccccccatgtgattcctaactccccttccctgatgggcccgggttcacagcggaatgtgcagagcctggttcttcaaaccgcctctcacctctagattttctgactgcctctctgatcaccactcagatcaccacttggccactttaggccaagaagagctgataacaccacttttaacaaaactgaactatacccattgcatctgcagctgctcatacaagctttgaaaagttaggccagatagaaaagccctccaggaaagaacttatttggaagaaatttcaggctggtgttactttataggaagggaaaaatgtcagaggaggaaacctgtgaacccatttaacacaactggcttcaggtgtaatgtttcaagtgaactgagagcgattgtggcaaggtctttgggtccaacatctaatgttaaaaaagaaaagagaaggaatgaaagtctgtctttcagcatgagcaaggctcttttaaaaataataaaacagtttgaggaggtggctatgacaagactgtgacacataatttagcaggtcttcaaagcaataacagagagggcaagctatggtgattaacagcagaagcagggaaagcaggaatggtgtgaggaggaaggaagcttgacagcacaaagcttaggggaatggggtggtgtaggagtgaaggatgaggttgtgatggataggactctagaatgctgaaagataggatga

SEQ ID NO: 17977 - DNA, 316 bp, Homo sapiens
tgttatagggaagtcccttaagtgcttattgacttttctcatccactgccttggaaggtaagagcaaaaattactaaaggcagagacagagttaacataataaattgtggatgctcccgaagctaaaaacaatgcctttgctggcttctaaagaaaaaaactctagggttgggtaatggctcacacgtctaatcccagcactttaggggactgaggtgggaggatcgcttaagcccaggagtttgagggtgcagtgagctatgatgctgccactgcactctagcctggatgacagagcaagaccctgcctctacaa

SEQ ID NO: 17978 - DNA, 1328 bp, Homo sapiens
aaaccagcatggtttgacaccacatgggaacatgaataaatctgtctcatgatttgaaaagtacaccttgcaaagttttaaaaataaagtttttaggcaaatgcgataagaaaccgtcatttccagtcacagtaggcgatctttcgtaatttcataaaagcagttcgtttgcagtatggcttttgtgtagttaggggttttttaagtgtgaagaaaggtatgtgggctttaaaagtgattctaaatcttgaatagaaaacacatgaattggctttaataaaaatgtcacctttttattattgacattaagtaatggtaccatatattttttaaaatacatattgacttgaattgtgaggcaataagataccttctatatgtaatgatcacagaactaacccttataatatagttttacttattttgtttactctaaaaatctatagcagagtttctctattttatatttcatagatttaaaaaacccaaataaagatggatttaaaattcactgtggaaaagagtattgagttacaaactgagaagaaaaagcaggaagttccctaataatctggaatattctacatggcttgattacatagcaaacaagaccaagatttagggctgtctttaacatcactgccgtcttgaagcagggtacacacgttaggtattgtgaagaacatcaatccgaacttttcttctgttgtttgcactgatgcgattttttgttcttttatgtttatacaacgtatctatgttgtgtaggggaaattttttcattttttaaaaattctactttggttttgttgttgttttgatttgtttttggctaagtagaggacatggactagttgtagcaaacagaacatgctgtttgctcttgccaaaggtcagtgagtgagtgcatttgctgcagtggtggcacgtagagaactagatggtaataaagatttaaaactatgaagaaggttacagtgtaactattttggtactagaaccagttcatgctggccgaaacgacaatggtttatggacttgcatccattttgtatttttgtaatatttgtaaatatgaactttttaaattgctgcaaagatggtttcttttgtaagatgttttcaacgtttacattcaatccaagcctttgtatattttagagctgtgcaacactttaagtcttgtatttatttttagtaaaaatggtgacagtttcattgtgaacccctctcaaaaaaaatgtatcagaaaagtttgattacctagaaagtgtgtatagaaactgcaaataaacgtgactgcaattaaacaaccggtttctctcttc

SEQ ID NO: 17979 - DNA, 394 bp, Homo sapiens
gcggaggttgcagtgagcggagattgcaccattgcactctagcctgggcaaaaaagagcgaaactacatctcaaaaacaaaacaacaacaacaacaacaaaaacaaaaaaaatcctgctataggctggtgagccgtcaaatgctcactgcgctcttatggtggtgataagatgctttttctcctggagtctttgggacttgcccaaatgcactgagtggacattctgggtttggagggcgctgataagcagcaagcatgacagtggtcccgaggagcttgggaaagcagtggggaatgggagtctgcacactgacacaaatggagagatccagcgtttgctccacttagcaggggacaaaaatacctgttctattacttggaaaaaataaaaaa

SEQ ID NO: 17980 - DNA, 306 bp, Homo sapiens
ccccacaaagtattggaaaggcagacatgacttagaatgatgctcttaggactgagaaacaggagaccttggtatgagacttactttggcctccagtgagcaggggaaggtcacttcaccatctttatctaaaaaataaaggctttgggctctgatccacagagatgggtgagtcctaatgctctgtgactctatgcatctggtatccttttcctgtccagggctagaaatatattttgtcttttccagtcataagaaaagtgggaggagcctgggcaacataacaaaaccccatctctacaaaaa

SEQ ID NO: 17981 - DNA, 1675 bp, Homo sapiens
gcccacgcgtccggagaatttctccgacatttaagtaacccttgatccatgcaagtgctatcaaaggatgactgcgtatgtttccaagtagcatctgtaaaggcggctctgggtaccatcattattgaggaaggcactaatacgtccaacaaaaggacttttgtttcatttaaaaccaaggaaaaagaaacaaaaacctcacctaactttaatgatcttgtgtgatttttccgtaagagaagcttcaatgctacttccagtctgagaaggctcagactcgccaggtaacagtttgttgctgctaaatatttctttacccagacttcagacttgatgtcccttgagttgtaaatgatagtctcagtcatcctcagcaagtccagtgttagagaggaaggttttagagcccaggggcacaccctcgagagtgagatgagaacagacagaaaggactaggggaggcgggagaggacatactggggaaggagagaagggcttaggacatcacagtgggggatgaagcatgataaaaactagctcactggtgagtccttcaatattttgggatttgtattgaaagcatgtctatgaacattttaattaaatcaagtaaatctggatgagcagaaacaggattttttctttctcaaaacagggtcttgctctgttgcccaggctggagtgcagtggtgtgatcacagcccactgcagcctcagcctctgggactcgatcaatcctcccacctcagcctcctgagtagctgggaccacaggtgcccaccaccactcccagctaaatttttgtagagatggggtctgcctatgttgccagggctggtctcaaactcctgggctcaagccatcttcccgccttggcctcccaaagtgctgggattacaggcaagagtcaccatgcccagccagaaacaggatttattattattattgttgttggtgttatcaaacacttgtagcccttagtgtgtgccaggctgttccgagcactgggcctgagtgaactcattgagtcttcacctcagctctgtgaggtcagtgctcttttattccctttataaagatggagatactgagtccccagtaggttaaataactagtccaggtctcatagctgctaagcagtttctggccagccagccagctcccaagcccaatgctccaaggaggagcagcagaacccaaggagggtaaaggagcggaggataggcctcaagaactagttactgcatgtagcgtttttaaaaaacttttttcattttcatacatttaaaaattacaataaagtacagggaagtcagcaaacacccagattcctactacttagaattaacggccattaacagttggacacatttgtttctggggttgttttttcttcttttatttgcagctctcgttacagacatggtaaaacccccttgaaccaccagctctggtaatttcccttctcccctccccagaggcagctgccacatttaggctcctttctgtatgcatattactgcatcccaaaagagtgtgtagaattgctctggaggccgggcacaatggcacatgcctgtaatcccagcactttgggatgccgaagtgggtggatcacttgagctcaggagtttgagaccagcctgggtaacatgacgaaagctcatctctaccc

SEQ ID NO: 17982 - DNA, 340 bp, Homo sapiens
ctatgtccttgtctgttggaaggtcttctaagtgtagtttttaatagaaacaatattaggaatggtttggttccatggctgattaaccaaaacttacttgactaggctctgcaatccatattttacaattttacatgctatatatagtattatgaaacctaaccaacctgcagagagtgggggcaggagcctctcaagcagctttgcctactagtgtaggggctgtctacttgtgcctctccaagtctgccagtgaaggcagagttcttacccagctaaaggtcaccaaggtggctcctgtgctgtgtctgagggtgggaatgactccttctgaggtgga

SEQ ID NO: 17983 - DNA, 354 bp, Homo sapiens
ggtaatctagtccctgatatgtgtgtgtgtgtgtgtgtgtgtgtgtgtgtctgtgtgtgtgtgtgtgtgccatttaaaaaaccttcacatttatttatttttaataacaggcaatttttaactaaatgtttacattattgactaaagatagttaaaccaattgttagtactaaaagaatttatgctgaaatgtaggtttggggactcagtgtctacaggatatcatgtttcactcaggtatttacagtagagctattattagattcaaaattgcccgattctaatttatattttaagtgtaacttagagatttttgcattatttacagctttattttcacaattcatttatgct

SEQ ID NO: 17984 - DNA, 224 bp, Homo sapiens
gtagaagagtcccaggcagataacctagaaataagcctgcctggctagtgttacagcacagaggcaaagacttagaggcaaggggaaaaagaaacattcagacaaatgaaagtagctaggaaaggctagagtgtagggttcaaggtgatagataatcagggagttactgttgaaaggttgttgatagtcagttaagggttgtaagatatcatgaaaggtagtct

SEQ ID NO: 17985 - DNA, 334 bp, Homo sapiens
gcctcacagccacttccttttttgaagctctgctgggagcaaatttcacataaagattaaagatacgcatgtcagggtgggttgactcttcgtttatagttttggggggttactatgtcgaatttttactctggacagtttctttttcttttaacaatttcaagtgtacagggaagttttaacagtagaacaaagaattctcgtgtcctccttctagactcctcctatggtaacatctcatatatttattcctgctgtatatatgtaggtacatatatatgtgtgtatatatgtgtatgtgtatgtatgtatatactgatacacatacacacac

SEQ ID NO: 17986 - DNA, 359 bp, Homo sapiens
gatgtgtgtctggtctgaagaggaggtagagacttcctgcgaaggctagcagagtaaaggtttgctttctccctttcctccccgaagaccagcacatcagatgaaaagaaccccccaaatcaagtaaaacttttatctgcagtgaaattaagagataactcatatccccaactatagaaaactgccgaatataatataaatccagaccacatggagggaaagacttcgagagctggtccatacctctcagctctcctgcctgttcgcctcccaaatgcccaacctccaaataccatcacatgtgggttagggttgccaggagtaaatttccttgttaataaaatgaatgagataggaaa

SEQ ID NO: 17987 - DNA, 520 bp, Homo sapiens
gcactccagcctgggtaacaggttgagactctgtctcaaaaaaaaatttttttttatcgagatggagtctcactgtgttccccaggctgatctcaaactcctggcatcaagtgatcctctcacttcggcctcccaaagtgctgggattataggcgtgagccaccatgcccagcctggttaagtaaaattttaacatgaatttataatattgatctaaataatagacttcctttgggtatttgcactagggtattctcctttcttccataactgaagagagtgtagtattgtaaaaaaaattgcatgcacgcacacacctgtatgaactttaaaaaaggaaaaggccaacacatgaggaggatttttatcttttacttcagcattattgttaaaaattagttatgtttattttttagagcagttttaggtttataaaaaaatagggcagaaagtactgagttcccatataccccctcacctccacacctagttttccttgttattatatatgttttaactt

SEQ ID NO: 17988 - DNA, 171 bp, Homo sapiens
catggatgtggtcacctaggaggttaagaaaaattagatccagggatagtattctggaggagaatagcatttttaggatggacagaggaaaaccaggtgttagtagtcaggtagataggaagaaaattggcagatgaatttgttacggaagccagaattgggaagagtttc

SEQ ID NO: 17989 - DNA, 343 bp, Homo sapiens
taagtagcaaataaaaatgcttatctgtgggcatgatggggacaggatacatggtgacaagttggcagtgagactttgttttaatttttgaactatgtaaacatatgacctttttcaaaaaagctattgttaagctagaaacaaaaatgagcatgtagagtattaatctttaagaattagttaggataacacttggtgctgtaccagcagccagccacatgaggccttactcacgttgcataggtgagaactacttacctggctacacctgcctccatgttgagctgggaaatgtagcccccagctaggcagccattcccatgcccaactctacactccgtag

SEQ ID NO: 17990 - DNA, 1241 bp, Homo sapiens
ccagctggaaccaagaaggttgtgtcccccttcctctgggtgtccttgtctcctgctatcaggaactgcttaacgtctacagcaaggcctaataggggacctgagggcacagtcctcaggatgtttcggggagaataggagccagaacctgagcccctaagccattcccctcaccaatgatggggtccccagagcagaaccattacctggcccagctgtttggcctgtacggcgagaatgggacgctgactgcagggggcttggcgcggcttctccacagcctggggctaggccgagttcaggggcttcgcctgggacagcatgggcctctgactggacgggctgcatccccagctgcagacaattccacacacaggccacagaaccctgagctgagtgtggatgtctgggcagggatgcctctgggtccctcagggtggggtgacctggaagagtcaaaggcccctcacctaccccgtgggccagccccctcgggcctggacctccttcacaggcttctgttgctggaccactcattggctgaccacctgaatgaggattgtctgaacggctcccagctgctggtcaattttggcttgagccccgctgctcctctgacccctcgtcagtttgctctgctgtgcccagccctgctttatcagatcgacagccgcgtctgcatcggcgctccggcccctgcacccccaggggatctactatctgccctgcttcagagtgccctggcagtcctgttgctcagcctcccttctcccctatccctgctgctgctgcggctcctgggacctcgtctactacggcccttgctgggcttcctggggggcctggcggtgggcactctttgtggggatgcactgctacatctgctaccgcatgcacaagaagggcggcacgcaggacctggcggactaccagagaaggacctgggcccggggctgtcagtgctcggaggcctcttcctgctctttgtgctggagaacatgctggggcttttgcggcaccgagggctcaggccagtgagtgatacccttttctcctccttctgctgagaccagagtcccagtcaagaactgggccaggccgggcgcggtggctcacgcctgtaatcccagcactttgggagcccaaggcgggcagatcacaaggttaggagttcgagtccagcctgaccaacatggtgaaaccctgtctctactaaaaatacaaaaattagctgggcgtgg

SEQ ID NO: 17991 - DNA, 1293 bp, Homo sapiens
gcctggattcccccttccctgactcaggaactgcttaacgtctacagcaaggcctaataggggacctgagggcacagtcctcaggatgtttcggggagaataggagccagaacctgagcccctaagccattcccctcaccaatgatggggtccccagtgagtcatctgctggccggcttctgtgtgtgggtcgtcttgggctgggtagggggctcagtccccaacctgggccctgctgagcaggagcagaaccattacctggcccagctgtttggcctgtacggcgagaatgggacgctgactgcagggggcttggcgcggcttctccacagcctggggctaggccgagttcaggggcttcgcctgggacagcatgggcctctgactggacgggctgcatccccagctgcagacaattccacacacaggccacagaaccctgagctgagtgtggatgtctgggcagggatgcctctgggtccctcagggtggggtgacctggaagagtcaaaggcccctcacctaccccgtgggccagccccctcgggcctggacctccttcacaggcttctgttgctggaccactcattggctgaccacctgaatgaggattgtctgaacggctcccagctgctggtcaattttggcttgagccccgctgctcctctgacccctcgtcagtttgctctgctgtgcccagccctgctttatcagatcgacagccgcgtctgcatcggcgctccggcccctgcacccccaggggatctactatctgccctgcttcagagtgccctggcagtcctgttgctcagcctcccttctcccctatccctgctgctgctgcggctcctgggacctcgtctactacggcccttgctgggcttcctggggggcctggcggtgggcactctttgtggggatgcactgctacatctgctaccgcatgcacaagaagggcggcacgcaggacctggcggactaccagagaaggacctgggcccggggctgtcagtgctcggaggcctcttcctgctctttgtgctggagaacatgctggggcttttgcggcaccgagggctcaggccagtgagtgatacccttttctcctccttctgctgagaccagagtcccagtcaagaactgggccaggccgggcgcggtggctcacgcctgtaatcccagcactttgggagcccaaggcgggcagatcacaaggttaggagttcgagtccagcctgaccaacatggtgaaaccctgtctctactaaaaatacaaaaattagctgggcgtgg

SEQ ID NO: 17992 - DNA, 1285 bp, Homo sapiens
ccagctggaaccaagaaggttgtgtcccccttcctctgggtgtccttgtctcctgctatcagggcacagtcctcaggatgtttcggggagaataggagccagaacctgagcccctaagccattcccctcaccaatgatggggtccccagtgagtcatctgctggccggcttctgtgtgtgggtcgtcttgggctgggtagggggctcagtccccaacctgggccctgctgagcaggagcagaaccattacctggcccagctgtttggcctgtacggcgagaatgggacgctgactgcagggggcttggcgcggcttctccacagcctggggctaggccgagttcaggggcttcgcctgggacagcatgggcctctgactggacgggctgcatccccagctgcagacaattccacacacaggccacagaaccctgagctgagtgtggatgtctgggcagggatgcctctgggtccctcagggtggggtgacctggaagagtcaaaggcccctcacctaccccgtgggccagccccctcgggcctggacctccttcacaggcttctgttgctggaccactcattggctgaccacctgaatgaggattgtctgaacggctcccagctgctggtcaattttggcttgagccccgctgctcctctgacccctcgtcagtttgctctgctgtgcccagccctgctttatcagatcgacagccgcgtctgcatcggcgctccggcccctgcacccccaggggatctactatctgccctgcttcagagtgccctggcagtcctgttgctcagcctcccttctcccctatccctgctgctgctgcggctcctgggacctcgtctactacggcccttgctgggcttcctggggggcctggcggtgggcactctttgtggggatgcactgctacatctgctaccgcatgcacaagaagggcggcacgcaggacctggcggactaccagagaaggacctgggcccggggctgtcagtgctcggaggcctcttcctgctctttgtgctggagaacatgctggggcttttgcggcaccgagggctcaggccagtgagtgatacccttttctcctccttctgctgagaccagagtcccagtcaagaactgggccaggccgggcgcggtggctcacgcctgtaatcccagcactttgggagcccaaggcgggcagatcacaaggttaggagttcgagtccagcctgaccaacatggtgaaaccctgtctctactaaaaatacaaaaattagctgggcgtgg

SEQ ID NO: 17993 - DNA, 1341 bp, Homo sapiens
ccagctggaaccaagaaggttgtgtcccccttcctctgggtgtccttgtctcctgctatcagggcttcccctttcttggtcatcgatccctagagctctggctctttctcttcttgggggcacagtcctcaggatgtttcggggagaataggagccagaacctgagcccctaagccattcccctcaccaatgatggggtccccagtgagtcatctgctggccggcttctgtgtgtgggtcgtcttgggctgggtagggggctcagtccccaacctgggccctgctgagcaggagcagaaccattacctggcccagctgtttggcctgtacggcgagaatgggacgctgactgcagggggcttggcgcggcttctccacagcctggggctaggccgagttcaggggcttcgcctgggacagcatgggcctctgactggacgggctgcatccccagctgcagacaattccacacacaggccacagaaccctgagctgagtgtggatgtctgggcagggatgcctctgggtccctcagggtggggtgacctggaagagtcaaaggcccctcacctaccccgtgggccagccccctcgggcctggacctccttcacaggcttctgttgctggaccactcattggctgaccacctgaatgaggattgtctgaacggctcccagctgctggtcaattttggcttgagccccgctgctcctctgacccctcgtcagtttgctctgctgtgcccagccctgctttatcagatcgacagccgcgtctgcatcggcgctccggcccctgcacccccaggggatctactatctgccctgcttcagagtgccctggcagtcctgttgctcagcctcccttctcccctatccctgctgctgctgcggctcctgggacctcgtctactacggcccttgctgggcttcctggggggcctggcggtgggcactctttgtggggatgcactgctacatctgctaccgcatgcacaagaagggcggcacgcaggacctggcggactaccagagaaggacctgggcccggggctgtcagtgctcggaggcctcttcctgctctttgtgctggagaacatgctggggcttttgcggcaccgagggctcaggccagtgagtgatacccttttctcctccttctgctgagaccagagtcccagtcaagaactgggccaggccgggcgcggtggctcacgcctgtaatcccagcactttgggagcccaaggcgggcagatcacaaggttaggagttcgagtccagcctgaccaacatggtgaaaccctgtctctactaaaaatacaaaaattagctgggcgtgg

SEQ ID NO: 17994 - DNA, 1261 bp, Homo sapiens
atctcgcttctcttgctggcctgcatctgctatggtgatcagtgctctagatgggaggagcgacaatatcatccgaacatgatcgcgaaaccaccaccacccctcaccaatgatggggtccccagtgagtcatctgctggccggcttctgtgtgtgggtcgtcttgggctgggtagggggctcagtccccaacctgggccctgctgagcaggagcagaaccattacctggcccagctgtttggcctgtacggcgagaatgggacgctgactgcagggggcttggcgcggcttctccacagcctggggctaggccgagttcaggggcttcgcctgggacagcatgggcctctgactggacgggctgcatccccagctgcagacaattccacacacaggccacagaaccctgagctgagtgtggatgtctgggcagggatgcctctgggtccctcagggtggggtgacctggaagagtcaaaggcccctcacctaccccgtgggccagccccctcgggcctggacctccttcacaggcttctgttgctggaccactcattggctgaccacctgaatgaggattgtctgaacggctcccagctgctggtcaattttggcttgagccccgctgctcctctgacccctcgtcagtttgctctgctgtgcccagccctgctttatcagatcgacagccgcgtctgcatcggcgctccggcccctgcacccccaggggatctactatctgccctgcttcagagtgccctggcagtcctgttgctcagcctcccttctcccctatccctgctgctgctgcggctcctgggacctcgtctactacggcccttgctgggcttcctggggggcctggcggtgggcactctttgtggggatgcactgctacatctgctaccgcatgcacaagaagggcggcacgcaggacctggcggactaccagagaaggacctgggcccggggctgtcagtgctcggaggcctcttcctgctctttgtgctggagaacatgctggggcttttgcggcaccgagggctcaggccagtgagtgatacccttttctcctccttctgctgagaccagagtcccagtcaagaactgggccaggccgggcgcggtggctcacgcctgtaatcccagcactttgggagcccaaggcgggcagatcacaaggttaggagttcgagtccagcctgaccaacatggtgaaaccctgtctctactaaaaatacaaaaattagctgggcgtgg

SEQ ID NO: 17995 - DNA, 447 bp, Homo sapiens
aaatcatgattgagatgacatggcatgttttccacatttcaattttcaatactttgtatctatcccagagaattctttccacagcacacttttcttatttttgttattcatccagacctgaattttttaatacattcagcaatttttatcaaacatgagtgattggagtttttccagacaagtaatgtttttttttcaagtgtgagattttgtgtgcgtgcatgtgtgtgtgcgtgtgcatatcttctgtagagttatagaaagctcagttttaaaaggtggccaaaaaaatgaatcaatgaataaagtggaattaagagtcacccgtaaccttgatgctagtggtggtacagatgtgtacatttgtaaaacctcatggaactgaacagttaaaattgatacatttattgtatatacattatacttcaataaaatttttaattaaag

SEQ ID NO: 17996 - DNA, 889 bp, Homo sapiens
cttttgttccttccactctaatcacttgacctcctgacctcagtcatgctaataaactcatgcctcatttagatttattttcctagtggaagaaaatgcattgatctgtgaacacaaatacatggtttatctgttacagttctcattgcatgtcaacaaactgacattctgatgtgtacatccatctcttatgagtctgcttagtgtgaatctgccccctctggtagtactgacaagattgtgtttctcagcccacagagctaagacacagactcatgagacccagtctctgtctataccactagagttctactgcccctgaatggcattgcctgcacagacagctggccttcctcagcagacacacagcctttgtaccatataactcttcagacttgctatgatgtaccaatgtctttccttgaaatgctcttctgaaaatgataaatgctaaaactgattacaatgctattgaaagtggatgagcaagttgatctgctgagatgtgaaaacaaattctattttaatttttaatctaaaatattagaaagaattttgtttcctatactttgctatatttagtaaatatacactaatataagaattttgctttactaaaacagtagaaccctcagttagccaggcagtcatcatctgtcacataaaaggtgtcctgaggaggaatgggagtgcctcccctggggaagaggctgatggtggctctggctctcagtcagtcgctttccttatcttggtatttactgtcatttatctgggcttagctaaacagatttatagagaattaactctcacaaaatgggaacataatttaaaagatttctgcaaagaattggacaggaactcttgtcaaaattgtaagcagaagaaa

SEQ ID NO: 17997 - DNA, 2224 bp, Homo sapiens
  misc_feature (18)..(18): n is a, c, g, or t
  misc_feature (786)..(786): n is a, c, g, or t
aaagtacttacagccaanagagcttcctctggggcttgcatattcagtttcctttgtcatgtaatcatttaagactgaactctgcttattgatatgtagtattctattctaggttgagctcaaactggtagctgaaatttaggagacatttttaattcatttagtattaggcatcttttgaccttactaaagtaccagtagtagaaaaatatttttgtgtgatgaaactgaaaacatcagtggtcgtatttaataaaaggtgactagtactgcccatttaaagtaggtgtctaactttgaataaatgtggatagcaatgaataagaaatgaccatgcatggtgttagcagaaaattttaacatgtgttttacctttagaatactaactgggttcagcgtagtatgtaattttccttccttatatccatgaaaaaaaatgtacgagtgctccctttcatttcaaaccttcagtagaggaaggaggaagagtagcatttaaaatgtacattaggactggttaggttgcttttcctagttagcactgatcttagaaagaaggttggtaggcatattccaactgccacagcacccttcctgtttcaaatgtggcaggttattcattttgggtgcagtttgtctcctccaatgattagacgaaagagttttctgaccatcattcaaaaggaatgtgagaagttaatgaatcctagaggaaagcggctgagaaaaggcatctggcatttggttgagagcctcctatgtggtgctagtcaaactacttttacntggaccctgaattcaggacagaaaacactgctccttctcctcgctctcagttgttgggaaagcatggttacattgaatggtcagcgttaagtgagctttgcaatagttgctgtgcttataaagcaactgacaactggcccttgtcctttcctaggtattgttgcagcatctggcagtgagactgaggatgaggacagcatggacattcccttggacctttcttcatccgctggctcaggcaagagaaggagaaggggcaacctacccaaggagtctgtgcagattcttcgggattggctgtatgagcaccgttacaatgcctatccttcagagcaagaaaaagcgttgctgtcccagcaaacacacctgtctacgctacaggtctgtaactggttcatcaacgcccgccgcaggctcctccctgacatgctgagaaaggatggcaaagatccaaatcagttcacaatttcccgccgtggggccaagatttctgaaacgagctctgtggagtccgtgatgggcatcaaaaacttcatgccagctctagaggagaccccatttcattcctgtacagctgggccaaacccaaccctagggaggccactgtctcctaagccgtcatccccgggatcagttttggctcgtccatcagtgatctgccataccactgtgactgcattgaaagatgtccctttctctctctgccagtcggtcggtgtgggacaaaacacagatatacagcagatagcggccaaaaacttcacagacacctctctcatgtacccagaggacacttgtaaatctggaccaagtacgaatacacagagtggtcttttcaacactcctccccctactccaccggacctcaaccaggacttcagtggatttcagcttctagtggatgttgcactcaaacgggctgcagagatggagcttcaggcaaaacttacagcttaacccattttcaagcaaaacagttctcagaaatgtcatgattgccggggtgaaggcaagagatgaattgcattattttatatattttttattaatatttgcacatgggattgctaaaacagcttcctgttactgagatgtcttcaatggaatacagtcattccaagaactataaacttaaagctactgtagaaacaaagggttttcttttttaaatgtttcttggtagattattcataatgtgagatggttcccaatatcatgtgattttttttttcctccccttccctttttttgttattttttcagactgtgcaatacttagagaacctatagcatcttctcattcccatgtggaacaggatgcccacatactgtctaattaataaattttccattttttttcaaacaagtatgaatctagttggttgatgccttttttttcatgacataataaagtattttctttaaaaaaaaattgtaa

SEQ ID NO: 17998 - DNA, 2151 bp, Homo sapiens
  misc_feature (18)..(18): n is a, c, g, or t
  misc_feature (786)..(786): n is a, c, g, or t
aaagtacttacagccaanagagcttcctctggggcttgcatattcagtttcctttgtcatgtaatcatttaagactgaactctgcttattgatatgtagtattctattctaggttgagctcaaactggtagctgaaatttaggagacatttttaattcatttagtattaggcatcttttgaccttactaaagtaccagtagtagaaaaatatttttgtgtgatgaaactgaaaacatcagtggtcgtatttaataaaaggtgactagtactgcccatttaaagtaggtgtctaactttgaataaatgtggatagcaatgaataagaaatgaccatgcatggtgttagcagaaaattttaacatgtgttttacctttagaatactaactgggttcagcgtagtatgtaattttccttccttatatccatgaaaaaaaatgtacgagtgctccctttcatttcaaaccttcagtagaggaaggaggaagagtagcatttaaaatgtacattaggactggttaggttgcttttcctagttagcactgatcttagaaagaaggttggtaggcatattccaactgccacagcacccttcctgtttcaaatgtggcaggttattcattttgggtgcagtttgtctcctccaatgattagacgaaagagttttctgaccatcattcaaaaggaatgtgagaagttaatgaatcctagaggaaagcggctgagaaaaggcatctggcatttggttgagagcctcctatgtggtgctagtcaaactacttttacntggaccctgaattcaggacagaaaacactgctccttctcctcgctctcagttgttgggaaagcatggttacattgaatggtcagcgttaagtgagctttgcaatagttgctgtgcttataaagcaactgacaactggcccttgtcctttcctaggtattgttgcagcatctggcagtgagactgaggatgaggacagcatggacattcccttggacctttcttcatccgctggctcaggcaagagaaggagaaggggcaacctacccaaggagtctgtgcagattcttcgggattggctgtatgagcaccgttacaatgcctatccttcagagcaagaaaaagcgttgctgtcccagcaaacacacctgtctacgctacaggtctgtaactggttcatcaacgcccgccgcaggctcctccctgacatgctgagaaaggatggcaaagatccaaatcagttcacaatttcccgccgtggggccaagatttctgaaacgagctctgtggagtccgtgatgggcatcaaaaacttcatgccagctctagaggagaccccatttcattcctgtacagctgggccaaacccaaccctagggaggccactgtctcctaagccgtcatccccgggatcagttttggctcgtccatcagtgatctgccataccactgtgactgcattgaaagatgtccctttctctctctgccagtcggtcggtgtgggacaaaacacagatatacagcagatagcggccaaaaacttcacagacacctctctcatgtacccagaggacacttgtaaatctggaccaagtacgaatacacagagtggtcttttcaacactcctccccctactccaccggacctcaaccaggacttcagtggatttcagcttctagtggatgttgcactcaaacgggctgcagagatggagcttcaggcaaaacttacagcttaacccattttcaagcaaaacagttctcagaaatgtcatgattgccggggtgaaggcaagagatgaattgcattattttatatattttttattaatatttgcacatgggattgctaaaacagcttcctgttactgagatgtcttcaatggaatacagtcattccaagaactataaacttaaagctactgtagaaacaaagggttttcttttttaaatgtttcttggtagattattcataatgtgagatggttcccaatatcatgtgattttttttttcctccccttccctttttttgttattttttcagactgtgcaatacttagagaacctatagcatcttctcattcccatgtggaacaggatgcccacatactgtctaattaataaattttccattttttttcaaaca

SEQ ID NO: 17999 - DNA, 2169 bp, Homo sapiens
  misc_feature (18)..(18): n is a, c, g, or t
  misc_feature (786)..(786): n is a, c, g, or t
aaagtacttacagccaanagagcttcctctggggcttgcatattcagtttcctttgtcatgtaatcatttaagactgaactctgcttattgatatgtagtattctattctaggttgagctcaaactggtagctgaaatttaggagacatttttaattcatttagtattaggcatcttttgaccttactaaagtaccagtagtagaaaaatatttttgtgtgatgaaactgaaaacatcagtggtcgtatttaataaaaggtgactagtactgcccatttaaagtaggtgtctaactttgaataaatgtggatagcaatgaataagaaatgaccatgcatggtgttagcagaaaattttaacatgtgttttacctttagaatactaactgggttcagcgtagtatgtaattttccttccttatatccatgaaaaaaaatgtacgagtgctccctttcatttcaaaccttcagtagaggaaggaggaagagtagcatttaaaatgtacattaggactggttaggttgcttttcctagttagcactgatcttagaaagaaggttggtaggcatattccaactgccacagcacccttcctgtttcaaatgtggcaggttattcattttgggtgcagtttgtctcctccaatgattagacgaaagagttttctgaccatcattcaaaaggaatgtgagaagttaatgaatcctagaggaaagcggctgagaaaaggcatctggcatttggttgagagcctcctatgtggtgctagtcaaactacttttacntggaccctgaattcaggacagaaaacactgctccttctcctcgctctcagttgttgggaaagcatggttacattgaatggtcagcgttaagtgagctttgcaatagttgctgtgcttataaagcaactgacaactggcccttgtcctttcctaggtattgttgcagcatctggcagtgagactgaggatgaggacagcatggacattcccttggacctttcttcatccgctggctcaggcaagagaaggagaaggggcaacctacccaaggagtctgtgcagattcttcgggattggctgtatgagcaccgttacaatgcctatccttcagagcaagaaaaagcgttgctgtcccagcaaacacacctgtctacgctacaggtctgtaactggttcatcaacgcccgccgcaggctcctccctgacatgctgagaaaggatggcaaagatccaaatcagttcacaatttcccgccgtggggccaagatttctgaaacgagctctgtggagtccgtgatgggcatcaaaaacttcatgccagctctagaggagaccccatttcattcctgtacagctgggccaaacccaaccctagggaggccactgtctcctaagccgtcatccccgggatcagttttggctcgtccatcagtgatctgccataccactgtgactgcattgaaagatgtccctttctctctctgccagtcggtcggtgtgggacaaaacacagatatacagcagatagcggccaaaaacttcacagacacctctctcatgtacccagaggacacttgtaaatctggaccaagtacgaatacacagagtggtcttttcaacactcctccccctactccaccggacctcaaccaggacttcagtggatttcagcttctagtggatgttgcactcaaacgggctgcagagatggagcttcaggcaaaacttacagcttaacccattttcaagcaaaacagttctcagaaatgtcatgattgccggggtgaaggcaagagatgaattgcattattttatatattttttattaatatttgcacatgggattaactataaacttaaagctactgtagaaacaaagggttttcttttttaaatgtttcttggtagattattcataatgtgagatggttcccaatatcatgtgattttttttttcctccccttccctttttttgttattttttcagactgtgcaatacttagagaacctatagcatcttctcattcccatgtggaacaggatgcccacatactgtctaattaataaattttccattttttttcaaacaagtatgaatctagttggttgatgccttttttttcatgacataataaagtattttctttaaaaaaaaattgtaa

SEQ ID NO: 18000 - DNA, 2201 bp, Homo sapiens
  misc_feature (18)..(18): n is a, c, g, or t
  misc_feature (786)..(786): n is a, c, g, or t
aaagtacttacagccaanagagcttcctctggggcttgcatattcagtttcctttgtcatgtaatcatttaagactgaactctgcttattgatatgtagtattctattctaggttgagctcaaactggtagctgaaatttaggagacatttttaattcatttagtattaggcatcttttgaccttactaaagtaccagtagtagaaaaatatttttgtgtgatgaaactgaaaacatcagtggtcgtatttaataaaaggtgactagtactgcccatttaaagtaggtgtctaactttgaataaatgtggatagcaatgaataagaaatgaccatgcatggtgttagcagaaaattttaacatgtgttttacctttagaatactaactgggttcagcgtagtatgtaattttccttccttatatccatgaaaaaaaatgtacgagtgctccctttcatttcaaaccttcagtagaggaaggaggaagagtagcatttaaaatgtacattaggactggttaggttgcttttcctagttagcactgatcttagaaagaaggttggtaggcatattccaactgccacagcacccttcctgtttcaaatgtggcaggttattcattttgggtgcagtttgtctcctccaatgattagacgaaagagttttctgaccatcattcaaaaggaatgtgagaagttaatgaatcctagaggaaagcggctgagaaaaggcatctggcatttggttgagagcctcctatgtggtgctagtcaaactacttttacntggaccctgaattcaggacagaaaacactgctccttctcctcgctctcagttgttgggaaagcatggttacattgaatggtcagcgttaagtgagctttgcaatagttgctgtgcttataaagcaactgacaactggcccttgtcctttcctaggtattgttgcagcatctggcagtgagactgaggatgaggacagcatggacattcccttggacctttcttcatccgctggctcaggcaagagaaggagaaggggcaacctacccaaggagtctgtgcagattcttcgggattggctgtatgagcaccgttacaatgcctatccttcagagcaagaaaaagcgttgctgtcccagcaaacacacctgtctacgctacaggtctgtaactggttcatcaacgcccgccgcaggctcctccctgacatgctgagaaaggatggcaaagatccaaatcagttcacaatttcccgccgtggggccaagatttctgaaacgagctctgtggagtccgtgatgggcatcaaaaacttcatgccagctctagaggagaccccatttcattcctgtacagctgggccaaacccaaccctagggaggccactgtctcctaagccgtcatccccgggatcagttttggctcgtccatcagtgatctgccataccactgtgactgcattgaaagatgtccctttctctctctgccagtcggtcggtgtgggacaaaacacagatatacagcagatagcggccaaaaacttcacagacacctctctcatgtacccagaggacacttgtaaatctggaccaagtacgaatacacagagtggtcttttcaacactcctccccctactccaccggacctcaaccaggacttcagtggatttcagcttctagtggatgttgcactcaaacgggctgcagagatggagcttcaggcaaaacttacagcttaacccattttcaagcaaaacagttctcagaaatgtcatgattgccggggtgaaggcaagagatgaattgcattattttatatattttttattaatatttgcacatgggattgctaaaacagcttcctgttactgagatgtcttcaatggaatacagtcattccaagaactataaacttaaagctactgtagaaacaaagggttttcttttttaaatgtttcttggtagcccaatatcatgtgattttttttttcctccccttccctttttttgttattttttcagactgtgcaatacttagagaacctatagcatcttctcattcccatgtggaacaggatgcccacatactgtctaattaataaattttccattttttttcaaacaagtatgaatctagttggttgatgccttttttttcatgacataataaagtattttctttaaaaaaaaattgtaa

SEQ ID NO: 18001 - DNA, 131 bp, Homo sapiens
tgcagagctagcttggcactttgcaccaagaatctcaagtgctctttctgaccttacccccattttttcctctgccaaggtagcatctctaccccaaaactgttttgaggatccagaattcttttcttttt

SEQ ID NO: 18002 - DNA, 453 bp, Homo sapiens
ttgaatctttttctttcttcttgctacagttgtctcaggctttgaaccattgctgagggagatttccttttaagtttgaagagcttgtaagcatccgaggagacaacttctgggtcacttagtggctgagcaaggcctattcctagactctgattgttgacttggggcttctaaccttgtgttggggccggttttgggagcacagaggtggggttagataggctgcaggagccaccagcctgcctgcgctcgctctggcaggatgactgatgccaggaggatgggaatgaggactagtgaccttcctctctctgttccctttttctcccttgggggaaaaactagtatagtaaaagctcagcactcgttttgaatataggtgtaatttgctgcgttaacagtttcagtttattgtgtgttttggtggcgttattcctgaaagcttcttaaaat

SEQ ID NO: 18003 - DNA, 859 bp, Homo sapiens
gcggcacgagcggcacgagcggcacgagggagtctgagtagggcggccccggtgactgagatggcatcatctctaaagatctggggcacactcttggccctactttgcatcctatgcacactgcttgtacagagcaaagaagtttcttggagagaattcatgaaacagcactacttaagtccaagtcgagaattcagagagtacaaatgtgatgtcctcatgagagaaaatgaagctctgaaagacaagagctctcacatgtttatctatatctcatggtacaaaatcgagcatatatgcactagtgacaactggatggatcgcttccgaaatgcatatgtatgggtccagaatcctctcaaagtactcaagtgtcaccaggagaattccaaaaatagctacacagagagcaggagcttcaactacattgaattccattgtagcatggacgggtatgttgatagcatagaagacctaaagatggtagaacctatcggcaactagaaagtctatgcacatcctcaggtattggtagagtattcagtgctctctaagtagcagcccctgcctccatcaatagtcctaccactcccctcttgcatttatttgtcaatgttttccaaatacttagagttatgaatagcataatttcttgataccataactttgcctgtgttgtttctctgcctggaatacacttttgtcttcatttacctaatttactcttatacttttgtcgacattcagctcatatggcatctgttcttgattaacccaagactttcctgatattgactctcttgatacatacccaagctgaacaatcttcccttccctaaataaattatatgactgcaaa

SEQ ID NO: 18004 - DNA, 348 bp, Homo sapiens
atactgtgagtaatatatttgtgtgcaaggagtcattgccaaactcaagatcatctagattttatcctatgttatctagtaggagttttatagctttgcattttatgtttatgtctgtgatccattctgagttcatttttgtgaagggtgtcaggtctgtgtctagcttcgttttctgatgtgatgtccagttgtcccagcaccatttgttgaaaagacttatctttgcataattgttttgccctttctcctttgtcaaaggtcagttgactgtatttatgtgggtctatttctgggttgtctattctgttccctggatctatttgtctgttcttttgatagtactac

SEQ ID NO: 18005 - DNA, 1195 bp, Homo sapiens
aggattagagtgattgttctgagtatatcatttcttagtatttcatgaaagccatgtacagtacagcttttattcatacagagataaaatgaatgaaataaactttgggtttttttttgttttatttgaatattagtcttgtatacactttatattaaagtgcatttgtagggaataattcacttatttaatattttatgagcatctacaatatgcatagtccctgctttcagggagtttacacttctggggcatgagggtggagacagatgagtctacaaataactatgccattataattaagttttaatgaaatactaaaatgggaaattggaggattttgactatggagtttgaggtagacttcgtgttctttcattctgaaaatcaagggaaggtcattttagacaaaggaaaagtattgagccaagacaaatatctggattgcatgatataatagagactgggttggctctgaagtcagactacctaagctgaatctggctcctcctattacctgccatgtgaccttgggcaaacagtctgttgttagtttttttatctataaattgaagataatattttctttgcctcataggaaaactgcacatgtaagagaaaatgaaatgtcataaaccgagtgtacctgtgtaacttgcacttaaattaaaaacaaaaacagaacattatcagtatcccaggaggtttttacattctccattgtgttgtttcgaggattcactattatttgtaaggtggacctggcagtgactcacacctgtaaccctagcactttggtaggcctaggctggaggattttaatcccaggattttgagactagcgtgaacagcaaagtgagactctgtattattaataaaatgaagaaaagaaaacattatttgtgaagtgttcagaacagtatctggcatatattatatctctatcaatgttagccattattcagtaggtggctggtgaatatggatgaaactagagaaagtacagtgcctggcatatatcaagcattcagtagacatgttttaaattatttatagaaaaataaagaatacaactatggggccaggcacggtggtcacgcctgtgttaccagcactttgggaggctgaggcgggcagatcacaaggtcaggagatcgagaccatcctggctaacacggtgaaaccacgtgtctac

SEQ ID NO: 18006 - DNA, 381 bp, Homo sapiens
agagcagcctgagctgagtccttatttcttcacttttgtaaaacaatgataagtgttcatgagacaattggcatccctgacccctccccttgtgtgtggaacgcaggtcctctcccagcctgacttactgggttacgtttgctctctgggctgggttgtgttcacctcagaggtcttggtgaaaatgacctctttggtctcctgaagcctcatttcgttattttggctctgtgggtggtatctttcatgcgtcagtcgagcatgctgtttaaatcaagagttgtcactgattctcccattccctcatcccaaattcctggtgacctgtggctgaagcactagccaggattttagaatgaataaacctctttatatttgcaa

SEQ ID NO: 18007 - DNA, 254 bp, Homo sapiens
gattgcctggtcaatgagcccgccgtgtttattgagcatctactatgtgctgagtgctggggtccatgggaagctgagtgctggcggaatgggaaggcaactacaaatgataaacagcagcagacgttgcaggctgggtgggccagccccgtgtggggcctgatgaacaggtttttttccctgacgatcggctttgcaggctttgtgggctttgtggggaaggagccctttgtgcagaactggtagccatgagg

SEQ ID NO: 18008 - DNA, 437 bp, Homo sapiens
aaaccattttaactgatgtggtttaataattgctctaccatatatatttgtaagcagcattctctgctttgcccttaatctttgaggtcagcattgcctcctggatcagagcggttccttgtgacttgcctggggtcacctggctggtgaaggaagcccccctttctgtttaccaccatctctagtgcccccctcacacagcagcctccagagtttgcaccctgacttggagtcgctgctggtgccctgattgagttgagctgtgtcctttaacaatggggtcacttcaggtgagcatagaagtgatgtgtcccttatctccaaggcttccgtggagtgccctggggggtgtgggtcatgtttacagagcgtggaggccacggccaggcagcatctttagctggacaggaaaatgagaagtgacagcatttagaggg

SEQ ID NO: 18009 - DNA, 324 bp, Homo sapiens
tgcccggctaatttttgtatttttagtagagatggggtttcaccttattggccaggctggtcttgaacttctgaccttgtgatctgcccacctcggcctcccaaagtgctgggattataggcgtgagcgaccgtgcccagcctagactgtgttattttgttcacccatgtatacctttattcactccctcctgccccaaatgttattgaacatcgactaagccaggcactctgcaaactgtatcaatctaactgaggctccatccccaacctggagagcttgtaagctaagcactattaaaggagttcctgtatgaaccaaatc

SEQ ID NO: 18010 - DNA, 301 bp, Homo sapiens
aagagatctgattaatactctatattgccattcccttccccttttttttgagttctggagtcagtgtgtggtaatgttcaaccacccatcttaaaccatgaagtaaattggaaggtggagaccacatactgatggcactacagcagtatcatactagcctgatactgcccatttatggagataacactacttgggaggctgaggcatgagaatcgcttgaacctgggaggtagaagttgcagtgagcctagatcatgtcactgcactccagcctggatgggtgacagcgagactccatctc

SEQ ID NO: 18011 - DNA, 214 bp, Homo sapiens
atgtattttgactggggaaaattttcccttttattctggggagctgttactcagcataagagaatgtagaggagaatcacccctttcacatatctaatagctttaccacattactacagtagtatcttatgttgtatgcattgattgtcaatctcttctcctcatctccaccattttgatagcttaaggcttatcattcattctctgtgcatag

SEQ ID NO: 18012 - DNA, 1042 bp, Homo sapiens
agtaaaatcctacccctctctgttgtctccatgatacttggtgatctctggataatgtctgtgtgtttctgcaggcaaaaacaacaacaacaaataagccacattgcagaatagagaatagatcctgtttctgttatggattgagaagggtattttatatcatcctgttaatgatacttaaccaaatgcttttaacatttctagttgattgtagatattcaacaaacattgcagtgttggggaatgaccaacttccctggttgaaacccagtaatagccgttgccagagcattaaattaaaaatattaatttaccccaatctagaaatagttttatgctttttttaaataatagtccccgcacaaacaaacatacagacagcactggagagggccttataaaatgagcttctagccaggcacagtggcccacacctgtgatcccagcactttgggaggacgaggtgggcggatcacttgagctcaggagtttgagaccggcctgggcaacatggcaaaaccccatctctacaaaaaaatagccgggcgtcatggctcttgcctgtactcccagctactggggaggcattgaagcgggagaatcacttgagtgcagggggttgaggctgcagtgagccgtgatcacaccactgcacttcagcctgggcaacagagtgagtccctgtctcaaaaaataaaatgagctccttaccaactatataaatatacaggtcacctttgtatgccttttaaaatatcaccttcctcagaaatcaattgtaaaatgaggtcatttggtggtgtggatagggcagtgacttcctgctttatttacaatcaacaggagggacagctaggctaattcaaattccattaacaatccatcttccccttggtgatatttccctagctgggttcctcagcatgttatttaacatgatgaagttccatacagtcatgtttatttgcttcagggaagaatgatggtcaccattagtaaccccatctaaaaaccgaactaagagtcccagttttttacctta

SEQ ID NO: 18013 - DNA, 469 bp, Homo sapiens
gccacctccctgtatggtttccgcagcccactgcattacccctgactgttggacagtccttccttgtattgagctgaaatccaattccagttccaatcacactgtttctccagggtgcacataaatatatggtgaaatgtattatttagtttcaattctaaatatcctttatttgtcattgtttctcgaattgtatttattctgttcccttttctcttgacttgctcaagtacttcagcatttcatttggactaaaaaactcaacacaattctgtctgctttcttatagtatgatattttcatttttaggaagtgacacattatcaaaacccataagaactaaatttttttaagagggggaaaaagacaaggtcaggaggctgaggtgggaggatcgcttgagcccaggagttcgagaccagcctgggcaacagagtgagaccctgtctctacaaacaccaccaccacc

SEQ ID NO: 18014 - DNA, 798 bp, Homo sapiens
caccattcactcttcagcctactacagtctgtctttggtaccaaaactgttcttgtaaacaccttgtttatcaaacacctccatttgcaacatccagtggctagttctgtcttacttatcagctgcattagatatagctgaccatccctattttaaaacacttcttagcttcagtgataactaaactctatttcccttctcttcactggcagccctgtctcagatttccttactggcgtttcctactctgtctgtccatagaatatttgtgcactcctggattcagtccttagtcctgttctctcttctgctgtgtctcctcctcccccccattttatctcctctagtcctgttaccctaaatgtcatatcatatccagtgactctgaaatccttatctcgaccttttccttgagttctagaattacatagccacctgcccactcagtagccccccaagatatctaatagacactcccaagctcgggctgcgcagcatctgctgctttctctgcccaaaatgttatttccccagttcatcaagtcacgggcaccgcatcatccttaagatcttcgctcaagtatcactttctctgagggctctcctgatgtcccccgctgcccccagagtaggttcgtgccccatgtcactttatttccttcccagaacttgccagaaatagttttatgtgttgacttgattactgcctgttctccacattgactgctataagccctgtgagagtggggccttgcttatcttgttctttgctgtattctaagttcccagaacagtgcc

SEQ ID NO: 18015 - DNA, 355 bp, Homo sapiens
tttctgagtcccgtgatgattaatatttgatgaattatattttgaatagcctccacatgcatttttctcttttgttcacttcctcaccattttgcttcactttttttttaactgcttcctttgtgtctttcccattcctttacctttgttttctccttgacttcctattgttggccattgtgggcattgtttagcattttcagtggaaagaatcaggggaaagaaaatactaaatcttagtatagttaatatttgatattatcaacgagaagtaagaaatgttttgaaaaacacaaatcagtagttttatataacttaataaattgaacagatgatcattttttgtaaaaaaaaa

SEQ ID NO: 18016 - DNA, 375 bp, Homo sapiens
cgagctcggtacccaatcagtttacacaaataaagaatgattccagcttcctcagtacacttcatgaagtctacttgcaggttctgaccaagaacaaagacaaccacaacctatgactggagcagaataagtctaaaggcagagccccagcctcagagacaaataggcttcatcatggaaacttctgagcagaacattgagtttgagaatcctgaaattgagcctatgagaaagagactcatttcttaagaatgttttccaagtgacattctcagtgataatggaggtttcactgtgaagcatcaccagcagatccttgttttgacagatgatagaagaaagaaaatcccgggtgtcttttattgcttcatcggg

SEQ ID NO: 18017 - DNA, 720 bp, Homo sapiens
  misc_feature (676)..(677): n is a, c, g, or t
taacgtaaggacaagatgagttgtagatcaggacgagggatggaggcgctgagtcgagctgggcaggagatgagcctagcggccctgaagcaacacgacccctatatcaccagcatcgcagacctcacgggccaggtcgctctgtacaccttctgccccaaggccaaccagtgggagaagactgatatagaagggaccttattcgtatatcgaaggtcagcttccccttaccatggttttaccattgtgaatcgactaaatatgcacaatctagttgaaccagtgaataaagatttggaatttcagctccatgaaccatttcttctgtatagaaatgcaagcttgtcgatatatagtatctggttttatgacaagaatgactgtcaccgcatagcaaaactcatggctgatgtggtagaagaggagacacggcgatcccagcaagctgctcgggacaaacagagtcccagccaggccaatggctgcagcgaccacaggcccatcgacatcctggagatgctgagcagagccaaggatgagtatgagaggaatcagatgggtgactcaaatatctccagccctgggttacagccaagcactcagctctccaatctgggaagcaccgagactctagaagaaatgccctccgggtcacaggataagtctgctcatctgnncacaagcatctggcggtaaagcttgggatcctctggaatcagc

SEQ ID NO: 18018 - DNA, 828 bp, Homo sapiens
ggggactgacgcagatgggggaattttgcctcgatggcactttcctgtccgcgactccgcccccaccagaggggctaggctctgggattcaagatggaggcgctgagtcgagctgggcaggagatgagcctagcggccctgaagcaacacgacccctatatcaccagcatcgcagacctcacgggccaggtcgctctgtacaccttctgccccaaggccaaccagtgggagaagactgatatagaagggaccttattcgtatatcgaaggtcagcttccccttaccatggttttaccattgtgaatcgactaaatatgcacaatctagttgaaccagtgaataaagatttggaatttcagctccatgaaccatttcttctgtatagaaatgcaagctgttgagaaaacaagaggctcagagctgtttaggaatctgctcgagattcgcaaagtgtcgatatatagtatctggttttatgacaagaatgactgtcaccgcatagcaaaactcatggctgatgtggtagaagaggagacacggcgatcccagcaagctgctcgggacaaacagagtcccagccaggccaatggctgcagcgaccacaggcccatcgacatcctggagatgctgagcagagccaaggatgagtatgagaggaatcagatgggtgactcaaatatctccagccctgggttacagccaagcactcagctctccaatctgggaagcaccgagactctagaagaaatgccctccgggtcacaggataagtctgctccatctgaaccagcttgcggagaaaggattgggaccttggcagggaccgc

SEQ ID NO: 18019 - DNA, 2180 bp, Homo sapiens
ggggactgacgcagatgggggaattttgcctcgatggcactttcctgtccgcgactccgcccccaccagaggggctaggctctgggattcaagatggaggcgctgagtcgagctgggcaggagatgagcctagcggccctgaagcaacacgacccctatatcaccagcatcgcagacctcacgggccaggtcgctctgtacaccttctgccccaaggccaaccagtgggagaagactgatatagaagggaccttattcgtatatcgaaggtcagcttccccttaccatggttttaccattgtgaatcgactaaatatgcacaatctagttgaaccagtgaataaagatttggaatttcagctccatgaaccatttcttctgtatagaaatgcaagcttgtcgatatatagtatctggttttatgacaagaatgactgtcaccgcatagcaaaactcatggctgatgtggtagaagaggagacacggcgatcccagcaagctgctcgggacaaacagagtcccagccaggccaatggctgcagcgaccacaggcccatcgacatcctggagatgctgagcagagccaaggatgagtatgagaggaatcagatgggtgactcaaatatctccagccctgggttacagccaagcactcagctctccaatctgggaagcaccgagactctagaagaaatgccctccgggtcacaggataagtctgctccatctggacacaagcatctgacggtagaagagttatttggaacctctttgccaaaggaacaaccagcagttgtgggtctggattcagaagaaatggagaggttgccaggagatgcctcccagaaagagcccaattcattcctaccatttccctttgagcagttaggaggagcccctcaatcagaaaccctgggtgtcccttctgctgcccaccattcagtccagcctgaaatcaccaccccggtgctaatcactccagcctccatcacacagtccaatgaaaagcatgctccaacctacacaatcccgttgagccctgttctcagtcccactctgccagctgaagctcctactgcacaggttccccccagcttacctcgaaacagcaccatgatgcaggcagtgaagaccacgcctagacagaggtctccactcctgaaccagccagtccctgagctaagccatgccagtctgattgccaaccagagccccttcagggccccattgaacgtgacgaacacagctggcacatccctcccaagcgttgatcttctccagaaactcaggttgaccccacagcatgaccaaatacagacacaaccacttgggaaaggtgcaatggtagccagcttttctccggcagctggtcagctagccacacctgagagcttcatagagcctccctctaagacagcagcagcaagagtggcggcctcagcctccctgagcaacatggtgcttgctccccttcagtctatgcagcagaaccaggatcctgaagtatttgtgcagcctaaggtgttatccagtgccatcccggttgcaggcgccccactggttactgcaacgaccactgcagtgtcttcagtcctgctggccccaagtgttttccagcagacagttacaagatcttcggaccttgagaggaaagccagctccccttctcctctaactattggaacgccagaaagtcagagaaagccttccattattctcagcaagtctcagctccaggatacattaatacatctaataaagaatgattccagcttcctcagtacacttcatgaagtctacttgcaggttctgaccaagaacaaagacaaccacaacctatgactggagcagaataagtctaaaggcagagccccagcctcagagacaaataggcttcatcatggaaacttctgagcagaacattgagtttgagaatcctgaaattgagcctatgagaaagagactcatttcttaagaatgttttccaagtgacattctcagtgataatggaggtttcactgtgaagcatcaccagcagatccttgttttgacaaaaaaaaaaaaaaaaaaaaaaagggttttttttgggggggggggggggggaaaaaattgggttaggcattttttaaagcggttttccttttaaggtcaaaaaaagggcttcctttttttccaaaaaa

SEQ ID NO: 18020 - DNA, 2066 bp, Homo sapiens
ggggactgacgcagatgggggaattttgcctcgatggcactttcctgtccgcgactccgcccccaccagaggggctaggctctgggattcaagatggaggcgctgagtcgagctgggcaggagatgagcctagcggccctgaagcaacacgacccctatatcaccagcatcgcagacctcacgggccaggtcgctctgtacaccttctgccccaaggccaaccagtgggagaagactgatatagaagggaccttattcgtatatcgaaggtcagcttccccttaccatggttttaccattgtgaatcgactaaatatgcacaatctagttgaaccagtgaataaagatttggaatttcagctccatgaaccatttcttctgtatagaaatgcaagcttgtcgatatatagtatctggttttatgacaagaatgactgtcaccgcatagcaaaactcatggctgatgtggtagaagaggagacacggcgatcccagcaagctgctcgggacaaacagagtcccagccaggccaatggctgcagcgaccacaggcccatcgacatcctggagatgctgagcagagccaaggatgagtatgagaggtctgctccatctggacacaagcatctgacggtagaagagttatttggaacctctttgccaaaggaacaaccagcagttgtgggtctggattcagaagaaatggagaggttgccaggagatgcctcccagaaagagcccaattcattcctaccatttccctttgagcagttaggaggagcccctcaatcagaaaccctgggtgtcccttctgctgcccaccattcagtccagcctgaaatcaccaccccggtgctaatcactccagcctccatcacacagtccaatgaaaagcatgctccaacctacacaatcccgttgagccctgttctcagtcccactctgccagctgaagctcctactgcacaggttccccccagcttacctcgaaacagcaccatgatgcaggcagtgaagaccacgcctagacagaggtctccactcctgaaccagccagtccctgagctaagccatgccagtctgattgccaaccagagccccttcagggccccattgaacgtgacgaacacagctggcacatccctcccaagcgttgatcttctccagaaactcaggttgaccccacagcatgaccaaatacagacacaaccacttgggaaaggtgcaatggtagccagcttttctccggcagctggtcagctagccacacctgagagcttcatagagcctccctctaagacagcagcagcaagagtggcggcctcagcctccctgagcaacatggtgcttgctccccttcagtctatgcagcagaaccaggatcctgaagtatttgtgcagcctaaggtgttatccagtgccatcccggttgcaggcgccccactggttactgcaacgaccactgcagtgtcttcagtcctgctggccccaagtgttttccagcagacagttacaagatcttcggaccttgagaggaaagccagctccccttctcctctaactattggaacgccagaaagtcagagaaagccttccattattctcagcaagtctcagctccaggatacattaatacatctaataaagaatgattccagcttcctcagtacacttcatgaagtctacttgcaggttctgaccaagaacaaagacaaccacaacctatgactggagcagaataagtctaaaggcagagccccagcctcagagacaaataggcttcatcatggaaacttctgagcagaacattgagtttgagaatcctgaaattgagcctatgagaaagagactcatttcttaagaatgttttccaagtgacattctcagtgataatggaggtttcactgtgaagcatcaccagcagatccttgttttgacaaaaaaaaaaaaaaaaaaaaaaagggttttttttgggggggggggggggggaaaaaattgggttaggcattttttaaagcggttttccttttaaggtcaaaaaaagggcttcctttttttccaaaaaa

SEQ ID NO: 18021 - DNA, 2141 bp, Homo sapiens
ggggactgacgcagatgggggaattttgcctcgatggcactttcctgtccgcgactccgcccccaccagaggggctaggctctgggattcaagatggaggcgctgagtcgagctgggcaggagatgagcctagcggccctgaagcaacacgacccctatatcaccagcatcgcagacctcacgggccaggagaagactgatatagaagggaccttattcgtatatcgaaggtcagcttccccttaccatggttttaccattgtgaatcgactaaatatgcacaatctagttgaaccagtgaataaagatttggaatttcagctccatgaaccatttcttctgtatagaaatgcaagcttgtcgatatatagtatctggttttatgacaagaatgactgtcaccgcatagcaaaactcatggctgatgtggtagaagaggagacacggcgatcccagcaagctgctcgggacaaacagagtcccagccaggccaatggctgcagcgaccacaggcccatcgacatcctggagatgctgagcagagccaaggatgagtatgagaggaatcagatgggtgactcaaatatctccagccctgggttacagccaagcactcagctctccaatctgggaagcaccgagactctagaagaaatgccctccgggtcacaggataagtctgctccatctggacacaagcatctgacggtagaagagttatttggaacctctttgccaaaggaacaaccagcagttgtgggtctggattcagaagaaatggagaggttgccaggagatgcctcccagaaagagcccaattcattcctaccatttccctttgagcagttaggaggagcccctcaatcagaaaccctgggtgtcccttctgctgcccaccattcagtccagcctgaaatcaccaccccggtgctaatcactccagcctccatcacacagtccaatgaaaagcatgctccaacctacacaatcccgttgagccctgttctcagtcccactctgccagctgaagctcctactgcacaggttccccccagcttacctcgaaacagcaccatgatgcaggcagtgaagaccacgcctagacagaggtctccactcctgaaccagccagtccctgagctaagccatgccagtctgattgccaaccagagccccttcagggccccattgaacgtgacgaacacagctggcacatccctcccaagcgttgatcttctccagaaactcaggttgaccccacagcatgaccaaatacagacacaaccacttgggaaaggtgcaatggtagccagcttttctccggcagctggtcagctagccacacctgagagcttcatagagcctccctctaagacagcagcagcaagagtggcggcctcagcctccctgagcaacatggtgcttgctccccttcagtctatgcagcagaaccaggatcctgaagtatttgtgcagcctaaggtgttatccagtgccatcccggttgcaggcgccccactggttactgcaacgaccactgcagtgtcttcagtcctgctggccccaagtgttttccagcagacagttacaagatcttcggaccttgagaggaaagccagctccccttctcctctaactattggaacgccagaaagtcagagaaagccttccattattctcagcaagtctcagctccaggatacattaatacatctaataaagaatgattccagcttcctcagtacacttcatgaagtctacttgcaggttctgaccaagaacaaagacaaccacaacctatgactggagcagaataagtctaaaggcagagccccagcctcagagacaaataggcttcatcatggaaacttctgagcagaacattgagtttgagaatcctgaaattgagcctatgagaaagagactcatttcttaagaatgttttccaagtgacattctcagtgataatggaggtttcactgtgaagcatcaccagcagatccttgttttgacaaaaaaaaaaaaaaaaaaaaaaagggttttttttgggggggggggggggggaaaaaattgggttaggcattttttaaagcggttttccttttaaggtcaaaaaaagggcttcctttttttccaaaaaa

SEQ ID NO: 18022 - DNA, 1998 bp, Homo sapiens
taacgtaaggacaagatgagttgtagatcaggacgagggatggaggcgctgagtcgagctgggcaggagatgagcctagcggccctgaagcaacacgacccctatatcaccagcatcgcagacctcacgggccaggtcgctctgtacaccttctgccccaaggccaaccagtgggagaagactgatatagaagggaccttattcgtatatcgaagtgtcgatatatagtatctggttttatgacaagaatgactgtcaccgcatagcaaaactcatggctgatgtggtagaagaggagacacggcgatcccagcaagctgctcgggacaaacagagtcccagccaggccaatggctgcagcgaccacaggcccatcgacatcctggagatgctgagcagagccaaggatgagtatgagaggaatcagatgggtgactcaaatatctccagccctgggttacagccaagcactcagctctccaatctgggaagcaccgagactctagaagaaatgccctccgggtcacaggataagtctgctccatctggacacaagcatctgacggtagaagagttatttggaacctctttgccaaaggaacaaccagcagttgtgggtctggattcagaagaaatggagaggttgccaggagatgcctcccagaaagagcccaattcattcctaccatttccctttgagcagttaggaggagcccctcaatcagaaaccctgggtgtcccttctgctgcccaccattcagtccagcctgaaatcaccaccccggtgctaatcactccagcctccatcacacagtccaatgaaaagcatgctccaacctacacaatcccgttgagccctgttctcagtcccactctgccagctgaagctcctactgcacaggttccccccagcttacctcgaaacagcaccatgatgcaggcagtgaagaccacgcctagacagaggtctccactcctgaaccagccagtccctgagctaagccatgccagtctgattgccaaccagagccccttcagggccccattgaacgtgacgaacacagctggcacatccctcccaagcgttgatcttctccagaaactcaggttgaccccacagcatgaccaaatacagacacaaccacttgggaaaggtgcaatggtagccagcttttctccggcagctggtcagctagccacacctgagagcttcatagagcctccctctaagacagcagcagcaagagtggcggcctcagcctccctgagcaacatggtgcttgctccccttcagtctatgcagcagaaccaggatcctgaagtatttgtgcagcctaaggtgttatccagtgccatcccggttgcaggcgccccactggttactgcaacgaccactgcagtgtcttcagtcctgctggccccaagtgttttccagcagacagttacaagatcttcggaccttgagaggaaagccagctccccttctcctctaactattggaacgccagaaagtcagagaaagccttccattattctcagcaagtctcagctccaggatacattaatacatctaataaagaatgattccagcttcctcagtacacttcatgaagtctacttgcaggttctgaccaagaacaaagacaaccacaacctatgactggagcagaataagtctaaaggcagagccccagcctcagagacaaataggcttcatcatggaaacttctgagcagaacattgagtttgagaatcctgaaattgagcctatgagaaagagactcatttcttaagaatgttttccaagtgacattctcagtgataatggaggtttcactgtgaagcatcaccagcagatccttgttttgacaaaaaaaaaaaaaaaaaaaaaaagggttttttttgggggggggggggggggaaaaaattgggttaggcattttttaaagcggttttccttttaaggtcaaaaaaagggcttcctttttttccaaaaaa

SEQ ID NO: 18023 - DNA, 1884 bp, Homo sapiens
taacgtaaggacaagatgagttgtagatcaggacgagggatggaggcgctgagtcgagctgggcaggagatgagcctagcggccctgaagcaacacgacccctatatcaccagcatcgcagacctcacgggccaggtcgctctgtacaccttctgccccaaggccaaccagtgggagaagactgatatagaagggaccttattcgtatatcgaagtgtcgatatatagtatctggttttatgacaagaatgactgtcaccgcatagcaaaactcatggctgatgtggtagaagaggagacacggcgatcccagcaagctgctcgggacaaacagagtcccagccaggccaatggctgcagcgaccacaggcccatcgacatcctggagatgctgagcagagccaaggatgagtatgagaggtctgctccatctggacacaagcatctgacggtagaagagttatttggaacctctttgccaaaggaacaaccagcagttgtgggtctggattcagaagaaatggagaggttgccaggagatgcctcccagaaagagcccaattcattcctaccatttccctttgagcagttaggaggagcccctcaatcagaaaccctgggtgtcccttctgctgcccaccattcagtccagcctgaaatcaccaccccggtgctaatcactccagcctccatcacacagtccaatgaaaagcatgctccaacctacacaatcccgttgagccctgttctcagtcccactctgccagctgaagctcctactgcacaggttccccccagcttacctcgaaacagcaccatgatgcaggcagtgaagaccacgcctagacagaggtctccactcctgaaccagccagtccctgagctaagccatgccagtctgattgccaaccagagccccttcagggccccattgaacgtgacgaacacagctggcacatccctcccaagcgttgatcttctccagaaactcaggttgaccccacagcatgaccaaatacagacacaaccacttgggaaaggtgcaatggtagccagcttttctccggcagctggtcagctagccacacctgagagcttcatagagcctccctctaagacagcagcagcaagagtggcggcctcagcctccctgagcaacatggtgcttgctccccttcagtctatgcagcagaaccaggatcctgaagtatttgtgcagcctaaggtgttatccagtgccatcccggttgcaggcgccccactggttactgcaacgaccactgcagtgtcttcagtcctgctggccccaagtgttttccagcagacagttacaagatcttcggaccttgagaggaaagccagctccccttctcctctaactattggaacgccagaaagtcagagaaagccttccattattctcagcaagtctcagctccaggatacattaatacatctaataaagaatgattccagcttcctcagtacacttcatgaagtctacttgcaggttctgaccaagaacaaagacaaccacaacctatgactggagcagaataagtctaaaggcagagccccagcctcagagacaaataggcttcatcatggaaacttctgagcagaacattgagtttgagaatcctgaaattgagcctatgagaaagagactcatttcttaagaatgttttccaagtgacattctcagtgataatggaggtttcactgtgaagcatcaccagcagatccttgttttgacaaaaaaaaaaaaaaaaaaaaaaagggttttttttgggggggggggggggggaaaaaattgggttaggcattttttaaagcggttttccttttaaggtcaaaaaaagggcttcctttttttccaaaaaa

SEQ ID NO: 18024 - DNA, 774 bp, Homo sapiens
  misc_feature (730)..(731): n is a, c, g, or t
ggggactgacgcagatgggggaattttgcctcgatggcactttcctgtccgcgactccgcccccaccagaggggctaggctctgggattcaagatggaggcgctgagtcgagctgggcaggagatgagcctagcggccctgaagcaacacgacccctatatcaccagcatcgcagacctcacgggccaggtcgctctgtacaccttctgccccaaggccaaccagtgggagaagactgatatagaagggaccttattcgtatatcgaaggtcagcttccccttaccatggttttaccattgtgaatcgactaaatatgcacaatctagttgaaccagtgaataaagatttggaatttcagctccatgaaccatttcttctgtatagaaatgcaagcttgtcgatatatagtatctggttttatgacaagaatgactgtcaccgcatagcaaaactcatggctgatgtggtagaagaggagacacggcgatcccagcaagctgctcgggacaaacagagtcccagccaggccaatggctgcagcgaccacaggcccatcgacatcctggagatgctgagcagagccaaggatgagtatgagaggaatcagatgggtgactcaaatatctccagccctgggttacagccaagcactcagctctccaatctgggaagcaccgagactctagaagaaatgccctccgggtcacaggataagtctgctcatctgnncacaagcatctggcggtaaagcttgggatcctctggaatcagc

SEQ ID NO: 18025 - DNA, 454 bp, Homo sapiens
cgagctcggtacccaatcagtttacacaaataaagaatgattccagcttcctcagtacacttcatgaagtctacttgcaggttctgaccaagaacaaagacaaccacaacctatgactggagcagaataagtctaaaggcagagccccagcctcagagacaaataggcttcatcatggaaacttctgagcagaacattgagtttgagaatcctgaaattgagcctatgagaaagagactcatttcttaagaatgttttccaagtgacattctcagtgataatggaggtttcactgtgaagcatcaccagcagatccttgttttgacaaaaaaaaaaaaaaaaaaaaaaagggttttttttgggggggggggggggggaaaaaattgggttaggcattttttaaagcggttttccttttaaggtcaaaaaaagggcttcctttttttccaaaaaa

SEQ ID NO: 18026 - DNA, 389 bp, Homo sapiens
gttactgcaacgaccactgcagtgtcttcagtcctgctggccccaagtgttttccagcagacagttacaagatcttcggaccttgagaggaaagccagctccccttctcctctaactattggaacgccagaaagtcagagaaagccttccattattctcagcaagtctcagctccaggatacattaatacatctaataaaggtatgtaggataccaattttatctttgatttttcattatttaatgaaagaaattttataaattcctcttacagaatcagttcataaagtaaattcaaaagactagctggaggccaggcaaagtggctcacacctgtaatcccagcactatgggaggccaaggcaggcaaaaaaaaaacaaaaacagac

SEQ ID NO: 18027 - DNA, 351 bp, Homo sapiens
ttttcccccaactaattttataccctgctcctgggcagtactaatttaagccattacccacgctccacaccacccaccatattctttgtctataggatttccaaaatttaacgccttccctcctattcctccgaccaactgcaattttcactgcccctacacccgtaggttccacagttgggaattaaccttttttctgaactccataaatcacaagtgcccaagaacaatctgatcgagatgggctccttagtagcccagagatgcaaattttcagcgcccggagatgcatgttttctaagtttttgtttgcctcgttcgacttaaaaattcgtttctgacacctaagcc

SEQ ID NO: 18028 - DNA, 325 bp, Homo sapiens
gctttacctgcctttggtagggatctcttcttcgtttctttttcagctgtttcagaatcttcaatggcagcacactggataaagcctttcaaggacatctttctagctttaatctcccttagagagaacctttacccagcagattggtctgttctctgtccctgggacagatcatgtgctttcccacctactactctctgataagaaattgcccactcgtctctcaagctatccagatactccctacacttcaaggagcagcttaaattctagtttcttttttttccctacattttcaaataaactttattgatttctccatctc

SEQ ID NO: 18029 - DNA, 571 bp, Homo sapiens
aagcagacccactaggaaagaggacgagacacaaggttaactgccccctcacctccgcgccactatttagaagcccaggaggtgcctcatccctgaagtcaacaggcttgacccccctagtctagaatgcctccacagtgtcaagggagagggcaggatgggaagcggatgttagaaaagttcaacattaacaaggcagggtgtcctgacacaccacttaatgaaaaaatgcaggcaaaacctactgtgtgtgtgtgtgtgtgtgtgtgtctgggaagagagagagagattcatctggaaagatgttcatcaaaatgtgaataacttatgggatttgagtgtacttttatttttactttatatcttacagatttgcaaaaaagaaaccttttacattttaataaaataagtgatacaagaaatctatcatttatttcattaaattttttttcaattaaaaaaagacccagaggaaggatagagagagtggagcagagatgaggccaggagggaatccaggtggagacaggaaaactggagacagtcggtgaggagagaggcctgggtgttg

SEQ ID NO: 18030 - DNA, 495 bp, Homo sapiens
aacctccattgtaggagataatcaaatcttagtcatctcttgtgtgtgactaatacccattgccagggctgttccattctgccgcagaagccactgtaatgactaagccatcaagatggattttttcctgatgacatttgctgcacaggactaaattctattaagccagccttttcgagtctggatctggaggagtcattgtatcactgtctttgaaaattaggctaaagggggtggtatctattaatataccgaggctctagtttccctcctcctaggatgcctgacctctccggcccattcctgtctctttcttactgaacctgctgtgcctgtattgtgggagccagcatgacctcatcgccctgagcatgggagtgttgggctgggccagggccctctcagtgccctcccaggcagagcctccaccctgggttttacaattactcaggggccacagaatgtggatggtgctaaattaacgcagcaaaccag

SEQ ID NO: 18031 - DNA, 2654 bp, Homo sapiens
aagtttatagaaaatgcttgttttatagttggttgttattgagatgagagtccctcaaggaactccctatgctttagggagctttttgttttaaacctactggttagacttgtgggttttaatgttttcagctgtggttgtaagaaacacattttaaattgcacctagtatagacatacatgtaaaacaaacaaaatttttacgaagtagtacttgtattaagagtgatgtactctgctatcttctatttcatttttttaaagttgatattgctgccttaaattgattttttcaaccactaatgagtcaggacccactatttaaaaaatactggtgtgttctcttgctgttacgaattaacccaaaacttagtggtttaaagcaataaacttgtgtttatctcatgtaggttctgtgggtcaggaatctgggagtagcttacttaggtggttctgggtcagggtttttcatgtggctccgcgctctgctccagccaaacttctgcagaccatgtgcagccgaggcgaggaaacttctctccacctattggggctggaggcctgagtcacaagccccttgtttacataaagtgtttaggtagcacaagtccttgagatgctcggggtagagatggagagccactgctcgtatccttctgccggcttctgcttgagatctcttggcctttacccttgtcccttgacttttcgtgtttgttttaatctttaagacttgaaatggagtggcctttagaaccggggagatactgtaaaccagcagtatctttgtgtcaccaatggtaactgaaagtcatgctgaagtacagattcctgtagcgtgcacagaggcagaggtgcttcctttaccttgcagatgagttgagcggcgtaagatgtttctgttagggttgaatttcatggttatttcagcaacgattttcgtttttgaagttttggcccccccaaaaatgaaagtctgcaacgcatgtttgttaagagaacagtttattctcctgttaggttttggtctttgaggtatggattccagagttggctattctgttagatttagaggtgtggaaaatcttttaacggggagatcctgaaacacggaaacatggcagggaagttagaatttcctgatggtcatttttaacattttaaagtttactttttggttgttgccatttttctagaatccgtgtcttttttggggaaatacagtcctttgaggactagaatttaatgatttctttacacatctaggattttttgagatttagaaaggatatggctttattcctaaggaagtggaggcagcagtttctaggatactctggtttcaaggcatgctaacttggttgtgatgtctaacccattttggtttacacagtctgaccactagcacaatgcctggcacatagtttacaaatcatttaaggcaagcttaccatcttaagacaatttaatacatagaagtgtccctcctaaaaatctgagtttgatttagaaatccagttatacctgcaggtactgatgactaattccttctttgaagacaaaatagcagctgtgtagcttcagtggctctcaaatggataatagattcagtgtatactcgctttgaactttcctgttttttgatcagctagataaatgactttagtgggtaaatgtctgcctccaaaaccaaattctgaccctgatctaagtattctactgcaccgctgtcactggaatatcaaagttggccttcagactggtgcctggttccttggattggcttgagtattgaggtctgtctcatcttactagggaactaaaatgatgttgattgttttgtagagaattgtaattagagatctgtaggttcttaattcttttggaattccattctgaaaattttcaaccttatggtgttggtggagtgctcatgtgaagagtgaaactgacttaagaataaaagaaaaagtgggcaaaactaatgctaaacttgagaccattgggcagaaatttgcctgtgtgtgtagagtaattggtcttgagtcaaagtaactatgcttatttttaacatcactgaatattttctagcgttacactctatataggcttgtagaaataaacccaggggtaagcccagaaattgaatatcagtcctaaagaaagcctatcaagagcatcctattctctttaagagctgctattcgaatttaggactgggctggtttgctgctcattctctcgaggcataggcagccacacttgaattttgccaagtatgcagataattccaacttgtagtcaggatcatcaggtaatagcattataaggggagctgtacagactgtatactttctacagtttgttgaaatagaaacatttatatggatacatacatctgcaaaggttagggagaaaacggtagccctggcagagaagagctagttagtgtatttcaggatagggccaagggaagctgtcatttctctactaagtctcattgtggaaaagccacaaatgtccctagtacagtaataaggaaaaaaaggctgagcgtggtggctcacacctgtagtcccaggactttcggaaggattgcttgagcccaggagttgcagatcggccaggacaatgtaagaaaaccccatgtattag

SEQ ID NO: 18032 - DNA, 357 bp, Homo sapiens
tgaaaaatagtggtgttgggagagttggtatacccagtgagggtatggaagctctgtgccacccaccccccagcccaataccttgacctgtgcatctcttccatctggctgtttctgagttttatgtgaagactcggggacacagggacacacaagggaaatgcgatgtgactatggagacacagattagagtgatgggtccacaggtctcagggtcctcaaacaaccaccagaagataggaagaggcaaggatcataccctagagccttcagagacagcatggcccagctgacatcttgaattcagacatctagcctccagaacctccaaagaataaatgtctattgttttaaacc

SEQ ID NO: 18033 - DNA, 645 bp, Homo sapiens
agccaaggaagaagtgaagggataattgtgcttacaccagttagcttttcacacttctctctctcccggtgcagcactgccggtagggggagcagtgagctccaagtttccaggaataattcaaaacacaattattttatattttaaaatataaaatgtatattttaaatatatatacatacatttctatataatatatacaaaagttcaatatacgtatattgaatatatatgtatataagttcaatatatatgtatgtatattcaatatatatgtatgtatatatgtatatatattcaatatatatgtgtatatattgaactttagtcatgtggtgacactttaaacagtacacagagcagcttctgggtccatgaccctccaaaaatttaattactgattctttagaaactaggcaactcagccaggtgtgggggctcacgcctgtaatcccagcactttgggtggccgaggtgggtggatcacctgaggtcgggagttcaagaccagcctgaccagcatggagaaaccctgtctccactaaaaatacaaaattagccaggcgtggtggcacatgcctgtaatcccagctacttgggaggctgaggcaggagaatcacttgaacccgggcgatcgcaccatt

SEQ ID NO: 18034 - DNA, 792 bp, Homo sapiens
aatttaactgaattgtatcatcaaaataaataaaacagggtaataaaaataacaattagggtgactgatgtcagacactcatatcaactcatcattttcttgtagcctctgattctgtactttcttgtgtattattaaagaggtaaatgctctcttaaaatgcctctagttcctcagaggtaggaaaaataaactcaacctgctttggacttgtgtatttacttgggttggtttccagaatctccttattcctgaaacagtatgatcatgtagttaaactactcctttatatctgtaagtactgtgcagccaacatgttcttttttgtccccaacttctgccatctttccaacctctgaggcatgctattttatagtggtttgctctttgaaaaattgtttttgtgccctctcttaatagtcacagatactgacacaaaacttaaaaatgaccagaaaacaatgtataaattatttaaaataaaacattctttttatatcacattatcaaatttgtactctttattcacttttccattaagtgtgatatcaatatagctaggctgttttgagcttgcacagtctgtctaccaagctccttcctaagtactttgagggtaaaatgaagaaggcagtctaggaaggaacacaattacagagccctgtagaaggcagactgcttacaggagctgtataaggaaaattaagcccaacattatgtgctgtgttggccatcatgcaaagctgattgcaaagccctggttacctccttcatcatcttccatggaagata

SEQ ID NO: 18035 - DNA, 368 bp, Homo sapiens
ttgtccaggagagagggagagtgagcagagcagggagacgtttatgtttgggctccttagaagagttagcatattctaggaagaaggggtgacacacacatcctaagaaagaagcctgtgcacagggctcagtgctaaatcctcattgtggttgtcatcaccttcctggcaacagctgcccatctgtggagcccagaaccattgtaagtccttagtgggtgccacccgatttgcgcctctccaagcctgtggaggaaagtctgaggcagagaaggagggcaggggaggacgaaacacaggacgtcaggctgctgcaagaggatgtgtgtccctcaggctgtccctttgtgtggccgctctgctgccgt

SEQ ID NO: 18036 - DNA, 529 bp, Homo sapiens
agcattagctaaggggctgaaagaaatctcagaaaatgataaaaccacacatgggacaaacaggtgtataaaaaactgaactgttagtagttaaagtaacttcatacttatctctatgaatacgacagagccaatattaagatactacaaaattataagacaacacatttcttactcaggaaattatatccaaatgtccatacaactaagtgtgaagtttactaagaaaacaaaggcaggccaggcgcagtggctcacgcctgtaattccagcactttgggaggctatggggggcggattgcttgagctcaggagttcgaaaccagcctgggcaacatggtgaaatactatctccatgaaaattacaaaaaattagttgggagtggtggtgtgtgcctgtagtcccagctacttgggaggctgaggtaggaggatcacttgagcccaggagacagaggctgcagtgagctagctgaatttgtgctactgcattccagcataggtgacagagtgagaccctgtctccgga

SEQ ID NO: 18037 - DNA, 2364 bp, Homo sapiens
atccgcagccaactgtgtggcggtccccactttcgcctagcggcaactccctccctccctgcaatccttccttcttattccggtttccagagcacgtctccaggcttcgacgtcaccacgctgggacgtatgtgccgagggccgcggcgtctgacctcatggcgtagagcctagcaacagcgcaggctcccagccgagtccgttatggccgctgccgtcccgaagaggatgagggggccagcacaagcgaaactgctgcccgggtcggccatccaagcccttgtggggttggcgcggccgctggtcttggcgctcctgcttgtgtccgccgctctatccagtgttgtatcacggactgattcaccgagcccaaccgtactcaactcacatatttctaccccaaatgtgaatgctttaacacatgaaaaccaaaccaaaccttctatttcccaaatcagcaccaccctccctcccacgacgagtaccaagaaaagtggaggagcatctgtggtccctcatccctcgcctactcctctgtctcaagaggaagctgataacaatgaagatcctagtatagaggaggaggatcttctcatgctgaacagttctccatccacagccaaagacactctagacaatggcgattatggagaaccagactatgactggaccacgggccccagggacgacgacgagtctgatgacaccttggaagaaaacaggggttacatggaaattgaacagtcagtgaaatcttttaagatgccatcctcaaatatagaagaggaagacagccatttcttttttcatcttattatttttgctttttgcattgctgttgtttacattacatatcacaacaaaaggaagatttttcttctggttcaaagcaggaaatggcgtgatggcctttgttccaaaacagtggaataccatcgcctagatcagaatgttaatgaggcaatgccttctttgaagattaccaatgattatattttttaaagcactgtgatttgaatttgcttatgtaattttatttgcttgactttttatatgatattgtgcaaatgtttgccataggcaattggtacttaaatgagaggtgagtctctcttttgccttggtgctttggaaattaaatgtcacaaacgagtatataattttttatctgtacttttagagctgagtttaatcaggtgtccaaaatgtgagttaaacattaccttatatttacactgttagtttttattgttttagatttattatgcttcttctggaagtattagtgatgctacttttaaaagatcccaaacttgtaactaaattctgacatatctgttactgctgactcacattcattctccgccattcaaatactattttttatccacatttttttttgttcccaaactgtaatgtacaaggatatgtgtgataatgctttggatttgagtaatatttttttttcttccaagaaaactgctttggatatttttagataatttaaacataatttaggataatgatattgctcaatctgaccacaattttaggtaaaacattaaatgtgtcaagaaatcttggcaacagagactctgcagcttgcagtggacatagataaaatgttacagagatactatttttttggttggaattactatattaaatttagaagcagaaactggtaaaatgttaaatacatgtacaattgcttttagttagcaattgattgtagcatgggttcctccaaggtttcaagcaatgggcagagtttaaaattatatcagattcgtttacttcgtttattattttacagtaaatttgaataaatcttaggggtcattatcacttaaataatactgtacctaggtctttcaaattaaaattatacctgaatgaagttgtttgtatacataaaggatatttgtgtacaattaccttttttcccccacacttgttttctttgtttttgttttttatggcaactggaaagtatttactatgggattcatttatgtctgtctttctatcataaagaattgatcaatatgtaaatatgtgatttgaaccatggttgacttacaagtgtcactacagctttttagaaaacatagccctaatatatgttaagcaggacccgggtgagccagtgggcttgcgctttatgtagagctggaagaaggccgtccatcctgtctcttgggcggacagtgtactttcctaatagggaagggaagcacaatggaaatacccctgaaccgttttattgcagtaatttttttcatatctgaaactattatttaatattttgaataagattttaaaaaataaatggcaaagatataaatctatgaaaaaaaaaag

SEQ ID NO: 18038 - DNA, 2428 bp, Homo sapiens
atccgcagccaactgtgtggcggtccccactttcgcctagcggcaactccctccctccctgcaatccttccttcttattccggtttccagagcacgtctccaggcttcgacgtcaccacgctgggacgtatgtgccgagggccgcggcgtctgacctcatggcgtagagcctagcaacagcgcaggctcccagccgagtccgttatggccgctgccgtcccgaagaggatgagggggccagcacaagcgaaactgctgcccgggtcggccatccaagcccttgtggggttggcgcggccgctggtcttggcgctcctgcttgtgtccgccgctctatccagtggccaagacacagtcctgcgtttctccctaaatttgaattttcagctgcaaaacagtgtgacctgttgtatcacggactgattcaccgagcccaaccgtactcaactcacatatttctaccccaaatgtgaatgctttaacacatgaaaaccaaaccaaaccttctatttcccaaatcagcaccaccctccctcccacgacgagtaccaagaaaagtggaggagcatctgtggtccctcatccctcgcctactcctctgtctcaagaggaagctgataacaatgaagatcctagtatagaggaggaggatcttctcatgctgaacagttctccatccacagccaaagacactctagacaatggcgattatggagaaccagactatgactggaccacgggccccagggacgacgacgagtctgatgacaccttggaagaaaacaggggttacatggaaattgaacagtcagtgaaatcttttaagatgccatcctcaaatatagaagaggaagacagccatttcttttttcatcttattatttttgctttttgcattgctgttgtttacattacatatcacaacaaaaggaagatttttcttctggttcaaagcaggaaatggcgtgatggcctttgttccaaaacagtggaataccatcgcctagatcagaatgttaatgaggcaatgccttctttgaagattaccaatgattatattttttaaagcactgtgatttgaatttgcttatgtaattttatttgcttgactttttatatgatattgtgcaaatgtttgccataggcaattggtacttaaatgagaggtgagtctctcttttgccttggtgctttggaaattaaatgtcacaaacgagtatataattttttatctgtacttttagagctgagtttaatcaggtgtccaaaatgtgagttaaacattaccttatatttacactgttagtttttattgttttagatttattatgcttcttctggaagtattagtgatgctacttttaaaagatcccaaacttgtaactaaattctgacatatctgttactgctgactcacattcattctccgccattcaaatactattttttatccacatttttttttgttcccaaactgtaatgtacaaggatatgtgtgataatgctttggatttgagtaatatttttttttcttccaagaaaactgctttggatatttttagataatttaaacataatttaggataatgatattgctcaatctgaccacaattttaggtaaaacattaaatgtgtcaagaaatcttggcaacagagactctgcagcttgcagtggacatagataaaatgttacagagatactatttttttggttggaattactatattaaatttagaagcagaaactggtaaaatgttaaatacatgtacaattgcttttagttagcaattgattgtagcatgggttcctccaaggtttcaagcaatgggcagagtttaaaattatatcagattcgtttacttcgtttattattttacagtaaatttgaataaatcttaggggtcattatcacttaaataatactgtacctaggtctttcaaattaaaattatacctgaatgaagttgtttgtatacataaaggatatttgtgtacaattaccttttttcccccacacttgttttctttgtttttgttttttatggcaactggaaagtatttactatgggattcatttatgtctgtctttctatcataaagaattgatcaatatgtaaatatgtgatttgaaccatggttgacttacaagtgtcactacagctttttagaaaacatagccctaatatatgttaagcaggacccgggtgagccagtgggcttgcgctttatgtagagctggaagaaggccgtccatcctgtctcttgggcggacagtgtactttcctaatagggaagggaagcacaatggaaatacccctgaaccgttttattgcagtaatttttttcatatctgaaactattatttaatattttgaataagattttaaaaaataaatggcaaagatataaatctatgaaaaaaaaaag

SEQ ID NO: 18039 - DNA, 2310 bp, Homo sapiens
atccgcagccaactgtgtggcggtccccactttcgcctagcggcaactccctccctccctgcaatccttccttcttattccggtttccagagcacgtctccaggcttcgacgtcaccacgctgggacgtatgtgccgagggccgcggcgtctgacctcatggcgtagagcctagcaacagcgcaggctcccagccgagtccgttatggccgctgccgtcccgaagaggatgagggggccagcacaagcgaaactgctgcccgggtcggccatccaagcccttgtggggttggcgcggccgctggtcttggcgctcctgcttgtgtccgccgctctatccagtgttgtatcacggactgattcaccgagcccaaccgtactcaactcacatatttctaccccaaatgtgaatgctttaacacatgaaaaccaaaccaaaccttctatttcccaaatcagcaccaccctccctcccacgacgagtaccaagaaaagtggaggagcatctgtggtccctcatccctcgcctactcctctgtctcaagaggaagctgataacaatgaagatcctagtatagaggaggaggatcttctcatgctgaacagttctccatccacagccaaagacactctagacaatggcgattatggagaaccagactatgactggaccacgggccccagggacgacgacgagtctgatgacaccttggaagaaaacaggggttacatggaaattgaacagtcagtgaaatcttttaagatgccatcctcaaatatagaagaggaagacagccatttcttttttcatcttattatttttgctttttgcattgctgttgtttacattacatatcacaacaaaaggaagatttttcttctggttcaaagcaggaaatggcgtgatggcctttcttctttgaagattaccaatgattatattttttaaagcactgtgatttgaatttgcttatgtaattttatttgcttgactttttatatgatattgtgcaaatgtttgccataggcaattggtacttaaatgagaggtgagtctctcttttgccttggtgctttggaaattaaatgtcacaaacgagtatataattttttatctgtacttttagagctgagtttaatcaggtgtccaaaatgtgagttaaacattaccttatatttacactgttagtttttattgttttagatttattatgcttcttctggaagtattagtgatgctacttttaaaagatcccaaacttgtaactaaattctgacatatctgttactgctgactcacattcattctccgccattcaaatactattttttatccacatttttttttgttcccaaactgtaatgtacaaggatatgtgtgataatgctttggatttgagtaatatttttttttcttccaagaaaactgctttggatatttttagataatttaaacataatttaggataatgatattgctcaatctgaccacaattttaggtaaaacattaaatgtgtcaagaaatcttggcaacagagactctgcagcttgcagtggacatagataaaatgttacagagatactatttttttggttggaattactatattaaatttagaagcagaaactggtaaaatgttaaatacatgtacaattgcttttagttagcaattgattgtagcatgggttcctccaaggtttcaagcaatgggcagagtttaaaattatatcagattcgtttacttcgtttattattttacagtaaatttgaataaatcttaggggtcattatcacttaaataatactgtacctaggtctttcaaattaaaattatacctgaatgaagttgtttgtatacataaaggatatttgtgtacaattaccttttttcccccacacttgttttctttgtttttgttttttatggcaactggaaagtatttactatgggattcatttatgtctgtctttctatcataaagaattgatcaatatgtaaatatgtgatttgaaccatggttgacttacaagtgtcactacagctttttagaaaacatagccctaatatatgttaagcaggacccgggtgagccagtgggcttgcgctttatgtagagctggaagaaggccgtccatcctgtctcttgggcggacagtgtactttcctaatagggaagggaagcacaatggaaatacccctgaaccgttttattgcagtaatttttttcatatctgaaactattatttaatattttgaataagattttaaaaaataaatggcaaagatataaatctatgaaaaaaaaaag

SEQ ID NO: 18040 - DNA, 2284 bp, Homo sapiens
atccgcagccaactgtgtggcggtccccactttcgcctagcggcaactccctccctccctgcaatccttccttcttattccggtttccagagcacgtctccaggcttcgacgtcaccacgctgggacgtatgtgccgagggccgcggcgtctgacctcatggcgtagagcctagcaacagcgcaggctcccagccgagtccgttatggccgctgccgtcccgaagaggatgagggggccagcacaagcgaaactgctgcccggttgtatcacggactgattcaccgagcccaaccgtactcaactcacatatttctaccccaaatgtgaatgctttaacacatgaaaaccaaaccaaaccttctatttcccaaatcagcaccaccctccctcccacgacgagtaccaagaaaagtggaggagcatctgtggtccctcatccctcgcctactcctctgtctcaagaggaagctgataacaatgaagatcctagtatagaggaggaggatcttctcatgctgaacagttctccatccacagccaaagacactctagacaatggcgattatggagaaccagactatgactggaccacgggccccagggacgacgacgagtctgatgacaccttggaagaaaacaggggttacatggaaattgaacagtcagtgaaatcttttaagatgccatcctcaaatatagaagaggaagacagccatttcttttttcatcttattatttttgctttttgcattgctgttgtttacattacatatcacaacaaaaggaagatttttcttctggttcaaagcaggaaatggcgtgatggcctttgttccaaaacagtggaataccatcgcctagatcagaatgttaatgaggcaatgccttctttgaagattaccaatgattatattttttaaagcactgtgatttgaatttgcttatgtaattttatttgcttgactttttatatgatattgtgcaaatgtttgccataggcaattggtacttaaatgagaggtgagtctctcttttgccttggtgctttggaaattaaatgtcacaaacgagtatataattttttatctgtacttttagagctgagtttaatcaggtgtccaaaatgtgagttaaacattaccttatatttacactgttagtttttattgttttagatttattatgcttcttctggaagtattagtgatgctacttttaaaagatcccaaacttgtaactaaattctgacatatctgttactgctgactcacattcattctccgccattcaaatactattttttatccacatttttttttgttcccaaactgtaatgtacaaggatatgtgtgataatgctttggatttgagtaatatttttttttcttccaagaaaactgctttggatatttttagataatttaaacataatttaggataatgatattgctcaatctgaccacaattttaggtaaaacattaaatgtgtcaagaaatcttggcaacagagactctgcagcttgcagtggacatagataaaatgttacagagatactatttttttggttggaattactatattaaatttagaagcagaaactggtaaaatgttaaatacatgtacaattgcttttagttagcaattgattgtagcatgggttcctccaaggtttcaagcaatgggcagagtttaaaattatatcagattcgtttacttcgtttattattttacagtaaatttgaataaatcttaggggtcattatcacttaaataatactgtacctaggtctttcaaattaaaattatacctgaatgaagttgtttgtatacataaaggatatttgtgtacaattaccttttttcccccacacttgttttctttgtttttgttttttatggcaactggaaagtatttactatgggattcatttatgtctgtctttctatcataaagaattgatcaatatgtaaatatgtgatttgaaccatggttgacttacaagtgtcactacagctttttagaaaacatagccctaatatatgttaagcaggacccgggtgagccagtgggcttgcgctttatgtagagctggaagaaggccgtccatcctgtctcttgggcggacagtgtactttcctaatagggaagggaagcacaatggaaatacccctgaaccgttttattgcagtaatttttttcatatctgaaactattatttaatattttgaataagattttaaaaaataaatggcaaagatataaatctatgaaaaaaaaaag

SEQ ID NO: 18041 - DNA, 1764 bp, Homo sapiens
ccaggtgatctagaggatcccgtagtcgttagcagtaatggcgattatggagaaccagactatgactggaccacgggccccagggacgacgacgagtctgatgacaccttggaagaaaacaggggttacatggaaattgaacagtcagtgaaatcttttaagatgccatcctcaaatatagaagaggaagacagccatttcttttttcatcttattatttttgctttttgcattgctgttgtttacattacatatcacaacaaaaggaagatttttcttctggttcaaagcaggaaatggcgtgatggcctttgttccaaaacagtggaataccatcgcctagatcagaatgttaatgaggcaatgccttctttgaagattaccaatgattatattttttaaagcactgtgatttgaatttgcttatgtaattttatttgcttgactttttatatgatattgtgcaaatgtttgccataggcaattggtacttaaatgagaggtgagtctctcttttgccttggtgctttggaaattaaatgtcacaaacgagtatataattttttatctgtacttttagagctgagtttaatcaggtgtccaaaatgtgagttaaacattaccttatatttacactgttagtttttattgttttagatttattatgcttcttctggaagtattagtgatgctacttttaaaagatcccaaacttgtaactaaattctgacatatctgttactgctgactcacattcattctccgccattcaaatactattttttatccacatttttttttgttcccaaactgtaatgtacaaggatatgtgtgataatgctttggatttgagtaatatttttttttcttccaagaaaactgctttggatatttttagataatttaaacataatttaggataatgatattgctcaatctgaccacaattttaggtaaaacattaaatgtgtcaagaaatcttggcaacagagactctgcagcttgcagtggacatagataaaatgttacagagatactatttttttggttggaattactatattaaatttagaagcagaaactggtaaaatgttaaatacatgtacaattgcttttagttagcaattgattgtagcatgggttcctccaaggtttcaagcaatgggcagagtttaaaattatatcagattcgtttacttcgtttattattttacagtaaatttgaataaatcttaggggtcattatcacttaaataatactgtacctaggtctttcaaattaaaattatacctgaatgaagttgtttgtatacataaaggatatttgtgtacaattaccttttttcccccacacttgttttctttgtttttgttttttatggcaactggaaagtatttactatgggattcatttatgtctgtctttctatcataaagaattgatcaatatgtaaatatgtgatttgaaccatggttgacttacaagtgtcactacagctttttagaaaacatagccctaatatatgttaagcaggacccgggtgagccagtgggcttgcgctttatgtagagctggaagaaggccgtccatcctgtctcttgggcggacagtgtactttcctaatagggaagggaagcacaatggaaatacccctgaaccgttttattgcagtaatttttttcatatctgaaactattatttaatattttgaataagattttaaaaaataaatggcaaagatataaatctatgaaaaaaaaaag

SEQ ID NO: 18042 - DNA, 2307 bp, Homo sapiens
atccgcagccaactgtgtggcggtccccactttcgcctagcggcaactccctccctccctgcaatccttccttcttattccggtttccagagcacgtctccaggcttcgacgtcaccacgctgggacgtatgtgccgagggccgcggcgtctgacctcatggcgtagagcctagcaacagcgcaggctcccagccgagtccgttatggccgctgccgtcccgaagaggatgagggggccagcacaagcgaaactgctgcccgggtcggccatccaagcccttgtggggttggcgcggccgctggtcttggcgctcctgcttgtgtccgccgctctatccagtgttgtatcacggactgattcaccgagcccaaccgtactcaactcacatatttctaccccaaatgtgaatgctttaacacatgaaaaccaaaccaaaccttctatttcccaaatcagcaccaccctccctcccacgacgagtaccaagaaaagtggaggagcatctgtggtccctcatccctcgcctactcctctgtctcaagaggaagctgataacaatgaagatcctagtatagaggaggaggatcttctcatgctgaacagttctccatccacagccaaagacactctagacaatggcgattatggagaaccagactatgactggaccacgggccccagggacgacgacgagtctgatgacaccttggaagaaaacaggggttacatggaaattgaacagtcagtgaaatcttttaagatgccatcctcaaatatagaagaggaagacagccatttcttttttcatcttattatttttgctttttgcattgctgttgtttacattacatatcacaacaaaaggaagatttttcttctggttcaaagcaggaaatggcgtgatggcctttgttccaaaacagtggaataccatcgcctagatcagaatgttaatgaggcaatgccttctttgaagattaccaatgattatattttttaaagcactgtgatttgaatttgcttatgtaattttatttgcttgactttttatatgatattgtgcaaatgtttgccataggcaattggtacttaaatgagaggtgagtctctcttttgccttggtgctttggaaattaaatgtcacaaacgagtatataattttttatctgtacttttagagctgagtttaatcaggtgtccaaaatgtgagttaaacattaccttatatttacactgttagtttttattgttttagatttattatgcttcttctggaagtattagtgatgctacttttaaaagatcccaaacttgtaactaaattctgacatatctgttactgctgactcacattcattctccgccattcaaatactattttttatccacatttttttttgttcccaaactgtaatgtacaaggatatgtgtgataatgctttggatttgagtaatatttttttttcttccaagaaaactgctttggatatttttagataatttaaacataatttaggataatgatattgctcaatctgaccacaattttaggtaaaacattaaatgtgtcaagaaatcttggcaacagagactctgcagcttgcagtggacatagataaaatgttacagagatactatttttttggttggaattactatattaaatttagaagcagaaactggtaaaatgttaaatacatgtacaattgcttttagttagcaattgattgtagcatgggttcctccaaggtttcaagcaatgggcagagtttaaaattatatcagattcgtttacttcgtttattattttacagtaaatttgaataaatcttaggggtcattatcacttaaataatactgtacctaggtctttcattaccttttttcccccacacttgttttctttgtttttgttttttatggcaactggaaagtatttactatgggattcatttatgtctgtctttctatcataaagaattgatcaatatgtaaatatgtgatttgaaccatggttgacttacaagtgtcactacagctttttagaaaacatagccctaatatatgttaagcaggacccgggtgagccagtgggcttgcgctttatgtagagctggaagaaggccgtccatcctgtctcttgggcggacagtgtactttcctaatagggaagggaagcacaatggaaatacccctgaaccgttttattgcagtaatttttttcatatctgaaactattatttaatattttgaataagattttaaaaaataaatggcaaagatataaatctatgaaaaaaaaaag

SEQ ID NO: 18043 - DNA, 1273 bp, Homo sapiens
aagcagtggtatcaacgcagagggcccattacggccgggggaaattaaatgtcacaaacgagtatataattttttatctgtacttttagagctgagtttaatcaggtgtccaaaatgtgagttaaacattaccttatatttacactgttagtttttattgttttagatttattatgcttcttctggaagtattagtgatgctacttttaaaagatcccaaacttgtaactaaattctgacatatctgttactgctgactcacattcattctccgccattcaaatactattttttatccacatttttttttgttcccaaactgtaatgtacaaggatatgtgtgataatgctttggatttgagtaatatttttttttcttccaagaaaactgctttggatatttttagataatttaaacataatttaggataatgatattgctcaatctgaccacaattttaggtaaaacattaaatgtgtcaagaaatcttggcaacagagactctgcagcttgcagtggacatagataaaatgttacagagatactatttttttggttggaattactatattaaatttagaagcagaaactggtaaaatgttaaatacatgtacaattgcttttagttagcaattgattgtagcatgggttcctccaaggtttcaagcaatgggcagagtttaaaattatatcagattcgtttacttcgtttattattttacagtaaatttgaataaatcttaggggtcattatcacttaaataatactgtacctaggtctttcaaattaaaattatacctgaatgaagttgtttgtatacataaaggatatttgtgtacaattaccttttttcccccacacttgttttctttgtttttgttttttatggcaactggaaagtatttactatgggattcatttatgtctgtctttctatcataaagaattgatcaatatgtaaatatgtgatttgaaccatggttgacttacaagtgtcactacagctttttagaaaacatagccctaatatatgttaagcaggacccgggtgagccagtgggcttgcgctttatgtagagctggaagaaggccgtccatcctgtctcttgggcggacagtgtactttcctaatagggaagggaagcacaatggaaatacccctgaaccgttttattgcagtaatttttttcatatctgaaactattatttaatattttgaataagattttaaaaaataaatggcaaagatataaatctatgaaaaaaaaaag

SEQ ID NO: 18044 - DNA, 1695 bp, Homo sapiens
  misc_feature (1359)..(1359): n is a, c, g, or t
atccgcagccaactgtgtggcggtccccactttcgcctagcggcaactccctccctccctgcaatccttccttcttattccggtttccagagcacgtctccaggcttcgacgtcaccacgctgggacgtatgtgccgagggccgcggcgtctgacctcatggcgtagagcctagcaacagcgcaggctcccagccgagtccgttatggccgctgccgtcccgaagaggatgagggggccagcacaagcgaaactgctgcccgggtcggccatccaagcccttgtggggttggcgcggccgctggtcttggcgctcctgcttgtgtccgccgctctatccagtgttgtatcacggactgattcaccgagcccaaccgtactcaactcacatatttctaccccaaatgtgaatgctttaacacatgaaaaccaaaccaaaccttctatttcccaaatcagcaccaccctccctcccacgacgagtaccaagaaaagtggaggagcatctgtggtccctcatccctcgcctactcctctgtctcaagaggaagctgataacaatgaagatcctagtatagaggaggaggatcttctcatgctgaacagttctccatccacagccaaagacactctagacaatggcgattatggagaaccagactatgactggaccacgggccccagggacgacgacgagtctgatgacaccttggaagaaaacaggggttacatggaaattgaacagtcagtgaaatcttttaagatgccatcctcaaatatagaagaggaagacagccatttcttttttcatcttattatttttgctttttgcattgctgttgtttacattacatatcacaacaaaaggaagatttttcttctggttcaaagcaggaaatggcgtgatggcctttgttccaaaacagtggaataccatcgcctagatcagaatgttaatgaggcaatgccttctttgaagattaccaatgattatattttttaaagcactgtgatttgaatttgcttatgtaattttatttgcttgactttttatatgatattgtgcaaatgtttgccataggcaattggtacttaaatgagaggtgagtctctcttttgccttggtgctttggaaattaaatgtcacaaacgagtatataattttttatctgtacttttagagctgagtttaatcaggtgtccaaaatgtgagttaaacattaccttatatttacactgttagtttttattgttttagatttattatgcttcttctggaagtattagtgatgctacttttaaaagatcccaaacttgtaactaaattctgacattaaaaatctggggggttactgctganctcacatttcccagttcttcctttccgccgggccccccccaaaaatttttttctcccccccaaaaaaacaaccacaaactttttttcaaaaacccccgcccgcggctttttctccaccaacaaccagcgggggtttttttttcttatgagcgcaatcttggacagactattcaagacgttagtagtacatagacagacttttatagcacgtgttccaccacctaaccaccgcgctcttttttttttttcctcccacagaggccacacccaccaggtagtaaaaagtatgaccggcaccgcagcgaacgaatagaaggagcgcgcttttttttaatg

SEQ ID NO: 18045 - DNA, 1370 bp, Homo sapiens
atccgcagccaactgtgtggcggtccccactttcgcctagcggcaactccctccctccctgcaatccttccttcttattccggtttccagagcacgtctccaggcttcgacgtcaccacgctgggacgtatgtgccgagggccgcggcgtctgacctcatggcgtagagcctagcaacagcgcaggctcccagccgagtccgttatggccgctgccgtcccgaagaggatgagggggccagcacaagcgaaactgctgcccgggtcggccatccaagcccttgtggggttggcgcggccgctggtcttggcgctcctgcttgtgtccgccgctctatccagtgttgtatcacggactgattcaccgagcccaaccgtactcaactcacatatttctaccccaaatgtgaatgctttaacacatgaaaaccaaaccaaaccttctatttcccaaatcagcaccaccctccctcccacgacgagtaccaagaaaagtggaggagcatctgtggtccctcatccctcgcctactcctctgtctcaagaggaagctgataacaatgaagatcctagtatagaggaggaggatcttctcatgctgaacagttctccatccacagccaaagacactctagacaatggcgattatggagaaccagactatgactggaccacgggccccagggacgacgacgagtctgatgacaccttggaagaaaacaggggttacatggaaattgaacagtcagtgaaatcttttaagatgccatcctcaaatatagaagaggaagacagccatttcttttttcatcttattatttttgctttttgcattgctgttgtttacattacatatcacaacaaaaggaagatttttcttctggttcaaagcaggaaatggcgtgatggcctttgttccaaaacagtggaataccatcgcctagatcagaatgttaatgaggcaatgccttctttgaagattaccaatgattatattttttaaagcactgtgatttgaatttgcttatgtaattttatttgcttgactttttatatgatattgtgcaaatgtttgccataggcaattggtacttaaatgagaggtgagtctctcttttgccttggtgctttggaaattaaatgtcacaaacgagtatataattttttatctgtacttttagagctgagtttaatcaggtgtccaaaatgtgagttaaacattaccttatatttacactgttagtttttattgttttagatttattatgcttcttctggaagtattagtgatgctacttttaaaagatcccaaacatataattgaactcctcccacccaattgggccaatctatccccctatagaagaccta

SEQ ID NO: 18046 - DNA, 1257 bp, Homo sapiens
tgctttaagtggtggttcttgtgccatataggccattgccataaaaaaaaattagagtactggaaggaaaatattgagtcatcaaataaagtcaaattcggatttggtatatttgatgatttcatttccttttcagttttggggccatcctctgagtgaagtgaagaggaagtggcacagcctggtataaagtctagggtctggttgtagaatgtacacagcaatccattctcatctctgacaaacttgtaggacaaaaagagaaaagattcgttcagatttccaatgctgggttggagaatatgtctgggtgacaatctatgactggtttaagtttgcacaaagagaaggagacataaggaagctcagatcatgaaaacccaactttctggatagaaaaaaaaaagcctaggttttttttttttttaattagagagacaacaagaagaataagggaaaatgggaagaacagagtgaaattaaagcaaatcttggattcagattccattaaacaggaagtttccttaaaaaaaatcaaatgcttatagcaatgctgagaatttcataggtacttcatgggatctaacaagtgaagatttttctaaattgctttgtggagactaagtgctttaaattatgtattattaacttaacagacactttacatcatgagttagccaaacattcatgtttcaattgacaagggaaagaaagtgaagagatgcttgctgaaggcacaagtttgaatacagaaagctggaatataaaaaactattgacttccaatagttttcatttatcagattactacactattgtaaaaattatcttcttaagacataaattttgtattggttaaagatgtcctgaaaaaattctgtacctccttggctttcactgaagttttggggcagttcttcattaatttgggttatattttaagtccttaggaaaagacagaggccaatttagacagaaagagaaagacgacaaaaaggagaccagagagaaaagacagctggtactataacctcagatttttgactcaaatatcatatcactaaatttgatggcaatcacttcctaaagagaaacagattcagaaacattgcagatcaccaaggtatccttctttgctattccagaataggtctgttacaagaaacccagccaccaaccaaacaaccccaaacaaataaaaataaacataaatccccacacctcttttgacttggtctactcaactctttcatacctc

SEQ ID NO: 18047 - DNA, 419 bp, Homo sapiens
tcttgaactcctgacttcaggtgatccacctgccgcggcctcccaaagtgctgaaattacaggcatgtgccactgtgtctggccaaaataataaatcttatgttagctttaaggagttctgaacttagtatctgtcatgtagtaaataaataaacatgataatcttctaggaattttgggtaaataattttaaacaaattcttaatctcactacactataatctgcctcaacgttgttgttagacgtgtataatgaatattagaagtactggacaaaattccatttgatctcattttcttgaaatgagttaagttattgttgttgccacatttttcatctagaagtcattctgtaataaaactctttgtagttgttatcatctggaactgttacactggacctatggtgctataaagaa

SEQ ID NO: 18048 - DNA, 279 bp, Homo sapiens
tagagtaccattctgcaaagcctgaagtgatattcacagttttcacacttctgaaaatatccaaaaaggcaatgtagctgcttcgtgttaaactacattagaataaattgcagagactgttttccaaataatgccactttttaaattaaatgcccacatgaatgataataatttagaattaacataatttatcatagctaattagaactgaagaatcattttgcgatccaaagaattagaaactctttttgtcttaccagaatttcacagatgtttttc

SEQ ID NO: 18049 - DNA, 337 bp, Homo sapiens
atactgttttgctaaaggctctgagacatgctctctgtttcttaaaatgagaagtaatggtagagaggtgtaaaagatataccaatagctaactgagcatttcttattgaaagagaattgaaaatatattttttctggtgattcagaattatttcatgtatgttcatgtgccatgtaaaatctgtatatcttctaaaatcattttgggtaccattattatttgctctatcacttgtagtccatgtcctacattttgagaagaactgtctcatagcttatcttttctgtccctaagtgaaagtatcttgatagtaagtgttattatatgtgggaaaac

SEQ ID NO: 18050 - DNA, 451 bp, Homo sapiens
ctcttcttctttttttagagacagggtctagttctgtcacccaggctggagcccagtggcacaatcatagcttactgtaacctcaaactcctgggctcaagtgatcctcctgcctcagcatcccaaactgctggattacaggcatgagtcaaacacgcctggtcacacttctcatccagacctcatttgtccacctcccccatcccccgccccaccccacggtctgtcctataacgcccacacaacaggtcactgtttagaaagtgctacaaagttacaaacacagtcccttctgagcctcccaccaatgttggtgggtacaaggtcaaaaaaaaaaaatctcatttatgtaaggggcataggagactttttagttagagggcccaattatagtcctcctgaaaagatgccaaaagtccccttaaacacttagcagctaagattcaagaaa

SEQ ID NO: 18051 - DNA, 334 bp, Homo sapiens
ggtactgaggccagagtgtgtgtcagagacctttccttttagatgttgctcaggtaattttctcatatcccttgaggaatccctcttttttctagttcttgggcatttctaaacagtataccttggtaattgtgggacagtggtcttcctattttatattaatagatttggaaactgaggtgcaaagtagttaagtaacttgccttgaatcatccagctactgagagttaggaaatgttctttcctttgcagcatgttgcctttgtataagacttttagacttcctgttataatttcaactgattataggtcataataaaacaagcagtaaaat

SEQ ID NO: 18052 - DNA, 421 bp, Homo sapiens
tcccggtcagcacctttgccattctgcttaaattctgcttttaagaatagcaaaattcttaaaagaaaaaaaaaccaactagaggtgaaatcaagctgcactgcgaatctgactgttaagaatttcaaagacccagagaaaatgttactgtgtgcctttctagtggtcacaggctgaccaccctccgtgaatatgggattcttccttggccttaaagaagtggagaagggcatctttttcatacacctcaggggaaaaaatcaccaaaccctcaaacaaaacaaatcttcctcatttctattatcttgaaacattagcttattactttctggcattcacacaagtcactgaaaactattgcagaagactgaaactgtttaaagccactttcaataaaagttcacttagcaaaacttaaata

SEQ ID NO: 18053 - DNA, 609 bp, Homo sapiens
actttataacgctagagtagtacagagaactctcatgttgtttaggttttccaactggggacatcctgtgatctgactgttcctagtgcacaagctaatcccacccatatcctgtttgtgagtaattggatggatgcctggaaaatctagtgccagattgtatagtgcctttacaacagaaatctctagtttgaattgatttaccctctacctaaacaaacacctctcataggtgagcctctactctaaaaaggcaagattatataacatagatccctagttcttgtttccatagtcatgctttggatggtactcccattgatctggatcagagacatatgtaaaatacaatttcagggtgttgtttttctgtataactgaagcagtagattttgaattgtatacctcttcccatgaatatagaagacagctttgtaggaaaaaatttcttcttaaatcatcttttttatctaaattattaagaataggaaaataccatttgcatcattgtagtctctcttacttcttgggttctctttacaagatatcaaaatatgtttaaaaaaaaaacccggatgcatataggtgtgtgcaagcttgtcgtaattc

SEQ ID NO: 18054 - DNA, 377 bp, Homo sapiens
gaccccagttttgcagctggatgagccccaagttgctgttcccactcatacacataaaggccagagcttctgtgcccagagcttgtgccatgcagtgctcagccgtgggagacactgcagggagagaaacaggaaagacagggcagcagtgggctctgccctcaggaggtttcctttccagacagcagtgcagagccacattaaaatctatgcagaggggccgagagccccacagcaggaaaacgcagaaaggtgaccgcaagctgcccccctgtacagtggcccactgcagctctgggggtcctatgggttcttcctacagtcaccaaggccccatcgctcagtctgcaattttctcccaaactattcatgtcttt

SEQ ID NO: 18055 - DNA, 568 bp, Homo sapiens
gacccatctatcccccaactctcttctgactcctatacctttctttctattcttcgtaccatttcacttcagacgtcacctggaatactgatgcaggaggctaagctgagtctctcagggtagacagttcaacctttccatggttgttcataaatattactagggatttggaatgcatgttcccactaaaatgatgtaaatgtggttaagtgataccatattaaaatgcatcattacttgtgtgattcagacaaagtatgggttaactaggcattttgaaggcagaattaaaatactaaccaccaccactttctctgtaatagtggttgccaaccaggggtgatccttcctctctccttcagggacatttgtcagtgtctccagacatttggttggtccatctgggtggggtgctattagcatctcttgagtaaaggccaggaatactgctaaacattctgcaatacacaggatagccccctacaatgaataattatccagacccacatggcaagagtgacaaggttgtgaaactttgctctagaaatgtgtacattctttttttttt

SEQ ID NO: 18056 - DNA, 291 bp, Homo sapiens
aaaaagtagaactttatttctgacaaatctgacaaatctttatacctttagcagactttcggaaagatattctccaagcagatgattaaataaacatttttaagctctgacatttgtattatgttttttagttttaaaagtgcttttcgacatgtgaactcttagtttccagtggtgaggaaacagactcagattggttaagataactaaatcatttagtgagcatgcataaggtgcttgcccttgtgctaagcacatcagcataatgaggtgacactgttgttgttctgc

SEQ ID NO: 18057 - DNA, 384 bp, Homo sapiens
tgccagactatctctctacctctcaaagaaaataatttgcattaaaattcctttttttgttatgtaatgaaagtataaaacaagaatttgtacgttactcagtgtgtactgcagtcagatatagttaaaataatttttctgatgcgtaattttaaccaccatttctggagtacctagtatgtgcaggccaaggctttgcctatattattccctttaatcctcaaagtagccttgcaaagaagttattttcattttacagaagagtcaaggattagggggttgaagtgagctgcctagagtcacatacctaaagtccaggtggatcactatgtcttgctttttcaaaagcagttctttctactacagtacaatagtttcatgttt

SEQ ID NO: 18058 - DNA, 407 bp, Homo sapiens
tcttttttcaagctggtgactcaaaatcaggcttttggaatacaacctatcatgaagcagggactgtctatagataggcaggcagaacaagtcgttcacaggcctgccagatattaaataaaggtttagagctgtaaagtttggccttccaaggatgatccttgacaatatttgatgctatgttctataaaaagtttaaagctgataagttgtaagtacagggcttcctaagcagagccagtcaaatatgagtgtgttttatgttcaacagcgttgggtgggctcagagattcaagctgcaagctgcattccagggacagttcagacccatggctggtaatgacatcacctccacaggtgccaaattattctcctctttttttccgatataacctgcccatgctttt

SEQ ID NO: 18059 - DNA, 196 bp, Homo sapiens
cctggtagaactgtagctttattttttcctatagagaagtacatgtatgtagacaaatactatgtgcatttgaattagaagggcttgtaccctacgccaattctttttaggattttggaagtccatatgatctttcattgttaggaagctgcaagctgagaaataaaaccaacttactaatgacaccttcattggg

SEQ ID NO: 18060 - DNA, 468 bp, Homo sapiens
cccatgtagggatgagtaaagtggggtccaaggtcacagggctcaaaagtggtgactctgaagaccagacccaggcagtctggctccagaacctctccagctctacctgggagagtaaatggaatcaaggaattttggagggaggggctcagtgttttgttttaaagaggagaggcccatcggttggcaaggtggagggcattttgtgtggaccagaagtaataacacctgcaaactcctgatcaagctgagggaaggtggcctcatgatggagcttgtaggtatagtttggcagctgtgggagcacatggaggaaaagaagactgaggctggtagggggtggtgtgtatgagggtatactatgccaagctcagaaggatggctgagtccgggcatggtggctcatgcctgtaatcccaggactttgggaggctgaggtgggtggatcacttgaggttaggagttcaa

SEQ ID NO: 18061 - DNA, 2658 bp, Homo sapiens
  misc_feature (991)..(991): n is a, c, g, or t
  misc_feature (1120)..(1120): n is a, c, g, or t
  misc_feature (2552)..(2552): n is a, c, g, or t
acataagcaagggaacaccaaagtcctttgatagtgcttcagcactccttcacaaaatcaaattgaggtagtagtgaggccactgtggggatgtagtagccaatgatgtatcatttatcttgggacacacctgaaagttttaatggcaaaagctgaagttttggaaatctgtcttccttttgagctaaggctttaattctgcctcctctttgatcttcccttccaaaaagctgcctttgagaaatggtacaatttctctctcatgtttaagaggtttgtgacattagctacctggggacattattgtccatcagagaacttatataaagaaaacaaaaaaagatattatatgcacagacactgtctaatggattcttcctgtttcccactcctcttatcttccttgactcagcacaaaagtgctcaacaggccataaactcaaaagaccctcctccctgttagagctaaaaatcctgcgtgataacctttcagatgctcagttaagggcaaatttgtaactgagttttaaaacttggtgtgttaccctaagacttatcaagaaaagaagaaagagactcgaggggttttgaacaaggagttaggaataggtgaaactttttatcatgtttgttcctactgtgtggggttttgggggagtcaggaatggtatccacaagactttggcatttatgatgatattcctgccttgttccggaattcctctatttatccctttgcatgaggacagtgtcaccactgtctattgctaggccctaaattatctcaagaaagggcttaagggtggtgaaggggttgtggaattaccttcccctctcacttttccattctctcttctgccctctccctccttcctcatttcttttccctttactctccttccttcctctcttcttctcccctccctccctctctctcttccttcctttctatttttttacagtacttgctaagtatctactattgtcagtnaatgcacaatgatatgcaataatcatgatagacgtaaactgaggaagtttataagataatgggagaaaacaatttcccaaatcaaaggatcacaaaaatgcactttagcctaggcaacagtgagacgcnatcttaaaaaaaagtagaatgaacaattgtggtgaatcatttggtgaaaaggcacatgatgctataagagcataaaacaaagggatcttataaatatgtgagatttccgagtaatactatttcttggtaatacttaagaaaagaaaaaagctaaatcttaggtagtatctcatctccaccacttactatttaaacttgggcaatttgtttaagctctttgactcataatttgcttatcagtaaagcagagataataatatctacccccatcctcagtttatgtaattggaaatactaaatttgaaatatttagttgacgtacagtgagaatttaatgaaaggtatttcttatcactaagttcttatttcagtggtccttttggtcactgaaaggtgtcaaattcttgctgctatttggtttgtatattaattgcaagtgtaagaaactgaagttatacagactgaagtgagaaagggagattattctctgatgtaatttaaaagtccagtttatctgcaggtacagtttgattcaggtgttcaaatgatgtaattgggaatgtttctctgattctcttcctatgccattctctttgttcccttacttctcgggcaaagagggtctctttccacagtgaaggcttatattctattagccaagcaaacccagtggggaggaaaatgttcccttcctcactagtccctgcagacgttcctgggctggatctccttggactacccctgaacctgttgctgaactggtgctttcttctctttggctatgcttaagtctcctgcctgttcttggagaggagctagaggaggatcacgagacacccaaactacatgatctcagaaagtggggaagagtggcttcccagaggaaaattattgttattactaacaaaaagtaatagaggccgggcgtggtggctcatgcctgtaatcccaggatttggggaggctaaggcaggaggactgcttgagttcaagagtttgagaccagcctggacaacatagtgagatcccatccccacaaaaaaataaaagattagtccgacatggtggtgtatgcctgtaatcccagctactctggaggctgaggtgggaggatcacttgagcctgggagaccaaggctacaggaaggaaggaaggaagaaaggaaggaagggaggggaggggagtggaggagaggggagggcagggcagtttaggtgggaaggaaggaagggcagtttaggtgggaggattgctaggatggaaggaagggaggaaagaaggaaagaaagaaagaagtagagctgaggtgggaggattgctgaggccaggagttcaagaccagcctgggcaacatagggagaccccatctctacagaaaaattcaaaagttagctgggcatggtggtgcatgcctttagtcccagctactcnggagactgaggcaggaggattgcttgagtccaggagttcagagttacagtgagctttgattatgccgttgtactccagcctgggtgacagggagagaccctgtctc

SEQ ID NO: 18062 - DNA, 484 bp, Homo sapiens
agcaccagcccttctagattgtgtagcatttcatcaacaaaaatgactccaggagaccattcttgggtacatttttccacaaagaaaggatgtaaatgacaaaaagaagaaaggcatcggtcactgagagaaggcgtgtgacttctagatttgcaagcagggaaaatgaaagcagaattgccaaaaaagagaaattaaagtagggttgaggagtccaaaaaacagataagggggcgagagggacaaaggggcacgtttgcggcttggggagctaaaatgctttgcaaagacccatgaagcccaagctgctgtttgtttctaacagtgggtcattaaaatcctgtgattgctcaggtggtgggatgccctagtgccctttcattaaagtctgggaaaatctgaacagtgttgtgatgaaggctgctcccctaccctcgcctccccaggtctcctgagtttcaatttaatgagatttttactgcgt

SEQ ID NO: 18063 - DNA, 384 bp, Homo sapiens
acactttagagaagcagcatgctcaaatcacatagatggtaggtgggaaggtaggcttgtttttcaacactgtaagatcttgggcagccataaaaaagaatgagttcatgtcctttgcagggacatggctgaagctggaagctatcattctaagcaaactaatacaggaagagaaaaccaaacaccacatgttctcactcataagtgggagttgaacaatgagaacacatggacacacggaggggaaaatcacatactggggcctctcgatgggtggaggacaaggggaagaagactattaggacaaatacctaatgcatgcggggcttaaaatgtagatgatgggtcaataggcgcagcaaaccaccatgacacatgtacacc

SEQ ID NO: 18064 - DNA, 255 bp, Homo sapiens
ggaattggttagacaacatggaagcaaagctgtaatcatggatttcattctttgggttattgagcttcatttgcaagtgatcaggtccatggttatacacatatattgcaaatttgagttgtaacacatgcctaccagaggacaaataagtatatgtcctgccaatacctggtaagaggtttcttcattgacaacacatatgtagggaaattcttacttgcaatggattaaaaacgtattttgtcttggaaacac

SEQ ID NO: 18065 - DNA, 202 bp, Homo sapiens
gctataattgctgcttctcactatagaggtgcaaagagggcagtggtcattgttgttgtgcctgccaccattactgcaagcccctcctcctcctctggatgaagtgatttccaggagtacttaaaggaccagtccccctttttccctttgggagccagacattcagtactcatacattccaaagcaactgcttatacaggga

SEQ ID NO: 18066 - DNA, 490 bp, Homo sapiens
gcaattcatccagctaaatagcctctaatgctatcatgaatgaagactatagaggtttatcaagatgaaaatagcccattaagaattgatctgaaccagtttagagaagcagagcctgagacctggcctgtgcagctttggctagtaaaagttcacttggtgctgggcatataccagctccacaggccccaactttattagtgtggagataagctgattaggtcctgtcaatcaaaggtgcccatatctcaattgagagacacacactctctctcgatttttctttaagcattgaagcaggcaacaaagaaagagatgtgtggtatgcatccctacggttgtcaccatgcagggtgcaagggtcctgtgatgatgtggtgactgtattaaagagtacatcaatttgttttaaagtgttttgattttttatggtggcattaagagagagaacattgtggttgcagctttactagaaagcaaagagttctag

SEQ ID NO: 18067 - DNA, 409 bp, Homo sapiens
ggcacgagggtaggcgctgaggctgcagagactcgctgtatcccccaggctggagtgtagtggcgtcatctcagctcactgcaacctctgcctcccgagttcaagcaattctcctgttgccttggtctcggggtcgctgtaggcgctgaggctgcagctatcatggtgaacttacttcagattgtgcgggaccactgggttcatgttcttgtccctatgggatttgtcattggatgttatttagacagaaagagtgatgaacggctaactgccttccggaacaagagtatgttatttaaaagggaattgcaacccagtgaagaagttacctggaagtaaagactggctagattatcgaatgttcacattttaaagttctgagagaaataaaaacatgaagaatctgaaa

SEQ ID NO: 18068 - DNA, 724 bp, Homo sapiens
acagtgacattattgaatatagttttcttttttctctcatatcttttaatttcctttctaaatttagttttcagtaattacagctttacctaaagaattccatttctggcaaaattgtattaaatttgtttttgcattgtgagaggttctaaatatgttttacacaagtaaaagtcctaaatgagagccaggtgcagtggtgtatgcctgtggtcccacctctccagtagctgggataacagacgcgcaccaccacacccggctaatttttgtgcttttagtagaaatggggttttgccatgttggccaggctggtctcgaactcctaatctcaagtgatctgcccacctcagcatcccaaagtgctaggattacaggcatgaaccaccgcacctggcccagatgcaatttaaaagctatttcaaaaaaaaaacaaagcagttgtatttctgataatttttttttcttttagctatcatggtgaacttacttcagattgtgcgggaccactgggttcatgttcttgtccctatgggatttgtcattggatgttatttagacagaaagagtgatgaacggctaactgccttccggaacaagagtatgttatttaaaagggaattgcaacccagtgaagaagttacctggaagtaaagactggctagattatcgaatgttcacattttaaagttctgagagaaataaaaacatgaagaatctgaaa

SEQ ID NO: 18069 - DNA, 338 bp, Homo sapiens
ggtcccgaggtcgcagcttccactggcgcgggttgagttccctgttgcccttggtctcggggtcgctgtcggcgctgaggctgcagctatcatggtgaacttacttcagattgtgcgggaccactgggttcatgttcttgtccctatgggatttgtcattggatgttatttagacagaaagagtgatgaacggctaactgccttccggaacaagagtatgttatttaaaagggaattgcaacccagtgaagaagttacctggaagtaaagactggctagattatcgaatgttcacattttaaagttctgagagaaataaaaacatgaagaatctgaaa

SEQ ID NO: 18070 - DNA, 461 bp, Homo sapiens
cgtagagatgtgacccagtgaccgcccgctaaccggactggagagaagaccggcccggatcccacgcctggcctgaagcagggaagacgctgcctcccctccgcgagcagcttacattcgtccaagttccagccttctgtcttctcgctaacctcgctctcttccaaatcgcaaatcctcttgagccgacaccgttgcgcctaaatgatctatcatggtgaacttacttcagattgtgcgggaccactgggttcatgttcttgtccctatgggatttgtcattggatgttatttagacagaaagagtgatgaacggctaactgccttccggaacaagagtatgttatttaaaagggaattgcaacccagtgaagaagttacctggaagtaaagactggctagattatcgaatgttcacattttaaagttctgagagaaataaaaacatgaagaatctgaaa

SEQ ID NO: 18071 - DNA, 694 bp, Homo sapiens
  misc_feature (378)..(378): n is a, c, g, or t
  misc_feature (393)..(394): n is a, c, g, or t
  misc_feature (401)..(401): n is a, c, g, or t
ggtcccgaggtcgcagcttccactggcgcgggttgagttccctgttgcccttggtctcggggtcgctgtcggcgctgaggctgcagctatcatggtgaacttacttcagattgtgcgggaccactgggttcatgttcttgtccctatgggatttgtcattggatgttatttagacagaaagagtgatgaacggctaactgccttccggaacaagagtatgttatttaaaagggaattgcaacccagtgaagaagttacctggaagtaaagactggctagattatcgaatgttcacattttaaagttctgagagaaataaaaacatgaagaatctgaaaagcaaaaaaaaaaaaaaaaaaaaagaaaaaaaaaattttngggcggcttgggccnnggaaaangtttttaaacacattctgtttgggggccgggggccccatgtgtgtatagggacacatggggcaaaagggtgtcccctaagggaaacccggggcaacgacaaaagggcggggaggtcttccacacaatataaaaaagacgcgccgggggggaaacccgaggggtggtgtttttgagacaattctcccgaaggagggaggttccaaagagggcacataaggggagtcttttacaacagggggtgtcccaaaggaggacgtcagatattcaaaattagccccgtgctcgtggggga

SEQ ID NO: 18072 - DNA, 691 bp, Homo sapiens
acagtgacattattgaatatagttttcttttttctctcatatcttttaatttcctttctaaatttagttttcagtaattacagctttacctaaagaattccatttctggcaaaattgtattaaatttgtttttgcattgtgagaggttctaaatatgttttacacaagtaaaagtcctaaatgagagccaggtgcagtggtgtatgcctgtggtcccagctacttgggaggctgaggcaggaggaatgcttgagcccgggagttgagagctgtagtgcctgtgaatagccactgccctccagcctgggcaacatagcaagaccttgtctcttttacaaaaaaaagttccaaaacaacatgaggagggtgcaaacaatcagctgttgcaggtagaatttttttacataccatctctgtttctctgctctgtatcgtatcacatcactattgaagctagtagtaaaatgtaataaatagacccagtgtggtgtaattttatattaatcattgtcccgtatgtaatcttcatcaattagattttaaagtattatactacattctgatgccaggcaaacaaagaggcgtattaggcttttaacatctattacatctatgtctatcatcttcttgtttcagatgcaatttatttattttattgagatggagtcttgctctgtcgcccaggctgaag

SEQ ID NO: 18073 - DNA, 282 bp, Homo sapiens
cctcagcctcccaaagtgctgggattacagctatcatggtgaacttacttcagattgtgcgggaccactgggttcatgttcttgtccctatgggatttgtcattggatgttatttagacagaaagagtgatgaacggctaactgccttccggaacaagagtatgttatttaaaagggaattgcaacccagtgaagaagttacctggaagtaaagactggctagattatcgaatgttcacattttaaagttctgagagaaataaaaacatgaagaatctgaaa

SEQ ID NO: 18074 - DNA, 797 bp, Homo sapiens
  misc_feature (481)..(481): n is a, c, g, or t
  misc_feature (496)..(497): n is a, c, g, or t
  misc_feature (504)..(504): n is a, c, g, or t
ggcacgagggtaggcgctgaggctgcagagactcgctgtatcccccaggctggagtgtagtggcgtcatctcagctcactgcaacctctgcctcccgagttcaagcaattctcctgttgccttggtctcggggtcgctgtaggcgctgaggctgcagctatcatggtgaacttacttcagattgtgcgggaccactgggttcatgttcttgtccctatgggatttgtcattggatgttatttagacagaaagagtgatgaacggctaactgccttccggaacaagagtatgttatttaaaagggaattgcaacccagtgaagaagttacctggaagtaaagactggctagattatcgaatgttcacattttaaagttctgagagaaataaaaacatgaagaatctgaaaaaaaaaaaaaaaaaaaaaaaaaaaaaaaaaaaagcaaaaaaaaaaaaaaaaaaaaagaaaaaaaaaattttngggcggcttgggccnnggaaaangtttttaaacacattctgtttgggggccgggggccccatgtgtgtatagggacacatggggcaaaagggtgtcccctaagggaaacccggggcaacgacaaaagggcggggaggtcttccacacaatataaaaaagacgcgccgggggggaaacccgaggggtggtgtttttgagacaattctcccgaaggagggaggttccaaagagggcacataaggggagtcttttacaacagggggtgtcccaaaggaggacgtcagatattcaaaattagccccgtgctcgtggggga

SEQ ID NO: 18075 - DNA, 787 bp, Homo sapiens
  misc_feature (739)..(739): n is a, c, g, or t
acagtgacattattgaatatagttttcttttttctctcatatcttttaatttcctttctaaatttagttttcagtaattacagctttacctaaagaattccatttctggcaaaattgtattaaatttgtttttgcattgtgagaggttctaaatatgttttacacaagtaaaagtcctaaatgagagccaggtgcagtggtgtatgcctgtggtcccacctctccagtagctgggataacagacgcgcaccaccacacccggctaatttttgtgcttttagtagaaatggggttttgccatgttggccaggctggtctcgaactcctaatctcaagtgatctgcccacctcagcatcccaaagtgctaggattacaggcatgaaccaccgcacctggcccagatgcaatttaaaagctatttcaaaaaaaaaacaaagcagttgtatttctgataatttttttttcttttagctatcatggtgaacttacttcagattgtgcgggaccactgggttcatgttcttgtccctatgggatttgtcattggatgttatttagacagaaagagtgatgaacggctaactgccttccggaacaagagtatgttatttaaaagggaattgcaacccagtgaagaagttacctggaagtaaagactggctagattatcgaatgttcacattttaaagttctgagagaaataaaaacatgaagaatctgaaaaaaaaaacctttagnaggggtaaattcgagcttggcgtaaacatggcatagctgtttctgggt

SEQ ID NO: 18076 - DNA, 622 bp, Homo sapiens
ctagtagtcttttttttttttttgagacagcatcacgctctgtcgtccaggctagagtacagtggtgtgatctcaggtcattgcaacctccgtctcttgggctcaagcaatcctcccacctcagcctccgaagtagctgggactacaggcatatactaccacacccagctaattttttgattttttgtagagacagggttttgccatgttaaccaggctagtctcaagctcctaggctcaagcgatccatccgccttagtctcccaaagtgctgtggttacaggcatgagccacctagtagtcactctataaaagtaaattttcttctccctttgcctttttttttctttcttttttttctgagacagagactcgctgtatcccccaggctggagtgtagtggcgtcatctcagctcactgcaacctctgcctcccgagttcaagcaattctcctgcctcagcctcctgagtaactgggactacaggcatgtgccactacgcccacctaatttttgtatttttagtagagatggagtttcaccatgttggccaggctggtctcgaactcctgaccttgttgtcgtccacccgcctcagcctcccaaagtgctgggattacag

SEQ ID NO: 18077 - DNA, 482 bp, Homo sapiens
  misc_feature (442)..(442): n is a, c, g, or t
  misc_feature (451)..(452): n is a, c, g, or t
  misc_feature (460)..(461): n is a, c, g, or t
ggcacgagggtaggcgctgaggctgcagagactcgctgtatcccccaggctggagtgtagtggcgtcatctcagctcactgcaacctctgcctcccgagttcaagcaattctcctgttgccttggtctcggggtcgctgtaggcgctgaggctgcagctatcatggtgaacttacttcagattgtgcgggaccactgggttcatgttcttgtccctatgggatttgtcattggatgttatttagacagaaagagtgatgaacggctaactgccttccggaacaagagtatgttatttaaaagggaattgcaacccagtgaagaagttacctggaagtaaagactggctagattatcgaatgttcacattttaaagttctgagagaaataaaaacatgaagaatctgaaagatgcggccgaagttttaatttttgtctcaaanttttttttnntctttttnnttttttctttttttttttctt

SEQ ID NO: 18078 - DNA, 294 bp, Homo sapiens
taatgtgaaaggagttgttcacaggttaaaagcaatcacaaatgtcatggtaataaaatggtcttttttttccagttgcacaagagggctttgaaactagttcgttttgccctttattcattaaagtgtaattcatgccttatactctgtcactttcatttgtcgagatggaccaaaagctttggaggtggcctagaaaaaatatctgtggcccacttacaaggttgcttttcttgggaccatttttgacttcgctaataatgtaatagggtgaagctgattgttcttttgaat

SEQ ID NO: 18079 - DNA, 502 bp, Homo sapiens
ataattatgtattacgatatctaaaaactacataaaatatttgtatctattaaaatacatatacaagttaacattttaaaatagagttttatacacaaatatattagcaattcctatatagtatatatgtgataccgcatatttatccagaattcagaaaattcaattgtttttatttaatatatatccctttaatataataagagtgtaagtatattaatgattttaaagatccagaatatcatccgagtgcagtggctcacacctgtaatcccagcactgggaggtggaggcaggcggatcactttaggtcaggggccaacatggtgaaacctcatctctactaaaaatacaaaaattagccaggcgtagtggcgcatgcttgtaatcccagctacttgggagcctgaggccagataatcccttgaacccaggaggagaggctgcagtaagccaagatagcaccactgccctccagcctaggtgacagagcaagactccc

SEQ ID NO: 18080 - DNA, 519 bp, Homo sapiens
ttctacaagaacctgctaaggtcagtcacatctctcttcacctgccttgagtgcttcataatcacgtggctttttcaggaatttcagtgatcaaagatcttctaattctgtgctaccactgacgtttgcacttaatacagagccatttgctctgtggccacctgataaatatttgctgatgataagacaaaaatatacacgtctattaagaggtctgcaatgtctgaacacagtgagggagaaaaatccttagagaaggtcgcttaatctcaattacccaaagtcattgcttggcagaatatctgtggtctgttatccttagtgaagtgacaggcttggagaagcagggtaatgtggggaccatgtgtgctatataaaccaaagactgatcaccatccaaatgaacacatgtttcttccattgactagttgaattttctcccaatgttctcataaataaaagcgaaggtgggttgcatggttgaatgaaaccattaaaccttatggggttttctgttgc

SEQ ID NO: 18081 - DNA, 444 bp, Homo sapiens
ctttttaatttttatagtcataggcttatttaaaaatgttttttggtttttattctgaagtggtcagaagattaaatagagtattccaagagaagcactgagagcggtacctgctgtgtaatatgtgctatgtaaatgttaactgttcatttcttattatgtcatcagtgttccagggtagaaaatgcataacctggctgggcacggtagctcacacctgtaatcccagtactttgggaggctgaggcaggcagatcacttgaggtctggagttcaagaccggcctggccaacgtggtgaaaccccatctctgctaaaaacacaaaaattagccaggcgtggtggcgggcacctgtaatctcagctactcaggaggctagggcaggagaatcgcttgaacccaggaggcgcactctgcagtgagctgagatcgtgccaccgcac

SEQ ID NO: 18082 - DNA, 212 bp, Homo sapiens
gtgtttcttaaagtagtttccataaaacattagttacatgatctgttactagatatcatgggaaaaatgggttccaaggtcaaataagtttggaaaactcaaatgacacattttaagcagacttgcagaagtgttttttaatttcaaagatctcaaaggctttagtctgctgatatccattgtgactcttcaagatgacagtatagtctata

SEQ ID NO: 18083 - DNA, 512 bp, Homo sapiens
  misc_feature (457)..(457): n is a, c, g, or t
gcactgtaggccaggagttcaagaccagcctgggcaacatagtgagaccccccccccatctctacaaaaaaataaaaaaatcttcccgttgctgtatgtggagcccctctagattgtcagtgatagaaaccacttcaaactggctcagccctaaaatagcgatgattttgtggctcacgtaactgaggattccaatgggcacagctggttgcaggccccgctggacccagctctctgctgggccccaggcacttgctggcagcttcccacccactgtcagagcctgtccccccggtggtggtctcacaccatcttcacccctcaactccagggggtgacgcttcctgggcccacctggggttccttgcgcctttccctgaaccaccctcggtgaaccagggttgggtgaccagacctgggaggttggggttgccttgttggagcctgttgggagganggggagaaggttggttcccttgtttgggttgggcagggggcgcgtcttgtggagt

SEQ ID NO: 18084 - DNA, 392 bp, Homo sapiens
ggaagcagacctaggtttgagtctcttactgatcctgtgacctagggcaagtaacttgggctctgtgaacctcagtttgctcatctataaaatgggaatggtaacactgtctcctggggttgtgtgaggatgagggaaatgtgtaaaccccaaacacagcacctggcacggagtgggtgtaagaccccgttcccccttctttctccctccccaacagtgccctgactcatggttgacctctgaggacagcatttatttccagactttcactatcaagaactctcctttttattatttttcccatgctttgggagattttgatcccaaattgcatgttttaagtcattattaatttatctcccattttttattaatcaaagacacagatagct

SEQ ID NO: 18085 - DNA, 387 bp, Homo sapiens
ctaacattgtgcagaactgtgttctcagccagtgctatctaatggaaatagaaagcaagccacaagtgtgggctgcatacgtagttttcagatttgtaatagacacattaaaaaagcaaaaagaggccgggcatggtggctcgtgcctataattccagcactttgggaagctgaggcaggaggatcacttgagcccaggagttagagaccagcctgggcaacaccctgtctctattgttatttttataaaatttaattgtttaaaaaatacgggaagtaaaaagaaacagatgaaattaatttaaacaacatagaactacacaggggttaagggcactagctccctgtgcagttgaaagtccatgtatattttctgaaagtagactc

SEQ ID NO: 18086 - DNA, 501 bp, Homo sapiens
aatcaaaatgacaatgacctaccacttctcacctattaggatggctataaccaaaataatggaaaataacaagcgttgtgagatgtggagaaatctaaacaatacttgtttatgttttgtctgcatattcactgtgctaatctattccgccattgatggtgggagtgtaaaatagtgcaagcactctggaaaacagtttgacagtacttcagaacatgaaacacagcaatactatatgacccagcagttccactcccaggtatatatccaagagaattgagaacataggttcacacaaaaacttgtacatgaacattcataccagcattattaataatagccagaaagtagaaacaacccaaatgttcttccgctgatgaatagataagcaaaatatagtctgttcatacaatgggattttactcagccataaaaaagaaagaagtactaataaatgctacaacatggaagaaccctgaaaacactatgccaggtgagaga

SEQ ID NO: 18087 - DNA, 859 bp, Homo sapiens
cagtttcatgtgcttaagcaactttgcttcaggtcacaccctacgggacacccacggcagcctgccgcctactaatcatagagcccttcgtgttccttttttgtctttttcttaaccaacaatgggtcatttagcaggacatttatttcagtcctaagttgtattatccctggtaatttgcatataccattattaaagtgtggcagtcttttgtaattattgtcttaatctagtgaaaaataatatatctgtatatctggagagaaggctgttctctggatgcagctgagcacttgcatgcactcgatgaacgggaataggactgcatgaggctgacctggatttgacaaccgcaccaggacaaggccgcgtgctgccctgaacagtggcccttgtgctaaatacgaatcctctctctcccacaggcatagcccgtcacctgcgtctggtttttgcctcctcattttcttcaattttcactctatttatagttgagaaccttccatttccccctggttgaaatacattagttgcctatggaaactgcgatccccccggtgtggatggagctgaatgacacctacaattgcagagcacggttggcgttgccagggctgggaaatgggcgtcgtggctggagagggcactgaagggcacagatgagaataatgacagcacacagcacgaccgtcaggaaccgacgcagcaccactgggtcagaagttgtggaagaagccatgggtaacagaagccccccatgccctacaccacacagaggggcgggtcccatcagaggcctaacccctggagggctctcattttcaaaacataaaaaatggagctatagctggtacttgca

SEQ ID NO: 18088 - DNA, 473 bp, Homo sapiens
cagtttcatgtgcttaagcaactttgcttcaggtcacaccctacgggacacccacggcagcctgccgcctactaatcatagagcccttcgtgttccttttttgtctttttcttaaccaacaatgggtcatttagcaggacatttatttcagtcctaagttgtattatccctggtaatttgcatataccattattaaagtgtggcagtcttttgtaattattgtcttaatctagtgaaaaataatatatctgtatatctggagagaaggctgttctctggatgcagctgagcacttgcatgcactcgatgaacgggaataggactgcatgaggctgacctggatttgacaaccgcaccaggacaaggccgcgtgctgccctgaacagtggcccttgtgctaaatacgaatcctctctccctaccgcatcacccgttcggcttcctcagagtcacctgcaactgcagctgctggt

SEQ ID NO: 18089 - DNA, 282 bp, Homo sapiens
acaccatctcctcagaaatctcttatgtcttattggcatttactttgagatagagagggtggatggaaaggtgaaatctaaaagggcatgagcttacccatgatcaaatagctcctaggtagcaggaataaaaatgtacccagtttcctgactcaggggttcctgattgcctgctttatgtttttttcaatgattctccatcactgtttgtatacgtgtaatttttaaaaatttgtttaacttagttcatgtttttctaggagatgctagtctctgatagat

SEQ ID NO: 18090 - DNA, 647 bp, Homo sapiens
cctgccccagtatggcctcattcatggtagacaattgaaactctcaggaattcctccctgcccaaaagtagctagccctcatgtccgctgctatgcaggagggaggtatgtcctggtagtcatcaaatggtgtgcttgaaacacagtggcctgctggaaatggtggctcacacctgcctgtaatcccagcactttgggaggccaaggcaggaggaggaccctcatctctatgaaaaactcaaaaatcatccaggcacggtggtgtgcatgtctggtcccagctacttgggagcctgaggtgggaggatcccttgagccttggaattcaaggtggcagtgagctatgatcacaccactgcacccagcctcagtgacagagtgaaatcctgtttctaaaaaacccaacaggccaggtgcggtggctcacacttgtaatcccagcactttgggaggccgaggtgggcagatcacctgaagtcaggagttcaagaccagcctggccaagatggcaaaaccatgtctctactaaaaattcaaaaattagccggccgtggtggtggacatctgtgatcccagctacttagggggctgaggcaggagaatcgcttgaacgggggcaggtcggggcagggtggcaactccctctt

SEQ ID NO: 18091 - DNA, 538 bp, Homo sapiens
gggcacagtatttcaataaaatacaggtagttaagtaaaggtaatttctagttgagtacataactgagacagaaaatatgtgcatagcaattttaaggtatgttaataaaaaagataaagaatttactaaaattaaattgcaagaattctgcaaccatattttctttgcaatttaattttctgtattttaatttcttgggatatatttatatttggcagtataggatggaattttcaaaaacaatattgaaaagggctgggcatggtggctcacacctgtaaatcccggcactctgggaggctaaagcagaggattgcttgagcccaggagtttgagaccagcctgaacaacacagcaagactctgtctctacaaaaaacaaaaaaacttatctaggtgtggtagcacatgccggtagttccatctacatgggaggctgatgtgggatgatcacttgagcccagtaagtggaggctgcagtgagctgtgatggcactactacactccagcctgggtgacagagcaagaccttgtctca

SEQ ID NO: 18092 - DNA, 417 bp, Homo sapiens
tgtggtggaggaaagaaaaagatggggacaaaggaaaggtaggagtgagaataaagcacgcatggtgaaccacaaataaaaatcctccgtccccactcaagttgattatgcagagcagtaattctaaatagcctctttcaatcagactgtggggcactcactactgcctccctgacccagggcccccaaacgtgctgaaatccacagctctgtcgttcttcttcaccactgcagatgttagtgtggccattcatttctcttactccacccggcatccttccagccacgggctgcgatgctcagacgagctaagacgatgctcagcgtttgtcttagctcctccaggagagaccccagctggagctgggcgtgccgctctccggttccctcaggctaagccggcagcagctgcgtggt

SEQ ID NO: 18093 - DNA, 420 bp, Homo sapiens
ggcctttggtatccagtaaaataaatggagagacgctcagtaaatgtcttttaagtgagtgtcctaataaatgttccctaaagtgtttatttgagtcccgtgtcttatatcatttgacagaaccacacaatttgggttctgtgaggtggatgctagggtctaggtgagatcgttctggttaggatttcctataggcatgtatcaacagagccaaagcacaattattttctccaataaaatagaacttcatttaagcacataaatacaaacataaaggaacattctgtgtaattaaaagacacaatatagagctcaagctaaagacattcatgtgtctaggtgtagttaaatgcctcactaacattcagccattctcagtcactgtaatccaaacccaatatttccctgggcttaagtaga

SEQ ID NO: 18094 - DNA, 888 bp, Homo sapiens
aatttatttccatatgttttattttactgacataataaatgtgcatatggtctgttcccctctttatggcctaattgctataaatagcctagagccctttccactgtactgaaccatcatgtattacaaggttgtttattcttgttttctgaagaagcacgtggcattaaaaattctggaaatgagagtttagaattcaatgaaaagtatactgtgaatattccctatgcataacattgcaacatattaaaaaatatatatttagctgtagtcacatagggaaaaggaaatgtccaccagtttatgttcattcctggattaaaacatatacgaatgacaaagacaaaattaaaaccgtttaaactagatgtattacccatgctcagagggagctacaggaaattctccttaatggctgtttattcttacatttgtttggaatgtggatgtaggagggccaagggcatctctaggtctttagcttccagaaacaaacaagcaaagaagaaaaaattaaaaaggaaaagtgagcaaggggacagtgtttgagggaaggattatttaggaggataattttttgaaaaatgaacacaacacgccccttttagttaaaagtccctgactgtgtcctgtgtcaggcacatcttagatgcatcccagaatgcagaaccaaaggtttctttgtggtcatcaagcaccaccaaaaaccagggatatgatgtgattcatgaagctaattattggcaaagctgagtctgatacttatgcctctaactgctaatccagtgctttgtcaatccttgctctccaacatccattgtagcatttctgatggctggaagccatatttggaggattatttttacaataaaagttgtcatttttaga

SEQ ID NO: 18095 - DNA, 648 bp, Homo sapiens
agaaaatatgtggccctcaaccaagcaagaagccggtgaaggctgggttgagaagaaacaggaatgtgagaagatagatcatcgtcaccgctgccctgtggaagctccgcgcgattatcctcaccactgccctgtggaagctccgcgccttactcagtcaatctctaccacacccttactctgtgtcagcggtggtactaggcactgaggaggagtccaataccttcctctgaaagagctggaattctagccctgcattgtccaacataactttttttttttctcagaaaagtttccataatctttcttccctcactctgttgcccaagctgcagtgccgtggtgcagtcatagctcactgcagtctcaaactcccagacccaagcaatcctcttagcctctcaaggagctaggactacaggtgcatgccaccacacccagctgattgtttcatttcttgcagagacggagtcttgctatcttgcccagtctgggagaactttttgtgatgatgggatattctacatcttcactgtccaatatgatatccagcagacacacgtggctatttccgtttaaatttagaatatggaaatgtaaagacattaagatgaaataaatgtaaaagttcggttcctcaaaaacact

SEQ ID NO: 18096 - DNA, 579 bp, Homo sapiens
gccaagatcgtgtcactgcacttcagcctgggcaacagagcgagactgtatctcaaaataaaaataattgaaatagccacatgtagctatagaggctgccttacacagcacacctctagaagggaaactaagtggtatagttgacatccttaacttccctgttaatattaaaggccggtattggtggcacttaaggattggaatgggtaaagaacttcccagcactgtacagttcttttaaagcacaaagcttgggagaattaatatatgcaggataactgaacgcaagagacttgtggaatgcagttctaacctgataattgtgtgttaatcgggagtaacaggacaggccgttacggttggttacacctacttatgctagatgcataatgtttggagccttccccactgatgagaagcaatttatgatcttgtgctagaaagttaataatgcttcacagcatctttttgagaggttgattagaaaacacacacatacacgttggtagtcacttgtgggtgaagcctgaaggggctatacaatttattttctttcagattgactgatggctttatgga

SEQ ID NO: 18097 - DNA, 267 bp, Homo sapiens
atatttggcatctgcctgggtgtctagaagaaaagatggcaaaaaagcaaagcagtgcaaaaggaggtgtgcacaggtcctgcctggtcgcctgaaatccattctcagatgccaaacatgcttcagacagaggcattctccaagaaccagcacactggcactcttagaagaggccttaatgtgatgccctgttctacacaaggataataaccatcccccatagccaccccccacctacagaaaagaaagagtaaataccctgctttt

SEQ ID NO: 18098 - DNA, 383 bp, Homo sapiens
gggtttcaccacgttagccagcatggtctcgatctcttgacctcgtgatccgcccgcctcggcctcccaaagtgctgggattacaagcatgagccactgcacccagcccttctggctctttttaaatgtcagatattgataactcccagactgaattaagattttatatgtcagatgattaactatcattttgagttgttgcttagttctctgcttgcttggcaacaggtcagtttccatggtattgccatttttgtaccgcattcttagtggagctgagaggttgggggtgaggctacagggccgaactctataaactagaatagctaaacttttatccagtttggtgtataaaattttttgatatacagctcaggaaaagc

SEQ ID NO: 18099 - DNA, 4407 bp, Homo sapiens
tgggggcgtcctccttcgtccccgcccggctgtcaagctgtgttctagcggccgagggaccgaggggggctaagaaagggggcgcccagccatgcagaggcaaaaaggcgctgcggaacggggtccccgtcgccagtgctgaggcaggaggtcggagccacaagtgaggggctgggaagcaggacccagcacgggcgtcttggcaggcggccgggcgcagggccaggctgctggggacgctcagggctttccacccaagccatgggcgctgtcgggcactcgggggtcccctcgtggctccggccactcggcgtgggcattacgttggcttcacatcgccatccagcctcgaagccaacaggactgaaaaatagcttcggccaaacgttctcctcccgctaaggagaggggtcgagtgcgtcagcccgaggggactggagagggatgccctagccctcgaggggcggaggacccgcggttgaaggaggcagcgggagcggagagcgccctccttgaccatcgaatgcctccttctgtgtttccattcctgtcgagtgggctgggccacgctgaccaccctggaggagggacggacgacgctcggcgggctctgaccgtgccgccttcttgtggctgctgactgggatccaggagggagtgggcatggggcgcagccgcgcctccctccctccccgcctcccgggcgccggggttggcgatgtggagacgtgaggggacccgtcggctgctccggcttctccaggactccgccaggcgcccgcgcgtccctcctcacccggaggaggagaggctccgcgcggggctccgaggcgggcggcgcgcggagccggagtcccagcctcgccatgggacataacgggagctggatctctccaaatgccagcgagccgcacaacgcgtccggcgccgaggctgcgggtgtgaaccgcagcgcgctcggggagttcggcgaggcgcagctgtaccgccagttcaccaccaccgtgcaggtcgtcatcttcataggctcgctgctcggaaacttcatggtgttatggtcaacttgccgcacaaccgtgttcaaatctgtcaccaacaggttcattaaaaacctggcctgctcggggatttgtgccagcctggtctgtgtgcccttcgacatcatcctcagcaccagtcctcactgttgctggtggatctacaccatgctcttctgcaaggtcgtcaaatttttgcacaaagtattctgctctgtgaccatcctcagcttccctgctattgctttggacaggtactactcagtcctctatccactggagaggaaaatatctgatgccaagtcccgtgaactggtgatgtacatctgggcccatgcagtggtggccagtgtccctgtgtttgcagtaaccaatgtggctgacatctatgccacgtccacctgcacggaagtctggagcaactccttgggccacctggtgtacgttctggtgtataacatcaccacggtcattgtgcctgtggtggtggtgttcctcttcttgatactgatccgacgggccctgagtgccagccagaagaagaaggtcatcatagcagcgctccggaccccacagaacaccatctctattccctatgcctcccagcgggaggccgagctgcacgccaccctgctctccatggtgatggtcttcatcttgtgtagcgtgccctatgccaccctggtcgtctaccagactgtgctcaatgtccctgacacttccgtcttcttgctgctcactgctgtttggctgcccaaagtctccctgctggcaaaccctgttctctttcttactgtgaacaaatctgtccgcaagtgcttgatagggaccctggtgcaactacaccaccggtacagtcgccgtaatgtggtcagtacagggagtggcatggctgaggccagcctggaacccagcatacgctcgggtagccagctcctggagatgttccacattgggcagcagcagatctttaagcccacagaggatgaggaagagagtgaggccaagtacattggctcagctgacttccaggccaaggagatatttagcacctgcctggagggagagcaggggccacagtttgcgccctctgccccacccctgagcacagtggactctgtatcccaggtggcaccggcagcccctgtggaacctgaaacattccctgataagtattccctgcagtttggctttgggccttttgagttgcctcctcagtggctctcagagacccgaaacagcaagaagcggctgcttccccccttgggcaacaccccagaagagctgatccagacaaaggtgcccaaggtaggcagggtggagcggaagatgagcagaaacaataaagtgagcatttttccaaaggtggattcctagcaaggattgtaaattcttggaagcaacggggagcttccatattcccaccagagtgtgggaatgctgtggccatgtgattgtatgatctccttgcaactcagtgtgagttgattcctccaatatgggccagatgcttttgaatgatagggaaatctacataaaatccagtgtcctctttattgagggagtatatgtatccatctcagtgatccatgtccttagtgaagtccacattattctctgtggggacaagagctgggcagttttgaatgggtcttgaggtgggtaccccatgtgcactttctgaggatgcctcacttccctgggctctgcagagaacacacagagagaagactttcagagctcacaggagcagggagcaggagcactctaagggaattccaagatcatgatggagcatggtggctccagagaaaatgcctgtttgatgaacttaaacatgtcaaacattttctgttgagaaggtagggatttggcgtcttacactgtttctctggaagccccagtcatatgactcactgtttctcctgatacccttcgtccctttcattgggatgtaggtaaggaatgaacgattcctcacctatggtacacatggcgatagatgtgcccgggagtaagggagatattttgtccttgataattctgattttcccttggcatcaccaacgcctcagagagatacacctgcaccctccagtcagggtcagtgttggctggaaaacactgaaaagtcttcgctctgtctttcaccttaaattgtgttttctcaacaaatgagagagaagcttacgggggagatgcctgagagatgcctatggcgctgtagtttttttttcttccctatgatctcacatgaaaggtgctatgtaacaaccagtatgagtcaaatatattgaaaaaatcatcttatgcaaactttaggaattaaaaggtatttttaaaatggagagttagtgtaagctgggtcctttggaaacatcaaactgaaaaggcctgatttggaaaggtgactctgcccaaaaggttggcaagaatctgacaaagatggtttccttccgaggaagactccggaactcaggtgtggccagtctccttttcagtctgtttgtacagctgcggttctctcttaattttggacacagaggaggaacagaacagggagaaataatcattgtagagtgccaaggcaacatctgacccagatgagctcttcacttcctccttccctgtcgttgtagagccagactgggtagaagagggagggcagtgtcctcaactcatcagcctcacaagcaatttgggacccctctggggtggatttcaccaggttgaattagaaccgcagataatacttccctgttagtgaggacaaaccaagcgccagctctgcccttttctctagagtgttgtgttcttgctcttggtacttacaggagctagtctggtgccttgagcaagcttgaagggaagtgggtgtcctcaccagcaaacttccacatctcaactcgtgccctcttttggccacactggccccgtctcttggagggagcccagaccctgtagggagttttgttttcctttcttctcttgggtgtggtgtcttgtgtttctgaatgtgaacccaaagaccctacccctggagaggaagcaccttcctctttgtgttggtctcctcatagcactgtttgctcacagcagaaacggggctgccacagcctcctgcggctctgctgccttctgggccctgcgtgcatggcatctatagctccttgccctgatagtcaatgctgtggcccttcaagcttgtctttcaaagctttcacaatcattacaacttttatcaaggggaataataatctctaggaaaattatgtccactttaggagaatctgtcaagtgtagccactttggtgttgttctgataatatactgtatatgtacaacttaataaattttgatgaggcagaat

SEQ ID NO: 18100 - DNA, 4527 bp, Homo sapiens
tgggggcgtcctccttcgtccccgcccggctgtcaagctgtgttctagcggccgagggaccgaggggggctaagaaagggggcgcccagccatgcagaggcaaaaaggcgctgcggaacggggtccccgtcgccagtgctgaggcaggaggtcggagccacaagtgaggggctgggaagcaggacccagcacgggcgtcttggcaggcggccgggcgcagggccaggctgctggggacgctcagggctttccacccaagccatgggcgctgtcgggcactcgggggtcccctcgtggctccggccactcggcgtgggcattacgttggcttcacatcgccatccagcctcgaagccaacaggactgaaaaatagcttcggccaaacgttctcctcccgctaaggagaggggtcgagtgcgtcagcccgaggggactggagagggatgccctagccctcgaggggcggaggacccgcggttgaaggaggcagcgggagcggagagcgccctccttgaccatcgaatgcctccttctgtgtttccattcctgtcgagtgggctgggccacgctgaccaccctggaggagggacggacgacgctcggcgggctctgaccgtgccgccttcttgtggctgctgactgggatccaggagggagtgggcatggggcgcagccgcgcctccctccctccccgcctcccgggcgccggggttggcgatgtggagacgtgaggggacccgtcggctgctccggcttctccaggactccgccaggcgcccgcgcgtccctcctcacccggaggaggagaggctccgcgcggggctccgaggcgggcggcgcgcggagccggagtcccagcctcgccatgggacataacgggagctggatctctccaaatgccagcgagccgcacaacgcgtccggcgccgaggctgcgggtgtgaaccgcagcgcgctcggggagttcggcgaggcgcagctgtaccgccagttcaccaccaccgtgcaggtcgtcatcttcataggctcgctgctcggaaacttcatggtgttatggtcaacttgccgcacaaccgtgttcaaatctgtcaccaacaggttcattaaaaacctggcctgctcggggatttgtgccagcctggtctgtgtgcccttcgacatcatcctcagcaccagtcctcactgttgctggtggatctacaccatgctcttctgcaaggtcgtcaaatttttgcacaaagtattctgctctgtgaccatcctcagcttccctgctattgctttggacaggtactactcagtcctctatccactggagaggaaaatatctgatgccaagtcccgtgaactggtgatgtacatctgggcccatgcagtggtggccagtgtccctgtgtttgcagtaaccaatgtggctgacatctatgccacgtccacctgcacggaagtctggagcaactccttgggccacctggtgtacgttctggtgtataacatcaccacggtcattgtgcctgtggtggtggtgttcctcttcttgatactgatccgacgggccctgagtgccagccagaagaagaaggtcatcatagcagcgctccggaccccacagaacaccatctctattccctatgcctcccagcgggaggccgagctgcacgccaccctgctctccatggtgatggtcttcatcttgtgtagcgtgccctatgccaccctggtcgtctaccagactgtgctcaatgtccctgacacttccgtcttcttgctgctcactgctgtttggctgcccaaagtctccctgctggcaaaccctgttctctttcttactgtgaacaaatctgtccgcaagtgcttgatagggaccctggtgcaactacaccaccggtacagtcgccgtaatgtggtcagtacagggagtggcatggctgaggccagcctggaacccagcatacgctcgggtagccagctcctggagatgttccacattgggcagcagcagatctttaagcccacagaggatgaggaagagagtgaggccaagtacattggctcagctgacttccaggccaaggagatatttagcacctgcctggagggagagcaggggccacagtttgcgccctctgccccacccctgagcacagtggactctgtatcccaggtggcaccggcagcccctgtggaacctgaaacattccctgataagtattccctgcagtttggctttgggccttttgagttgcctcctcagtggctctcagagacccgaaacagcaagaagcggctgcttccccccttgggcaacaccccagaagagctgatccagacaaaggtgcccaaggtaggcagggtggagcggaagatgagcagaaacaataaagtgagcatttttccaaaggtggattcctagcaaggattgtaaattcttggaagcaacggggagcttccatattcccaccagagtgtgggaatgctgtggccatgtgattgtatgatctccttgcaactcagtgtgagttgattcctccaatatgggccagatgcttttgaatgatagggaaatctacataaaatccagtgtcctctttattgagggagtatatgtatccatctcagtgatccatgtccttagtgaagtccacattattctctgtggggacaagagctgggcagttttgaatgggtcttgaggtgggtaccccatgtgcactttctgaggatgcctcacttccctgggctctgcagagaacacacagagagaagactttcagagctcacaggagcagggagcaggagcactctaagggaattccaagatcatgatggagcatggtggctccagagaaaatgcctgtttgatgaacttaaacatgtcaaacattttctgttgagaaggtagggatttggcgtcttacactgtttctctggaagccccagtcatatgactcactgtttctcctgatacccttcgtccctttcattgggatgtaggtaaggaatgaacgattcctcacctatggtacacatggcgatagatgtgcccgggagtaagggagatattttgtccttgataattctgattttcccttggcatcaccaacgcctcagagagatacacctgcaccctccagtcagggtcagtgttggctggaaaacactgaaaagtcttcgctctgtctttcaccttaaattgtgttttctcaacaaatgagagagaagcttacgggggagatgcctgagagatgcctatggcgctgtagtttttttttcttccctatgatctcacatgaaaggtgctatgtaacaaccagtatgagtcaaatatattgaaaaaatcatcttatgcaaactttaggaattaaaaggtatttttaaaatggagagttagtgtaagctgggtcctttggaaacatcaaactgaaaaggcctgatttggaaaggtgactctgcccaaaaggttggcaagaatctgacaaagatggtttccttccgaggaagactccggaactcaggtgtggccagtctccttttcagtctgtttgtacagctgcggttctctcttaattttggacacagaggaggaacagaacagggagaaataatcattgtagagtgccaaggcaacatctgacccagatgagctcttcacttcctccttccctgtcgttgtagagccagactgggtagaagagggagggcagtgtcctcaactcatcagcctcacaagcaatttgggacccctctggggtggatttcaccaggttgaattagaaccgcagataatacttccctgttagtgaggacaaaccaagcgccagctctgcccttttctctagagtgttgtgttcttgctcttggtacttacaggagctagtctggtgccttgagcaagcttgaagggaagtgggtgtcctcaccagcaaacttccacatctcaactcgtgccctcttttggccacactggccccgtctcttggagggagcccagaccctgtagggagttttgttttcctttcttctcttgggtgtggtgtcttgtgtttctgaatgtgaacccaaagaccctacccctggagaggaagcaccttcctctttgtgttggtctcctcatagcactgtttgctcacagcagaaacggggctgccacagcctcctgcggctctgctgccttctgggccctgcgtgcatggcatctatagctccttgccctgatagtcaatgctgtggcccttcaagcttgtctttcaaagctttcacaatcattacaacttttatcaaggggaataataatctctaggaaaattatgtccactttaggagaatctgtcaagtgtagccactttggtgttgttctgataatatactgtatatgtacaacttaataaattttgatgaggcagaatctggttgggtatgtttcttatatatgtttgaagcagatggctgactactaacaggtcattgccaggtgtatttctatactctttgaagaataacattttaataaaaaattgaaaagcagt

SEQ ID NO: 18101 - DNA, 4594 bp, Homo sapiens
tgggggcgtcctccttcgtccccgcccggctgtcaagctgtgttctagcggccgagggaccgaggggggctaagaaagggggcgcccagccatgcagaggcaaaaaggcgctgcggaacggggtccccgtcgccagtgctgaggcaggaggtcggagccacaagtgaggggctgggaagcaggacccagcacgggcgtcttggcaggcggccgggcgcagggccaggctgctggggacgctcagggctttccacccaagccatgggcgctgtcgggcactcgggggtcccctcgtggctccggccactcggcgtgggcattacgttggcttcacatcgccatccagcctcgaagccaacaggactgaaaaatagcttcggccaaacgttctcctcccgctaaggagaggggtcgagtgcgtcagcccgaggggactggagagggatgccctagccctcgaggggcggaggacccgcggttgaaggaggcagcgggagcggagagcgccctccttgaccatcgaatgcctccttctgtgtttccattcctgtcgagtgggctgggccacgctgaccaccctggaggagggacggacgacgctcggcgggctctgaccgtgccgccttcttgtggctgctgactgggatccaggagggagtgggcatggggcgcagccgcgcctccctccctccccgcctcccgggcgccggggttggcgatgtggagacgtgaggggacccgtcggctgctccggcttctccaggactccgccaggcgcccgcgcgtccctcctcacccggaggaggagaggctccgcgcggggctccgaggcgggcggcgcgcggagccggagtcccagcctcgccatgggacataacgggagctggatctctccaaatgccagcgagccgcacaacgcgtccggcgccgaggctgcgggtgtgaaccgcagcgcgctcggggagttcggcgaggcgcagctgtaccgccagttcaccaccaccgtgcaggtcgtcatcttcataggctcgctgctcgattgtaccagtaaaaatttaagtttaaacaaccaaacactgagagtggaaccaggagaagtgaattctcactccaagggcaaaggctttccacctggtaccaccttcccaaatggagccagtgagtgggcattccaaggcgcccagcaccatattaattgagaatggaacttacgtttcattttcaggaaacttcatggtgttatggtcaacttgccgcacaaccgtgttcaaatctgtcaccaacaggttcattaaaaacctggcctgctcggggatttgtgccagcctggtctgtgtgcccttcgacatcatcctcagcaccagtcctcactgttgctggtggatctacaccatgctcttctgcaaggtcgtcaaatttttgcacaaagtattctgctctgtgaccatcctcagcttccctgctattgctttggacaggtactactcagtcctctatccactggagaggaaaatatctgatgccaagtcccgtgaactggtgatgtacatctgggcccatgcagtggtggccagtgtccctgtgtttgcagtaaccaatgtggctgacatctatgccacgtccacctgcacggaagtctggagcaactccttgggccacctggtgtacgttctggtgtataacatcaccacggtcattgtgcctgtggtggtggtgttcctcttcttgatactgatccgacgggccctgagtgccagccagaagaagaaggtcatcatagcagcgctccggaccccacagaacaccatctctattccctatgcctcccagcgggaggccgagctgcacgccaccctgctctccatggtgatggtcttcatcttgtgtagcgtgccctatgccaccctggtcgtctaccagactgtgctcaatgtccctgacacttccgtcttcttgctgctcactgctgtttggctgcccaaagtctccctgctggcaaaccctgttctctttcttactgtgaacaaatctgtccgcaagtgcttgatagggaccctggtgcaactacaccaccggtacagtcgccgtaatgtggtcagtacagggagtggcatggctgaggccagcctggaacccagcatacgctcgggtagccagctcctggagatgttccacattgggcagcagcagatctttaagcccacagaggatgaggaagagagtgaggccaagtacattggctcagctgacttccaggccaaggagatatttagcacctgcctggagggagagcaggggccacagtttgcgccctctgccccacccctgagcacagtggactctgtatcccaggtggcaccggcagcccctgtggaacctgaaacattccctgataagtattccctgcagtttggctttgggccttttgagttgcctcctcagtggctctcagagacccgaaacagcaagaagcggctgcttccccccttgggcaacaccccagaagagctgatccagacaaaggtgcccaaggtaggcagggtggagcggaagatgagcagaaacaataaagtgagcatttttccaaaggtggattcctagcaaggattgtaaattcttggaagcaacggggagcttccatattcccaccagagtgtgggaatgctgtggccatgtgattgtatgatctccttgcaactcagtgtgagttgattcctccaatatgggccagatgcttttgaatgatagggaaatctacataaaatccagtgtcctctttattgagggagtatatgtatccatctcagtgatccatgtccttagtgaagtccacattattctctgtggggacaagagctgggcagttttgaatgggtcttgaggtgggtaccccatgtgcactttctgaggatgcctcacttccctgggctctgcagagaacacacagagagaagactttcagagctcacaggagcagggagcaggagcactctaagggaattccaagatcatgatggagcatggtggctccagagaaaatgcctgtttgatgaacttaaacatgtcaaacattttctgttgagaaggtagggatttggcgtcttacactgtttctctggaagccccagtcatatgactcactgtttctcctgatacccttcgtccctttcattgggatgtaggtaaggaatgaacgattcctcacctatggtacacatggcgatagatgtgcccgggagtaagggagatattttgtccttgataattctgattttcccttggcatcaccaacgcctcagagagatacacctgcaccctccagtcagggtcagtgttggctggaaaacactgaaaagtcttcgctctgtctttcaccttaaattgtgttttctcaacaaatgagagagaagcttacgggggagatgcctgagagatgcctatggcgctgtagtttttttttcttccctatgatctcacatgaaaggtgctatgtaacaaccagtatgagtcaaatatattgaaaaaatcatcttatgcaaactttaggaattaaaaggtatttttaaaatggagagttagtgtaagctgggtcctttggaaacatcaaactgaaaaggcctgatttggaaaggtgactctgcccaaaaggttggcaagaatctgacaaagatggtttccttccgaggaagactccggaactcaggtgtggccagtctccttttcagtctgtttgtacagctgcggttctctcttaattttggacacagaggaggaacagaacagggagaaataatcattgtagagtgccaaggcaacatctgacccagatgagctcttcacttcctccttccctgtcgttgtagagccagactgggtagaagagggagggcagtgtcctcaactcatcagcctcacaagcaatttgggacccctctggggtggatttcaccaggttgaattagaaccgcagataatacttccctgttagtgaggacaaaccaagcgccagctctgcccttttctctagagtgttgtgttcttgctcttggtacttacaggagctagtctggtgccttgagcaagcttgaagggaagtgggtgtcctcaccagcaaacttccacatctcaactcgtgccctcttttggccacactggccccgtctcttggagggagcccagaccctgtagggagttttgttttcctttcttctcttgggtgtggtgtcttgtgtttctgaatgtgaacccaaagaccctacccctggagaggaagcaccttcctctttgtgttggtctcctcatagcactgtttgctcacagcagaaacggggctgccacagcctcctgcggctctgctgccttctgggccctgcgtgcatggcatctatagctccttgccctgatagtcaatgctgtggcccttcaagcttgtctttcaaagctttcacaatcattacaacttttatcaaggggaataataatctctaggaaaattatgtccactttaggagaatctgtcaagtgtagccactttggtgttgttctgataatatactgtatatgtacaacttaataaattttgatgaggcagaat

SEQ ID NO: 18102 - DNA, 3163 bp, Homo sapiens
ctggaatataagagtgaagtcagagtcctttctcaagagtacttccggtactactcagtcctctatccactggagaggaaaatatctgatgccaagtcccgtgaactggtgatgtacatctgggcccatgcagtggtggccagtgtccctgtgtttgcagtaaccaatgtggctgacatctatgccacgtccacctgcacggaagtctggagcaactccttgggccacctggtgtacgttctggtgtataacatcaccacggtcattgtgcctgtggtggtggtgttcctcttcttgatactgatccgacgggccctgagtgccagccagaagaagaaggtcatcatagcagcgctccggaccccacagaacaccatctctattccctatgcctcccagcgggaggccgagctgcacgccaccctgctctccatggtgatggtcttcatcttgtgtagcgtgccctatgccaccctggtcgtctaccagactgtgctcaatgtccctgacacttccgtcttcttgctgctcactgctgtttggctgcccaaagtctccctgctggcaaaccctgttctctttcttactgtgaacaaatctgtccgcaagtgcttgatagggaccctggtgcaactacaccaccggtacagtcgccgtaatgtggtcagtacagggagtggcatggctgaggccagcctggaacccagcatacgctcgggtagccagctcctggagatgttccacattgggcagcagcagatctttaagcccacagaggatgaggaagagagtgaggccaagtacattggctcagctgacttccaggccaaggagatatttagcacctgcctggagggagagcaggggccacagtttgcgccctctgccccacccctgagcacagtggactctgtatcccaggtggcaccggcagcccctgtggaacctgaaacattccctgataagtattccctgcagtttggctttgggccttttgagttgcctcctcagtggctctcagagacccgaaacagcaagaagcggctgcttccccccttgggcaacaccccagaagagctgatccagacaaaggtgcccaaggtaggcagggtggagcggaagatgagcagaaacaataaagtgagcatttttccaaaggtggattcctagcaaggattgtaaattcttggaagcaacggggagcttccatattcccaccagagtgtgggaatgctgtggccatgtgattgtatgatctccttgcaactcagtgtgagttgattcctccaatatgggccagatgcttttgaatgatagggaaatctacataaaatccagtgtcctctttattgagggagtatatgtatccatctcagtgatccatgtccttagtgaagtccacattattctctgtggggacaagagctgggcagttttgaatgggtcttgaggtgggtaccccatgtgcactttctgaggatgcctcacttccctgggctctgcagagaacacacagagagaagactttcagagctcacaggagcagggagcaggagcactctaagggaattccaagatcatgatggagcatggtggctccagagaaaatgcctgtttgatgaacttaaacatgtcaaacattttctgttgagaaggtagggatttggcgtcttacactgtttctctggaagccccagtcatatgactcactgtttctcctgatacccttcgtccctttcattgggatgtaggtaaggaatgaacgattcctcacctatggtacacatggcgatagatgtgcccgggagtaagggagatattttgtccttgataattctgattttcccttggcatcaccaacgcctcagagagatacacctgcaccctccagtcagggtcagtgttggctggaaaacactgaaaagtcttcgctctgtctttcaccttaaattgtgttttctcaacaaatgagagagaagcttacgggggagatgcctgagagatgcctatggcgctgtagtttttttttcttccctatgatctcacatgaaaggtgctatgtaacaaccagtatgagtcaaatatattgaaaaaatcatcttatgcaaactttaggaattaaaaggtatttttaaaatggagagttagtgtaagctgggtcctttggaaacatcaaactgaaaaggcctgatttggaaaggtgactctgcccaaaaggttggcaagaatctgacaaagatggtttccttccgaggaagactccggaactcaggtgtggccagtctccttttcagtctgtttgtacagctgcggttctctcttaattttggacacagaggaggaacagaacagggagaaataatcattgtagagtgccaaggcaacatctgacccagatgagctcttcacttcctccttccctgtcgttgtagagccagactgggtagaagagggagggcagtgtcctcaactcatcagcctcacaagcaatttgggacccctctggggtggatttcaccaggttgaattagaaccgcagataatacttccctgttagtgaggacaaaccaagcgccagctctgcccttttctctagagtgttgtgttcttgctcttggtacttacaggagctagtctggtgccttgagcaagcttgaagggaagtgggtgtcctcaccagcaaacttccacatctcaactcgtgccctcttttggccacactggccccgtctcttggagggagcccagaccctgtagggagttttgttttcctttcttctcttgggtgtggtgtcttgtgtttctgaatgtgaacccaaagaccctacccctggagaggaagcaccttcctctttgtgttggtctcctcatagcactgtttgctcacagcagaaacggggctgccacagcctcctgcggctctgctgccttctgggccctgcgtgcatggcatctatagctccttgccctgatagtcaatgctgtggcccttcaagcttgtctttcaaagctttcacaatcattacaacttttatcaaggggaataataatctctaggaaaattatgtccactttaggagaatctgtcaagtgtagccactttggtgttgttctgataatatactgtatatgtacaacttaataaattttgatgaggcagaat

SEQ ID NO: 18103 - DNA, 188 bp, Homo sapiens
ccagggcctaggcaagaacagattgcactttgtggccagacgtgcttctctggtgaccattgacatttcagttgattgattttctgttatggattcttccttgtattttttgtagaatcagtactcttaaatcttgtgtgttacaaacttgcatggttgatatatctgttaaaagcctgccagctgag

SEQ ID NO: 18104 - DNA, 185 bp, Homo sapiens
gaagtaaaatatttgtctctttgttactttttactttatttttaaaagtatagaagttatagatgatggctttctttttgtaaaagattcaagaatgtcaaagcatatagggaaaaatgagaaaggccatctctaacaccactttcctttccctctccagagttagccaaaatttgggatatatc

SEQ ID NO: 18105 - DNA, 738 bp, Homo sapiens
gtcaatcagaaagaatgtcattagatcaattagctattactttatattacctaaacttagtataatttaaaatttgataatgagtttattcagtttataaagagttctgtttttggcatggcctagtagctccattgcacaattccttctgcagaaaactactataacctatgaacaaaataggaaaaataactacccgaaagcactggagagcaaacaaaagcagacagaaaatagaagtcaaacattgaaggaaggaaatagcactgggtgagtcccctgccaggtagggtggctgaaactcttgacaaacaaaacccctcagtcttgttggtctgaagaaccaaggacagggtttggtgtagctgcaggccttggaaagtgcgtgtgcatgcatactcaaagtaaattaaattgcctgcttaaatgaaaaagaaaaaaattattcagaaaaaacagaacccaaactttctactcgtattactcacaacatttgcagtagaatgcaaaattattcagtgtacacagaaacaagaagacatgaaccattctgaaaagaaatcaatggactaacttcaagataactcatatgttgctattagcagacaagaatcttaaagcagctgttgtaattgcttaagaacataagggaaaatatgtttgcaatgaataaaaataggaaatattaacagagaatttgaagtaataaaaaagacccaaatataaattctaaaactg

SEQ ID NO: 18106 - DNA, 412 bp, Homo sapiens
ataaagtctatagtagtgtacagtaatgtcctaggccttcacattcattcaccacttacacccaaaataactttgagttctaccagctccattaatggtaagtacttactatgatttgagtgacccccaatgtggcagtattaagaggtggggcccttaagaggtgattggattaatctattcaaggattgatagattaatggattatcatgggaatggggctgatggctttgtaagaagatgaagacctgagctagcatgctcagcgcccccaccatatgatgccctgcactaccttgggagtctgcagagagtccctaccagcaagaagaccctgacctgatgtggccctcaaccttggacttctcagctgctataattctaagaaataaattcatgtttttcttataat

SEQ ID NO: 18107 - DNA, 373 bp, Homo sapiens
gcagcctgcaaatccccaagagtccacgacagaatacaagaatagtaacaatgatttatctcaactgatcttagcttcttcacaaacttgccaataatgacctttcaagaactgcaccgtttgtcctcatctgcgcaatccaacagttcagaaaaactgaagaaaatgcttcttctaaaaataaaacacttgttgtgggggggactactaacaaaaaaaaaggcacactggtttttactgtactgaagcaataaactctccaaataacttcattaaggagtgtcattagcaaagaatgaacaccaaaataccgctcaatccaattttcattgtgaattccgggatctagaaaattaaatgggacggtatcact

SEQ ID NO: 18108 - DNA, 165 bp, Homo sapiens
tcttgtcatggggagcacagggaaatgctggcattgatttttaagacattccagagttcctggaaggtctgttgtgtctgagggtcccggctgcccagcgagcaaggagaagctgctgcccactcgtggggccccaggctccaccaacaccactcagaagctctg

SEQ ID NO: 18109 - DNA, 213 bp, Homo sapiens
atcttggacccaaagaggacttttctaaagagatagagatggctcagtaaaagcacacctcattactagaaaaacaacccaaaacatgtatattattaagagtgggttaacagtctcatttttacatgtaacaaagcaaaagtaaaattttaactccactgagagagccacttaagtggttgtagtgaccagatgagaacatgtcctggattt

SEQ ID NO: 18110 - DNA, 1162 bp, Homo sapiens
agcgggttggctggagctggagtaacaagatggcgtcgtcggcggagtgacaggggtccctctgggccggagccggcggcagtggtggcagcggtaccgctccccagctcactgcgccccttttccagcccggacgtcgccgcgaaagcgaggcagcggcggctgcccagaacaggtggcccagcctggtaaccgctagaagcccttcacaaactgcggcctggcaggcaaccaaccaaaaaacaaacaaagaatcctgaccgagcagcgggcatcaagttcccttcgccggcatctgggccctggacgccgggaaaggcctccgtgttccgcttcctgccgccttccacggtaggcttggcccagcctccatcttcgtctctcaggacggctagcagcagaattcattgtcggaaggaaatataaactgctttggaagatctggtgtagctccttcggagacatctgtctggcgatcagcatcaccaacggtgaagaagtggtagtgaagccagaatctcagggccaggcatccccagttgctgtacaagagcaggctttacaagatgcttcaaggtggggttggcatcccccacatacggtggtgtggtcaggaagaagactataatgtactagtcatggatttttctgggacctagcctcgaagaccaatttctgttcaagaaggttcacaatgaaaactgtacttatattagctgaccagatgatcagtagaattgaacatgtgcatacaaagaattttatacacagagccattaaaccaggaccctgatccatcaatatgactacacatttgattggacaaagttaaagcagaaagcagcacagcaggcagcctcttctagtgggaggggcagcaggcccaaaccccaacagggtatttagagaaattcaatcagagacgatggaactaaagctggcccttctgtgcatacctgtttcctaaagaaatgtttactcctggattgggtcagcccctctgcatttacctataagaatctacatacaagcttgtctatccatcctgcatagagcacaagtcacagaagaaaagctcctctccataaattgcttaacatagtaatcaatatctcttcacattttcagagtaaactatatcacttgaataaacaaaatgcca

SEQ ID NO: 18111 - DNA, 953 bp, Homo sapiens
agcgggttggctggagctggagtaacaagatggcgtcgtcggcggagtgacaggggtccctctgggccggagccggcggcagtggtggcagcggtaccgctccccagctcactgcgccccttttccagcccggacgtcgccgcgaaagcgaggcagcggcggctgcccagaacaggtggcccagcctggtaaccgctagaagcccttcacaaactgcggcctggcaggcaaccaaccaaaaaacaaacaaagaatcctgaccgagcagcgggcatcaagttcccttcgccggcatctgggccctggacgccgggaaaggcctccgtgttccgcttcctgccgccttccacggtaggcttggcccagcctccatcttcgtctctcaggacggctagcagcagaattcattgtcggaaggaaatataaactgctttggaagatctggtgtagctccttcggagacatctgtctggcgatcagcatcaccaacggtgaagaagtggtagtgaagccagaatctcagggccaggcatccccagttgctgtacaagagcaggctttacaagatgcttcaaggaccctgatccatcaatatgactacacatttgattggacaaagttaaagcagaaagcagcacagcaggcagcctcttctagtgggaggggcagcaggcccaaaccccaacagggtatttagagaaattcaatcagagacgatggaactaaagctggcccttctgtgcatacctgtttcctaaagaaatgtttactcctggattgggtcagcccctctgcatttacctataagaatctacatacaagcttgtctatccatcctgcatagagcacaagtcacagaagaaaagctcctctccataaattgcttaacatagtaatcaatatctcttcacattttcagagtaaactatatcacttgaataaacaaaatgcca

SEQ ID NO: 18112 - DNA, 1604 bp, Homo sapiens
tagtgatctagaggatccctcgctatcatcggcgcccttcccagaacttttcctgtgcgtttcagaaccattcgtgggcgtgacgttgtgttaaggtagacaggatggcatcctgcatacaattacgtatctggcgctttttcttgtttagtcttgggaaatgtcgtcaatgtatacgatccgcccctttggttgtttttgtttgttactctctctgtcgcccaggctggagtgcagcggcgcgatcccggctcactgcaacctctgcctcctgggttcaagggatcctcctgccgcagcctcctgagaatctgggattacaggcgcccgccaccacacccagctaaattttgtatttttagtaggggcggggtttcgccgtgttggcgaggctggtctcgaactcctggcctcggcctcccaaagtgctgggattcccggcgtgggccactgcgcccggcctgccccctttgtttttttctgcggcaagaggccccagatgtgttgaggctactttcgtttagccacttgctcatgaggaacattttggtgggctccagctgttgctggaaggaactgcagctgaacccatgacctctcccaagcctggtcttgtcttggggtctcagtctgggggcctgtcctgagatgctcccactatgacttggcagagtcacctgcacccttcttttcctccccccaccccactgccatggtgcccaagtcttgtctgtcagccgcggcgggaggcaggacaggtgtgagaagggagaggtgtgaggtggtttctgtgttggtgtcctggggccgttgtaactcatgaccacagactgggaggcttgcaacagcagagctggactctctcccagttctagaggccagaagtctaaaatcaaggtgtggccacgcagcctctctccagaggctcaggggagggtcctcccgctgcctcccgctcctggggccccacttgttccttggcttgtggccgcatgctccagtctctgcctctgtctttatgtggcctcttccctgtctctctgtgttcccctctctttttataaggacaccagtcattgaatttactgcctaccctaaatccagggtggtcttatctcgagatccttaattaaacacgtttgcaaagaccccgtttccgaataaggtcccattccaaggttctggggctctgggagtggacatggctttggggatcactgttcagctcaccacagtccccgaaggtagcctcacttccccgcgtctgtggtgcaccagcaggcaggtgggctcaggcctggagtgagggcccgtgcctggcgcccccaccatactctcctcctgtcatggatggagcaggtgcgatcacatccagggcaagactgctgcttttgttaaaataattcactgcagggcttctcgtaaagagtgagatttcttagtgcatctaaagcatcacattttaaaattagatccggttgacgtagatacacctgttagagaaaaggacagtcgtgtctcaaatttggaccctcaagtcattgttttcaaacaaccaggaaacgagggttgacgtggatcctttaacccagttctgctgccta

SEQ ID NO: 18113 - DNA, 166 bp, Homo sapiens
atgggactggagctagacaggtgcagaggaagtagagcggtggcgtttgcctttggtttcataatatttataaatttaatttgtaaaacaaaaattgtaataaatgttctggttttgcttttgctttatcctttgcaaaagctatcatactgtcctcattggtttc

SEQ ID NO: 18114 - DNA, 351 bp, Homo sapiens
gaattaaaaaaaaaaaaaaaaagcccaaaagaaaggattctcctgctgggcacttgtttaatgttctcagaaaagtttagaacttctaccataaatcttcagtgcacttactcttctcaacacagactattcttcattatttatatgtcactaatctaacttttaccatagaagcgttttctgatgttgacatgttgacagcagggtaattctttccacagcagaaggattcttctctatacaaaaggattcccattgaattcccttaaaaaccaaccatgaaagggatgttatgcttcatacaaagtttgctttaaaataaaaacaaggacctttaatgcattcaaaaca

SEQ ID NO: 18115 - DNA, 434 bp, Homo sapiens
gaggtgtttatctaactctccctagtgggagatggggaaattttcactgagaatgtaactctgcaccatgagcagatgtttgctaagtgggcaaggattgagtgggggatgtcttaaactgagggaaaacatttgtaaaagcagaaaggggtgaggatatgacagcaaatttactatagctaacatgagagagaagaggaagggtagtaaatagaattgaagagggtagccaagggccaaatataaatttgtattacaagctaaggaatttttatccagtcataaagagccactgaaagattttatgcaggggattataatgatcagattagcatattaagaagatgattttggcaatagtatggagtctggttgatagggaggccaggtaggaggctactgaagtagtctggacaagagatgaagtgtaccta

SEQ ID NO: 18116 - DNA, 252 bp, Homo sapiens
  misc_feature (4)..(4): n is a, c, g, or t
  misc_feature (66)..(66): n is a, c, g, or t
tgtnttcatttagaaatataatgcatgcttattttatacaatacaaaatatatgaaaaagaaaatnaaaatctctaataatctcatcatttttacccaggcatttcaaaagccacctatgtatgtatttatccaactatcagttcatctattcatccatccatccactcctgcatatcctactttacgaatgtatttgacagcttattttatattatgagcatgttcttatctaataaaatatcattaatta

SEQ ID NO: 18117 - DNA, 350 bp, Homo sapiens
ccttgctatttacagtcctgctttttgctattgttgtttgttgtttggttatgatcttgcttcctcctctagttaaggactggcttcccacctaaagcacagtttgtattcatcatcttgagttactttcaggtaacacagtctggccccacccacagggaatgctctgtaacacaggactcaaggccatggggatgctctcagccagctactttcaaccatctgttaagatggtaaggaggaggtggagaagaaaagaagaatagttaatatatttattgagttcttgctgtatatcaggttgttctaataattgtacatggaaaaataaaatgcatatatgttggcca

SEQ ID NO: 18118 - DNA, 2464 bp, Homo sapiens
cggcgcggctgaggcgcggcggccccgtggagcagcgcagtatggcgggcggggcccgggaggtgctcacactgcagttgggacattttgccggtttcgtgggcgcgcactggtggaaccagcaggatgctgcgctgggccgagcgaccgattccaaggagcccccgggagagctgtgccccgacgtcctgtatcgtacgggccggacgctgcacggccaggagacctacacgccgcgactcatcctcatggatctgaagggtagtttgagctccctaaaagaggaaggtggactctacagggacaaacagttggatgctgcaatagcatggcaggggaagctcaccacacacaaagaggaactctatcccaagaacccttatctccaagactttctgagtgcagagggagtgctgagtagtgatggtgtctggagggtcaaatccattcccaatggcaaaggttcctcaccactccccaccgctacaactccaaaaccacttatccctacagaggccagcatcagggtctggtcagacttcctcagagtccatctccatccccggagcatctgtatgattcagaagtacaaccacgatggggaagcaggtcggctggaggcttttggccaaggggaaagtgtcctaaaggaacccaagtaccaggaagagctggaggacaggctgcatttctacgtggaggaatgtgactacttgcagggcttccagatcctgtgtgacctgcacgatggcttctctggggtaggcgcgaaggcggcagagctgctacaagatgaatattcagggcggggaataataacctggggcctgctacctggtccctaccatcgtggggaggcccagagaaacatctatcgtctattaaacacagcttttggtctcgtgcacctgactgctcacagctctcttgtctgccccttgtccttgggtgggagcctgggcctgcgacccgagccacctgtcagcttcccttacctgcattatgatgccactctgcccttccactgcagtgccatcctggctacagccctggacacagtcactgttccttatcgcctgtgttcctctccagtttccatggttcatctggctgacatgctgagcttctgtgggaaaaaggtggtgacagcaggagcaatcatccctttccccttggctccaggccagtcccttcctgattccctgatgcagtttggaggagccaccccatggaccccactgtctgcatgtggggagccttctggaacacgttgctttgcccagtcagtggtgctgaggggtatagacagagcatgccacacaagccagctcaccccagggacacctccaccctctgcccttcatgcatgtaccactggggaagaaatcttggctcagtatttacaacagcagcagcctggagtcatgagttcttcccatctgctgctgactccctgcagggtggctcctccttacccccacctcttctcaagctgcagtccaccgggtatggttctggatggttcccccaagggagcagcagtggagagcatcccagtgtttggggcactgtgttcctcttcgtccctgcaccagaccctggaagccttggccagagacctcaccaaactcgacttgcggcgctgggccagcttcatggatgctggagtggagcacgatgacgtagcagagctgctgcaggagctacaaagcctggcccagtgctaccagggtggtgacagcctcgtggactaaagttcccagtgtgggagaaaggagctagtttgcaataaaaacagctggatgcaggagcccagtgtcttcatgcagaggagctcaatgtcgcgggactagctacaccaacatatgcactttttacatttagaaacactgtgattagaccacagaacaataaatatgtgccatcagaccaaaaaaaagtagagaaaggagctgaactccactctcgatgctacttacagaggacatctgtaaagtcttcataaaagaccttgaatgatgcctaggatggcagagcccctgggtcctactccatcctccagcctttgtccttgtcctggcctcctgctctccagatctgtaaactgggctcaaggactgtacaagcagagtacaactacccgcctccccggtgccagggcgcctgttgggtttggtcctgtgtagatgattcccagagtctcattcatccagctcctcttcagacagaaggtccccatggtcagacagctggtctgcattgctggtactggttgcatcatcctcatcctcagagctggcttcacaggcagtgtggaagagctgcatgagttctcgaaaatggtgggaaacctaagaaaggaggagggctgtattcactgatccttagtaacatgttaacatttatgaagcactatatattgatttgcaaaatcttttgtttattccacacagcaaggttgaga

SEQ ID NO: 18119 - DNA, 1810 bp, Homo sapiens
cggcgcggctgaggcgcggcggccccgtggagcagcgcagtatggcgggcggggcccgggaggtgctcacactgcagttgggacattttgccggtttcgtgggcgcgcactggtggaaccagcaggatgctgcgctgggccgagcgaccgattccaaggagcccccgggagagctgtgccccgacgtcctgtatcgtacgggccggacgctgcacggccaggagacctacacgccgcgactcatcctcatggatctgaagggtagtttgagctccctaaaagaggaaggtggactctacagggacaaacagttggatgctgcaatagcatggcaggggaagctcaccacacacaaagaggaactctatcccaagaacccttatctccaagactttctgagtgcagagggagtgctgagtagtgatggtgtctggagggtcaaatccattcccaatggcaaaggttcctcaccactccccaccgctacaactccaaaaccacttatccctacagaggccagcatcagggtctggtcagacttcctcagagtccatctccatccccggagcatctgtatgattcagaagtacaaccacgatggggaagcaggtcggctggaggcttttggccaaggggaaagtgtcctaaaggaacccaagtaccaggaagagctggaggacaggctgcatttctacgtggaggaatgtgactacttgcagggcttccagatcctgtgtgacctgcacgatggcttctctggggtaggcgcgaaggcggcagagctgctacaagatgaatattcagggcggggaataataacctggggcctgctacctggtccctaccatcgtggggaggcccagagaaacatctatcgtctattaaacacagcttttggtctcgtgcacctgactgctcacagctctcttgtctgccccttgtccttgggtgggagcctgggcctgcgacccgagccacctgtcagcttcccttacctgcattatgatgccactctgcccttccactgcagtgccatcctggctacagccctggacacagtcactgttccttatcgcctgtgttcctctccagtttccatggttcatctggctgacatgctgagcttctgtgggaaaaaggtggtgacagcaggagcaatcatccctttccccttggctccaggccagtcccttcctgattccctgatgcagtttggaggagccaccccatggaccccactgtctgcatgtggggagccttctggaacacgttgctttgcccagtcagtggtgctgaggggtatagacagagcatgccacacaagccagctcaccccagggacacctccaccctctgcccttcatgcatgtaccactggggaagaaatcttggctcagtatttacaacagcagcagcctggagtcatgagttcttcccatctgctgctgactccctgcagggtggctcctccttacccccacctcttctcaagctgcagtccaccgggtatggttctggatggttcccccaagggagcagcagtggagagcatcccagtgtttggggcactgtgttcctcttcgtccctgcaccagaccctggaagccttggccagagacctcaccaaactcgacttgcggcgctgggccagcttcatggatgctggagtggagcacgatgacgtagcagagctgctgcaggagctacaaagcctggcccagtgctaccagggtggtgacagcctcgtggactaaagttcccagtgtgggagaaaggagctagtttgcaataaaaacagctggatgcagga

SEQ ID NO: 18120 - DNA, 953 bp, Homo sapiens
gtggaagccttggccaggtctggtgcagggacgaagaggaacacagtgccccaaacactgtgttcctcttcgtccctgcaccagaccctggaagccttggccagagacctcaccaaactcgacttgcggcgctgggccagcttcatggatgctggagtggagcacgatgacgtagcagagctgctgcaggagctacaaagcctggcccagtgctaccagggtggtgacagcctcgtggactaaagttcccagtgtgggagaaaggagctagtttgcaataaaaacagctggatgcaggagcccagtgtcttcatgcagaggagctcaatgtcgcgggactagctacaccaacatatgcactttttacatttagaaacactgtgattagaccacagaacaataaatatgtgccatcagaccaaaaaaaagtagagaaaggagctgaactccactctcgatgctacttacagaggacatctgtaaagtcttcataaaagaccttgaatgatgcctaggatggcagagcccctgggtcctactccatcctccagcctttgtccttgtcctggcctcctgctctccagatctgtaaactgggctcaaggactgtacaagcagagtacaactacccgcctccccggtgccagggcgcctgttgggtttggtcctgtgtagatgattcccagagtctcattcatccagctcctcttcagacagaaggtccccatggtcagacagctggtctgcattgctggtactggttgcatcatcctcatcctcagagctggcttcacaggcagtgtggaagagctgcatgagttctcgaaaatggtgggaaacctaagaaaggaggagggctgtattcactgatccttagtaacatgttaacatttatgaagcactatatattgatttgcaaaatcttttgtttattccacacagcaaggttgaga

SEQ ID NO: 18121 - DNA, 545 bp, Homo sapiens
gcgctgccgttatcttcaagaccctcccaccttaccgagctccaggaccggagatgaggagctgagcacaacatgccaacactcgaggggcccacgacagttgctcaagagccatttcgggaataggctgctaggccctggagacagtgaggacttgaactgcagcactcctgtcagacccctggatgtggttccccccgcgtcccacagctaatgactaagctgggaaccgaaagatggaatctagattctcctaagccaaggtttttcccccaactagtgtatatcccagaaagcttggaagagccaagtgctggagagatggtgacagcaggttgtcaggtgatcagaggaaggttagctagaggggaagggtgcccaggctttgacctaacattgtctctgttatttctgtacaggtagtttgagctccctaaaagaggaaggtggactctacagggacaaacagttggatgctgcaatagcatggtgtgtaactgatgtatggataagggtggggatcgtgtatgtacgcagaacgctgg

SEQ ID NO: 18122 - DNA, 2755 bp, Homo sapiens
cggcgcggctgaggcgcggcggccccgtggagcagcgcagtatggcgggcggggcccgggaggtgctcacactgcagttgggacattttgccggtttcgtgggcgcgcactggtggaaccagcaggatgctgcgctgggccgagcgaccgattccaaggagcccccgggagagctgtgccccgacgtcctgtatcgtacgggccggacgctgcacggccaggagacctacacgccgcgactcatcctcatggatctgaagggtagtttgagctccctaaaagaggaaggtggactctacagggacaaacagttggatgctgcaatagcatggcaggggaagctcaccacacacaaagaggaactctatcccaagaacccttatctccaagactttctgagtgcagagggagtgctgagtagtgatggtgtctggagggtcaaatccattcccaatggcaaaggttcctcaccactccccaccgctacaactccaaaaccacttatccctacagaggccagcatcagggtctggtcagacttcctcagagtccatctccatccccggagcatctgtatgattcagaagtacaaccacgatggggaagcaggtcggctggaggcttttggccaaggggaaagtgtcctaaaggaacccaagtaccaggaagagctggaggacaggctgcatttctacgtggaggaatgtgactacttgcagggcttccagatcctgtgtgacctgcacgatggcttctctggggtaggcgcgaaggcggcagagctgctacaagatgaatattcagggcggggaataataacctggggcctgctacctggtccctaccatcgtggggaggcccagagaaacatctatcgtctattaaacacagcttttggtctcgtgcacctgactgctcacagctctcttgtctgccccttgtccttgggtgggagcctgggcctgcgacccgagccacctgtcagcttcccttacctgcattatgatgccactctgcccttccactgcagtgccatcctggctacagccctggacacagtcactgttccttatcgcctgtgttcctctccagtttccatggttcatctggctgacatgctgagcttctgtgggaaaaaggtggtgacagcaggagcaatcatccctttccccttggctccaggccagtcccttcctgattccctgatgcagtttggaggagccaccccatggaccccactgtctgcatgtggggagccttctggaacacgttgctttgcccagtcagtggtgctgaggggtatagacagagcatgccacacaagccagctcaccccagggacacctccaccctctgcccttcatgcatgtaccactggggaagaaatcttggctcagtatttacaacagcagcagcctggagtcatgagttcttcccatctgctgctgactccctgcagggtggctcctccttacccccacctcttctcaagctgcagtccaccgggtatggttctggatggttcccccaagggagcaggtatgtaggaggtgaagaaaactgagatttcaagtatgggagagtttttactatctccattcctggattaaaagtgctgaaaaagtccacagttaaacattcctttattcaccctatggctcccaagaaaagcattcttcctctggagtactggtgtactaaggggacaatacaccaaatttgttgagtttacaatcaagtctactaaggttggacttccttatcagtttggcgagtcccagggcagaataatcatccatctacaggtctctgtttcctctccctccacagcagtggagagcatcccagtgtttggggcactgtgttcctcttcgtccctgcaccagaccctggaagccttggccagagacctcaccaaactcgacttgcggcgctgggccagcttcatggatgctggagtggagcacgatgacgtagcagagctgctgcaggagctacaaagcctggcccagtgctaccagggtggtgacagcctcgtggactaaagttcccagtgtgggagaaaggagctagtttgcaataaaaacagctggatgcaggagcccagtgtcttcatgcagaggagctcaatgtcgcgggactagctacaccaacatatgcactttttacatttagaaacactgtgattagaccacagaacaataaatatgtgccatcagaccaaaaaaaagtagagaaaggagctgaactccactctcgatgctacttacagaggacatctgtaaagtcttcataaaagaccttgaatgatgcctaggatggcagagcccctgggtcctactccatcctccagcctttgtccttgtcctggcctcctgctctccagatctgtaaactgggctcaaggactgtacaagcagagtacaactacccgcctccccggtgccagggcgcctgttgggtttggtcctgtgtagatgattcccagagtctcattcatccagctcctcttcagacagaaggtccccatggtcagacagctggtctgcattgctggtactggttgcatcatcctcatcctcagagctggcttcacaggcagtgtggaagagctgcatgagttctcgaaaatggtgggaaacctaagaaaggaggagggctgtattcactgatccttagtaacatgttaacatttatgaagcactatatattgatttgcaaaatcttttgtttattccacacagcaaggttgaga

SEQ ID NO: 18123 - DNA, 2792 bp, Homo sapiens
cggcgcggctgaggcgcggcggccccgtggagcagcgcagtatggcgggcggggcccgggaggtgctcacactgcagttgggacattttgccggtttcgtgggcgcgcactggtggaaccagcaggatgctgcgctgggccgagcgaccgattccaaggagcccccgggagagctgtgccccgacgtcctgtatcgtacgggccggacgctgcacggccaggagacctacacgccgcgactcatcctcatggatctgaagggtagtttgagctccctaaaagaggaaggtggactctacagggacaaacagttggatgctgcaatagcatggcaggggaagctcaccacacacaaagaggaactctatcccaagaacccttatctccaagactttctgagtgcagagggagtgctgagtagtgatggtgtctggagggtcaaatccattcccaatggcaaaggttcctcaccactccccaccgctacaactccaaaaccacttatccctacagaggccagcatcagggtctggtcagacttcctcagagtccatctccatccccggagcatctgtatgattcagaagtacaaccacgatggggaagcaggtcggctggaggcttttggccaaggggaaagtgtcctaaaggaacccaagtaccaggaagagctggaggacaggctgcatttctacgtggaggaatgtgactacttgcagggcttccagatcctgtgtgacctgcacgatggcttctctggggtaggcgcgaaggcggcagagctgctacaagatgaatattcagggcggggaataataacctggggcctgctacctggtccctaccatcgtggggaggcccagagaaacatctatcgtctattaaacacagcttttggtctcgtgcacctgactgctcacagctctcttgtctgccccttgtccttgggtgggagcctgggcctgcgacccgagccacctgtcagcttcccttacctgcattatgatgccactctgcccttccactgcagtgccatcctggctacagccctggacacagtcactgttccttatcgcctgtgttcctctccagtttccatggttcatctggctgacatgctgagcttctgtgggaaaaaggtggtgacagcaggagcaatcatccctttccccttggctccaggccagtcccttcctgattccctgatgcagtttggaggagccaccccatggaccccactgtctgcatgtggggagccttctggaacacgttgctttgcccagtcagtggtgctgaggggtatagacagagcatgccacacaagccacagactaatggtggttttggctttgttctggcagccagctcaccccagggacacctccaccctctgcccttcatgcatgtaccactggggaagaaatcttggctcagtatttacaacagcagcagcctggagtcatgagttcttcccatctgctgctgactccctgcagggtggctcctccttacccccacctcttctcaagctgcagtccaccgggtatggttctggatggttcccccaagggagcaggtatgtaggaggtgaagaaaactgagatttcaagtatgggagagtttttactatctccattcctggattaaaagtgctgaaaaagtccacagttaaacattcctttattcaccctatggctcccaagaaaagcattcttcctctggagtactggtgtactaaggggacaatacaccaaatttgttgagtttacaatcaagtctactaaggttggacttccttatcagtttggcgagtcccagggcagaataatcatccatctacaggtctctgtttcctctccctccacagcagtggagagcatcccagtgtttggggcactgtgttcctcttcgtccctgcaccagaccctggaagccttggccagagacctcaccaaactcgacttgcggcgctgggccagcttcatggatgctggagtggagcacgatgacgtagcagagctgctgcaggagctacaaagcctggcccagtgctaccagggtggtgacagcctcgtggactaaagttcccagtgtgggagaaaggagctagtttgcaataaaaacagctggatgcaggagcccagtgtcttcatgcagaggagctcaatgtcgcgggactagctacaccaacatatgcactttttacatttagaaacactgtgattagaccacagaacaataaatatgtgccatcagaccaaaaaaaagtagagaaaggagctgaactccactctcgatgctacttacagaggacatctgtaaagtcttcataaaagaccttgaatgatgcctaggatggcagagcccctgggtcctactccatcctccagcctttgtccttgtcctggcctcctgctctccagatctgtaaactgggctcaaggactgtacaagcagagtacaactacccgcctccccggtgccagggcgcctgttgggtttggtcctgtgtagatgattcccagagtctcattcatccagctcctcttcagacagaaggtccccatggtcagacagctggtctgcattgctggtactggttgcatcatcctcatcctcagagctggcttcacaggcagtgtggaagagctgcatgagttctcgaaaatggtgggaaacctaagaaaggaggagggctgtattcactgatccttagtaacatgttaacatttatgaagcactatatattgatttgcaaaatcttttgtttattccacacagcaaggttgaga

SEQ ID NO: 18124 - DNA, 2877 bp, Homo sapiens
cggcgcggctgaggcgcggcggccccgtggagcagcgcagtatggcgggcggggcccgggaggtgctcacactgcagttgggacattttgccggtttcgtgggcgcgcactggtggaaccagcaggatgctgcgctgggccgagcgaccgattccaaggagcccccgggagagctgtgccccgacgtcctgtatcgtacgggccggacgctgcacggccaggagacctacacgccgcgactcatcctcatggatctgaagggtagtttgagctccctaaaagaggaaggtggactctacagggacaaacagttggatgctgcaatagcatggcaggggaagctcaccacacacaaagaggaactctatcccaagaacccttatctccaagactttctgagtgcagaggactgcgactcggtgaacagaaaggaggctatgcggtgtggccagccaactcaaggaggacgaagcaacctttgcctctaaactgcctggaaccaaatgtcgatttttctgacccctcccagggagtgctgagtagtgatggtgtctggagggtcaaatccattcccaatggcaaaggttcctcaccactccccaccgctacaactccaaaaccacttatccctacagaggccagcatcagggtctggtcagacttcctcagagtccatctccatccccggagcatctgtatgattcagaagtacaaccacgatggggaagcaggtcggctggaggcttttggccaaggggaaagtgtcctaaaggaacccaagtaccaggaagagctggaggacaggctgcatttctacgtggaggaatgtgactacttgcagggcttccagatcctgtgtgacctgcacgatggcttctctggggtaggcgcgaaggcggcagagctgctacaagatgaatattcagggcggggaataataacctggggcctgctacctggtccctaccatcgtggggaggcccagagaaacatctatcgtctattaaacacagcttttggtctcgtgcacctgactgctcacagctctcttgtctgccccttgtccttgggtgggagcctgggcctgcgacccgagccacctgtcagcttcccttacctgcattatgatgccactctgcccttccactgcagtgccatcctggctacagccctggacacagtcactgttccttatcgcctgtgttcctctccagtttccatggttcatctggctgacatgctgagcttctgtgggaaaaaggtggtgacagcaggagcaatcatccctttccccttggctccaggccagtcccttcctgattccctgatgcagtttggaggagccaccccatggaccccactgtctgcatgtggggagccttctggaacacgttgctttgcccagtcagtggtgctgaggggtatagacagagcatgccacacaagccagctcaccccagggacacctccaccctctgcccttcatgcatgtaccactggggaagaaatcttggctcagtatttacaacagcagcagcctggagtcatgagttcttcccatctgctgctgactccctgcagggtggctcctccttacccccacctcttctcaagctgcagtccaccgggtatggttctggatggttcccccaagggagcaggtatgtaggaggtgaagaaaactgagatttcaagtatgggagagtttttactatctccattcctggattaaaagtgctgaaaaagtccacagttaaacattcctttattcaccctatggctcccaagaaaagcattcttcctctggagtactggtgtactaaggggacaatacaccaaatttgttgagtttacaatcaagtctactaaggttggacttccttatcagtttggcgagtcccagggcagaataatcatccatctacaggtctctgtttcctctccctccacagcagtggagagcatcccagtgtttggggcactgtgttcctcttcgtccctgcaccagaccctggaagccttggccagagacctcaccaaactcgacttgcggcgctgggccagcttcatggatgctggagtggagcacgatgacgtagcagagctgctgcaggagctacaaagcctggcccagtgctaccagggtggtgacagcctcgtggactaaagttcccagtgtgggagaaaggagctagtttgcaataaaaacagctggatgcaggagcccagtgtcttcatgcagaggagctcaatgtcgcgggactagctacaccaacatatgcactttttacatttagaaacactgtgattagaccacagaacaataaatatgtgccatcagaccaaaaaaaagtagagaaaggagctgaactccactctcgatgctacttacagaggacatctgtaaagtcttcataaaagaccttgaatgatgcctaggatggcagagcccctgggtcctactccatcctccagcctttgtccttgtcctggcctcctgctctccagatctgtaaactgggctcaaggactgtacaagcagagtacaactacccgcctccccggtgccagggcgcctgttgggtttggtcctgtgtagatgattcccagagtctcattcatccagctcctcttcagacagaaggtccccatggtcagacagctggtctgcattgctggtactggttgcatcatcctcatcctcagagctggcttcacaggcagtgtggaagagctgcatgagttctcgaaaatggtgggaaacctaagaaaggaggagggctgtattcactgatccttagtaacatgttaacatttatgaagcactatatattgatttgcaaaatcttttgtttattccacacagcaaggttgaga

SEQ ID NO: 18125 - DNA, 2793 bp, Homo sapiens
cggcgcggctgaggcgcggcggccccgtggagcagcgcagtatggcgggcggggcccgggaggtgctcacactgcagttgggacattttgccggtttcgtgggcgcgcactggtggaaccagcaggatgctgcgctgggccgagcgaccgattccaaggagcccccgggagagctgtgccccgacgtcctgtatcgtacgggccggacgctgcacggccaggagacctacacgccgcgactcatcctcatggatctgaagggtagtttgagctccctaaaagaggaaggtggactctacagggacaaacagttggatgctgcaatagcatggcaggggaagctcaccacacacaaagaggaactctatcccaagaacccttatctccaagactttctgagtgcagagggagtgctgagtagtgatggtgtctggagggtcaaatccattcccaatggcaaaggttcctcaccactccccaccgctacaactccaaaaccacttatccctacagaggccagcatcagggtctggtcagacttcctcagagtccatctccatccccggagcatctgtatgattcagaagtacaaccacgatggggaagcaggtcggctggaggcttttggccaaggggaaagtgtcctaaaggaacccaagtaccaggaagagctggaggacaggctgcatttctacgtggaggaatgtgactacttgcagggcttccagatcctgtgtgacctgcacgatggcttctctggggtaggcgcgaaggcggcagagctgctacaagatgaatattcagggcggggaataataacctggggcctgctacctggtccctaccatcgtggggaggcccagagaaacatctatcgtctattaaacacagcttttggtctcgtgcacctgactgctcacagctctcttgtctgccccttgtccttgggtgggagcctgggcctgcgacccgagccacctgtcagcttcccttacctgcattatgatgcctgaggccaagtgcccatcttggtgtcttcttacaggccactctgcccttccactgcagtgccatcctggctacagccctggacacagtcactgttccttatcgcctgtgttcctctccagtttccatggttcatctggctgacatgctgagcttctgtgggaaaaaggtggtgacagcaggagcaatcatccctttccccttggctccaggccagtcccttcctgattccctgatgcagtttggaggagccaccccatggaccccactgtctgcatgtggggagccttctggaacacgttgctttgcccagtcagtggtgctgaggggtatagacagagcatgccacacaagccagctcaccccagggacacctccaccctctgcccttcatgcatgtaccactggggaagaaatcttggctcagtatttacaacagcagcagcctggagtcatgagttcttcccatctgctgctgactccctgcagggtggctcctccttacccccacctcttctcaagctgcagtccaccgggtatggttctggatggttcccccaagggagcaggtatgtaggaggtgaagaaaactgagatttcaagtatgggagagtttttactatctccattcctggattaaaagtgctgaaaaagtccacagttaaacattcctttattcaccctatggctcccaagaaaagcattcttcctctggagtactggtgtactaaggggacaatacaccaaatttgttgagtttacaatcaagtctactaaggttggacttccttatcagtttggcgagtcccagggcagaataatcatccatctacaggtctctgtttcctctccctccacagcagtggagagcatcccagtgtttggggcactgtgttcctcttcgtccctgcaccagaccctggaagccttggccagagacctcaccaaactcgacttgcggcgctgggccagcttcatggatgctggagtggagcacgatgacgtagcagagctgctgcaggagctacaaagcctggcccagtgctaccagggtggtgacagcctcgtggactaaagttcccagtgtgggagaaaggagctagtttgcaataaaaacagctggatgcaggagcccagtgtcttcatgcagaggagctcaatgtcgcgggactagctacaccaacatatgcactttttacatttagaaacactgtgattagaccacagaacaataaatatgtgccatcagaccaaaaaaaagtagagaaaggagctgaactccactctcgatgctacttacagaggacatctgtaaagtcttcataaaagaccttgaatgatgcctaggatggcagagcccctgggtcctactccatcctccagcctttgtccttgtcctggcctcctgctctccagatctgtaaactgggctcaaggactgtacaagcagagtacaactacccgcctccccggtgccagggcgcctgttgggtttggtcctgtgtagatgattcccagagtctcattcatccagctcctcttcagacagaaggtccccatggtcagacagctggtctgcattgctggtactggttgcatcatcctcatcctcagagctggcttcacaggcagtgtggaagagctgcatgagttctcgaaaatggtgggaaacctaagaaaggaggagggctgtattcactgatccttagtaacatgttaacatttatgaagcactatatattgatttgcaaaatcttttgtttattccacacagcaaggttgaga

SEQ ID NO: 18126 - DNA, 3028 bp, Homo sapiens
cggcgcggctgaggcgcggcggccccgtggagcagcgcagtatggcgggcggggcccgggaggtgctcacactgcagttgggacattttgccggtttcgtgggcgcgcactggtggaaccagcaggatgctgcgctgggccgagcgaccgattccaaggagcccccgggagagctgtgccccgacgtcctgtatcgtacgggccggacgctgcacggccaggagacctacacgccgcgactcatcctcatggatctgaagggtagtttgagctccctaaaagaggaaggtggactctacagggacaaacagttggatgctgcaatagcatggcaggggaagctcaccacacacaaagaggaactctatcccaagaacccttatctccaagactttctgagtgcagagggagtgctgagtagtgatggtgtctggagggtcaaatccattcccaatggcaaaggttcctcaccactccccaccgctacaactccaaaaccacttatccctacagaggccagcatcagggtctggtcagacttcctcagagtccatctccatccccggagcatctgtatgattcagaagtacaaccacgatggggaagcaggtcggctggaggcttttggccaaggggaaagtgtcctaaaggaacccaagtaccaggaagagctggaggacaggctgcatttctacgtggaggaatgtgactacttgcagggcttccagatcctgtgtgacctgcacgatggcttctctggggtaggcgcgaaggcggcagagctgctacaagatgaatattcagggcggggaataataacctggggcctgctacctggtccctaccatcgtggggaggcccagagaaacatctatcgtctattaaacacagcttttggtctcgtgcacctgactgctcacagctctcttgtctgccccttgtccttgggtgggagcctgggcctgcgacccgagccacctgtcagcttcccttacctgcattatgatgtaagtctcggtgctcttgttctgactgcggcaggctacagggcctcctcatgctcccagtcagccgctgtctgttactggctctgttcttgaggcccgagcttgaactcagctgtgatgtggcctctcagatcacactgtcctatgcttgtccagcctggggtcaaacatacccctgattcgtcccctgggtctctctggtgttaatattctgcctccacacattcttttccaggcctgaggccaagtgcccatcttggtgtcttcttacaggccactctgcccttccactgcagtgccatcctggctacagccctggacacagtcactgttccttatcgcctgtgttcctctccagtttccatggttcatctggctgacatgctgagcttctgtgggaaaaaggtggtgacagcaggagcaatcatccctttccccttggctccaggccagtcccttcctgattccctgatgcagtttggaggagccaccccatggaccccactgtctgcatgtggggagccttctggaacacgttgctttgcccagtcagtggtgctgaggggtatagacagagcatgccacacaagccagctcaccccagggacacctccaccctctgcccttcatgcatgtaccactggggaagaaatcttggctcagtatttacaacagcagcagcctggagtcatgagttcttcccatctgctgctgactccctgcagggtggctcctccttacccccacctcttctcaagctgcagtccaccgggtatggttctggatggttcccccaagggagcaggtatgtaggaggtgaagaaaactgagatttcaagtatgggagagtttttactatctccattcctggattaaaagtgctgaaaaagtccacagttaaacattcctttattcaccctatggctcccaagaaaagcattcttcctctggagtactggtgtactaaggggacaatacaccaaatttgttgagtttacaatcaagtctactaaggttggacttccttatcagtttggcgagtcccagggcagaataatcatccatctacaggtctctgtttcctctccctccacagcagtggagagcatcccagtgtttggggcactgtgttcctcttcgtccctgcaccagaccctggaagccttggccagagacctcaccaaactcgacttgcggcgctgggccagcttcatggatgctggagtggagcacgatgacgtagcagagctgctgcaggagctacaaagcctggcccagtgctaccagggtggtgacagcctcgtggactaaagttcccagtgtgggagaaaggagctagtttgcaataaaaacagctggatgcaggagcccagtgtcttcatgcagaggagctcaatgtcgcgggactagctacaccaacatatgcactttttacatttagaaacactgtgattagaccacagaacaataaatatgtgccatcagaccaaaaaaaagtagagaaaggagctgaactccactctcgatgctacttacagaggacatctgtaaagtcttcataaaagaccttgaatgatgcctaggatggcagagcccctgggtcctactccatcctccagcctttgtccttgtcctggcctcctgctctccagatctgtaaactgggctcaaggactgtacaagcagagtacaactacccgcctccccggtgccagggcgcctgttgggtttggtcctgtgtagatgattcccagagtctcattcatccagctcctcttcagacagaaggtccccatggtcagacagctggtctgcattgctggtactggttgcatcatcctcatcctcagagctggcttcacaggcagtgtggaagagctgcatgagttctcgaaaatggtgggaaacctaagaaaggaggagggctgtattcactgatccttagtaacatgttaacatttatgaagcactatatattgatttgcaaaatcttttgtttattccacacagcaaggttgaga

SEQ ID NO: 18127 - DNA, 2501 bp, Homo sapiens
cggcgcggctgaggcgcggcggccccgtggagcagcgcagtatggcgggcggggcccgggaggtgctcacactgcagttgggacattttgccggtttcgtgggcgcgcactggtggaaccagcaggatgctgcgctgggccgagcgaccgattccaaggagcccccgggagagctgtgccccgacgtcctgtatcgtacgggccggacgctgcacggccaggagacctacacgccgcgactcatcctcatggatctgaagggtagtttgagctccctaaaagaggaaggtggactctacagggacaaacagttggatgctgcaatagcatggcaggggaagctcaccacacacaaagaggaactctatcccaagaacccttatctccaagactttctgagtgcagagggagtgctgagtagtgatggtgtctggagggtcaaatccattcccaatggcaaaggttcctcaccactccccaccgctacaactccaaaaccacttatccctacagaggccagcatcagggtctggtcagacttcctcagagtccatctccatccccggagcatctgtatgattcagaagtacaaccacgatggggaagcaggtcggctggaggcttttggccaaggggaaagtgtcctaaaggaacccaagtaccaggaagagctggaggacaggctgcatttctacgtggaggaatgtgactacttgcagggcttccagatcctgtgtgacctgcacgatggcttctctggggtaggcgcgaaggcggcagagctgctacaagatgaatattcagggcggggaataataacctggggcctgctacctggtccctaccatcgtggggaggcccagagaaacatctatcgtctattaaacacagcttttggtctcgtgcacctgactgctcacagctctcttgtctgccccttgtccttgggtgggagcctgggcctgcgacccgagccacctgtcagcttcccttacctgcattatgatgccactctgcccttccactgcagtgccatcctggctacagccctggacacagtcactgttccttatcgcctgtgttcctctccagtttccatggttcatctggctgacatgctgagcttctgtgggaaaaaggtggtgacagcaggagcaatcatccctttccccttggctccaggccagtcccttcctgattccctgatgcagtttggaggagccaccccatggaccccactgtctgcatgtggggagccttctggaacacgttgctttgcccagtcagtggtgctgaggggtatagacagagcatgccacacaagccacagactaatggtggttttggctttgttctggcagccagctcaccccagggacacctccaccctctgcccttcatgcatgtaccactggggaagaaatcttggctcagtatttacaacagcagcagcctggagtcatgagttcttcccatctgctgctgactccctgcagggtggctcctccttacccccacctcttctcaagctgcagtccaccgggtatggttctggatggttcccccaagggagcagcagtggagagcatcccagtgtttggggcactgtgttcctcttcgtccctgcaccagaccctggaagccttggccagagacctcaccaaactcgacttgcggcgctgggccagcttcatggatgctggagtggagcacgatgacgtagcagagctgctgcaggagctacaaagcctggcccagtgctaccagggtggtgacagcctcgtggactaaagttcccagtgtgggagaaaggagctagtttgcaataaaaacagctggatgcaggagcccagtgtcttcatgcagaggagctcaatgtcgcgggactagctacaccaacatatgcactttttacatttagaaacactgtgattagaccacagaacaataaatatgtgccatcagaccaaaaaaaagtagagaaaggagctgaactccactctcgatgctacttacagaggacatctgtaaagtcttcataaaagaccttgaatgatgcctaggatggcagagcccctgggtcctactccatcctccagcctttgtccttgtcctggcctcctgctctccagatctgtaaactgggctcaaggactgtacaagcagagtacaactacccgcctccccggtgccagggcgcctgttgggtttggtcctgtgtagatgattcccagagtctcattcatccagctcctcttcagacagaaggtccccatggtcagacagctggtctgcattgctggtactggttgcatcatcctcatcctcagagctggcttcacaggcagtgtggaagagctgcatgagttctcgaaaatggtgggaaacctaagaaaggaggagggctgtattcactgatccttagtaacatgttaacatttatgaagcactatatattgatttgcaaaatcttttgtttattccacacagcaaggttgaga

SEQ ID NO: 18128 - DNA, 2423 bp, Homo sapiens
cggcgcggctgaggcgcggcggccccgtggagcagcgcagtatggcgggcggggcccgggaggtgctcacactgcagttgggacattttgccggtttcgtgggcgcgcactggtggaaccagcaggatgctgcgctgggccgagcgaccgattccaaggagcccccgggagagctgtgccccgacgtcctgtatcgtacgggccggacgctgcacggccaggagacctacacgccgcgactcatcctcatggatctgaagggtagtttgagctccctaaaagaggaaggtggactctacagggacaaacagttggatgctgcaatagcatggcaggggaagctcaccacacacaaagaggaactctatcccaagaacccttatctccaagactttctgagtgcagagggagtgctgagtagtgatggtgtctggagggtcaaatccattcccaatggcaaaggttcctcaccactccccaccgctacaactccaaaaccacttatccctacagaggccagcatcagggtctggtcagacttcctcagagtccatctccatccccggagcatctgtatgattcagaagtacaaccacgatggggaagcaggtcggctggaggcttttggccaaggggaaagtgtcctaaaggaacccaagtaccaggaagagctggaggacaggctgcatttctacgtggaggaatgtgactacttgcagggcttccagatcctgtgtgacctgcacgatggcttctctggggtaggcgcgaaggcggcagagctgctacaagatgaatattcagggcggggaataataacctggggcctgctacctggtccctaccatcgtggggaggcccagagaaacatctatcgtctattaaacacagcttttggtctcgtgcacctgactgctcacagctctcttgtctgccccttgtccttgggtgggagcctgggcctgcgacccgagccacctgtcagcttcccttacctgcattatgatgccactctgcccttccactgcagtgccatcctggctacagccctggacacagtcactgttccttatcgcctgtgttcctctccagtttccatggttcatctggctgacatgctgagcttctgtgggaaaaagttacccccacctcttctcaagctgcagtccaccgggtatggttctggatggttcccccaagggagcaggtatgtaggaggtgaagaaaactgagatttcaagtatgggagagtttttactatctccattcctggattaaaagtgctgaaaaagtccacagttaaacattcctttattcaccctatggctcccaagaaaagcattcttcctctggagtactggtgtactaaggggacaatacaccaaatttgttgagtttacaatcaagtctactaaggttggacttccttatcagtttggcgagtcccagggcagaataatcatccatctacaggtctctgtttcctctccctccacagcagtggagagcatcccagtgtttggggcactgtgttcctcttcgtccctgcaccagaccctggaagccttggccagagacctcaccaaactcgacttgcggcgctgggccagcttcatggatgctggagtggagcacgatgacgtagcagagctgctgcaggagctacaaagcctggcccagtgctaccagggtggtgacagcctcgtggactaaagttcccagtgtgggagaaaggagctagtttgcaataaaaacagctggatgcaggagcccagtgtcttcatgcagaggagctcaatgtcgcgggactagctacaccaacatatgcactttttacatttagaaacactgtgattagaccacagaacaataaatatgtgccatcagaccaaaaaaaagtagagaaaggagctgaactccactctcgatgctacttacagaggacatctgtaaagtcttcataaaagaccttgaatgatgcctaggatggcagagcccctgggtcctactccatcctccagcctttgtccttgtcctggcctcctgctctccagatctgtaaactgggctcaaggactgtacaagcagagtacaactacccgcctccccggtgccagggcgcctgttgggtttggtcctgtgtagatgattcccagagtctcattcatccagctcctcttcagacagaaggtccccatggtcagacagctggtctgcattgctggtactggttgcatcatcctcatcctcagagctggcttcacaggcagtgtggaagagctgcatgagttctcgaaaatggtgggaaacctaagaaaggaggagggctgtattcactgatccttagtaacatgttaacatttatgaagcactatatattgatttgcaaaatcttttgtttattccacacagcaaggttgaga

SEQ ID NO: 18129 - DNA, 3170 bp, Homo sapiens
gcgctgccgttatcttcaagaccctcccaccttaccgagctccaggaccggagatgaggagctgagcacaacatgccaacactcgaggggcccacgacagttgctcaagagccatttcgggaataggctgctaggccctggagacagtgaggacttgaactgcagcactcctgtcagacccctggatgtggttccccccgcgtcccacagctaatgactaagctgggaaccgaaagatggaatctagattctcctaagccaaggtttttcccccaactagtgtatatcccagaaagcttggaagagccaagtgctggagagatggtgacagcaggttgtcaggtgatcagaggaaggttagctagaggggaagggtgcccaggctttgacctaacattgtctctgttatttctgtacaggtagtttgagctccctaaaagaggaaggtggactctacagggacaaacagttggatgctgcaatagcatggcaggggaagctcaccacacacaaagaggaactctatcccaagaacccttatctccaagactttctgagtgcagaggtgagggcctctgtcctgaactttttaacccggtgccacaacccgagggtctccataggggcaggtaaacggggattttaatcattttaagtgtcttagaatgatattttgggaaaaagcactccttttcctaaggactgcgactcggtgaacagaaaggaggctatgcggtgtggccagccaactcaaggaggacgaagcaacctttgcctctaaactgcctggaaccaaatgtcgatttttctgacccctcccagggagtgctgagtagtgatggtgtctggagggtcaaatccattcccaatggcaaaggttcctcaccactccccaccgctacaactccaaaaccacttatccctacagaggccagcatcagggtctggtcagacttcctcagagtccatctccatccccggagcatctgtatgattcagaagtacaaccacgatggggaagcaggtcggctggaggcttttggccaaggggaaagtgtcctaaaggaacccaagtaccaggaagagctggaggacaggctgcatttctacgtggaggaatgtgactacttgcagggcttccagatcctgtgtgacctgcacgatggcttctctggggtaggcgcgaaggcggcagagctgctacaagatgaatattcagggcggggaataataacctggggcctgctacctggtccctaccatcgtggggaggcccagagaaacatctatcgtctattaaacacagcttttggtctcgtgcacctgactgctcacagctctcttgtctgccccttgtccttgggtgggagcctgggcctgcgacccgagccacctgtcagcttcccttacctgcattatgatgccactctgcccttccactgcagtgccatcctggctacagccctggacacagtcactgttccttatcgcctgtgttcctctccagtttccatggttcatctggctgacatgctgagcttctgtgggaaaaaggtggtgacagcaggagcaatcatccctttccccttggctccaggccagtcccttcctgattccctgatgcagtttggaggagccaccccatggaccccactgtctgcatgtggggagccttctggaacacgttgctttgcccagtcagtggtgctgaggggtatagacagagcatgccacacaagccagctcaccccagggacacctccaccctctgcccttcatgcatgtaccactggggaagaaatcttggctcagtatttacaacagcagcagcctggagtcatgagttcttcccatctgctgctgactccctgcagggtggctcctccttacccccacctcttctcaagctgcagtccaccgggtatggttctggatggttcccccaagggagcaggtatgtaggaggtgaagaaaactgagatttcaagtatgggagagtttttactatctccattcctggattaaaagtgctgaaaaagtccacagttaaacattcctttattcaccctatggctcccaagaaaagcattcttcctctggagtactggtgtactaaggggacaatacaccaaatttgttgagtttacaatcaagtctactaaggttggacttccttatcagtttggcgagtcccagggcagaataatcatccatctacaggtctctgtttcctctccctccacagcagtggagagcatcccagtgtttggggcactgtgttcctcttcgtccctgcaccagaccctggaagccttggccagagacctcaccaaactcgacttgcggcgctgggccagcttcatggatgctggagtggagcacgatgacgtagcagagctgctgcaggagctacaaagcctggcccagtgctaccagggtggtgacagcctcgtggactaaagttcccagtgtgggagaaaggagctagtttgcaataaaaacagctggatgcaggagcccagtgtcttcatgcagaggagctcaatgtcgcgggactagctacaccaacatatgcactttttacatttagaaacactgtgattagaccacagaacaataaatatgtgccatcagaccaaaaaaaagtagagaaaggagctgaactccactctcgatgctacttacagaggacatctgtaaagtcttcataaaagaccttgaatgatgcctaggatggcagagcccctgggtcctactccatcctccagcctttgtccttgtcctggcctcctgctctccagatctgtaaactgggctcaaggactgtacaagcagagtacaactacccgcctccccggtgccagggcgcctgttgggtttggtcctgtgtagatgattcccagagtctcattcatccagctcctcttcagacagaaggtccccatggtcagacagctggtctgcattgctggtactggttgcatcatcctcatcctcagagctggcttcacaggcagtgtggaagagctgcatgagttctcgaaaatggtgggaaacctaagaaaggaggagggctgtattcactgatccttagtaacatgttaacatttatgaagcactatatattgatttgcaaaatcttttgtttattccacacagcaaggttgaga

SEQ ID NO: 18130 - DNA, 2735 bp, Homo sapiens
cgacgttcagccggcctgcctcgtcctctctgcttccccaggatgctgcgctgggccgagcgaccgattccaaggagcccccgggagagctgtgccccgacgtcctgtatcgtacgggccggacgctgcacggccaggagacctacacgccgcgactcatcctcatggatctgaagggtagtttgagctccctaaaagaggaaggtggactctacagggacaaacagttggatgctgcaatagcatggcaggggaagctcaccacacacaaagaggaactctatcccaagaacccttatctccaagactttctgagtgcagaggtgagggcctctgtcctgaactttttaacccggtgccacaacccgagggtctccataggggcagggagtgctgagtagtgatggtgtctggagggtcaaatccattcccaatggcaaaggttcctcaccactccccaccgctacaactccaaaaccacttatccctacagaggccagcatcagggtctggtcagacttcctcagagtccatctccatccccggagcatctgtatgattcagaagtacaaccacgatggggaagcaggtcggctggaggcttttggccaaggggaaagtgtcctaaaggaacccaagtaccaggaagagctggaggacaggctgcatttctacgtggaggaatgtgactacttgcagggcttccagatcctgtgtgacctgcacgatggcttctctggggtaggcgcgaaggcggcagagctgctacaagatgaatattcagggcggggaataataacctggggcctgctacctggtccctaccatcgtggggaggcccagagaaacatctatcgtctattaaacacagcttttggtctcgtgcacctgactgctcacagctctcttgtctgccccttgtccttgggtgggagcctgggcctgcgacccgagccacctgtcagcttcccttacctgcattatgatgccactctgcccttccactgcagtgccatcctggctacagccctggacacagtcactgttccttatcgcctgtgttcctctccagtttccatggttcatctggctgacatgctgagcttctgtgggaaaaaggtggtgacagcaggagcaatcatccctttccccttggctccaggccagtcccttcctgattccctgatgcagtttggaggagccaccccatggaccccactgtctgcatgtggggagccttctggaacacgttgctttgcccagtcagtggtgctgaggggtatagacagagcatgccacacaagccagctcaccccagggacacctccaccctctgcccttcatgcatgtaccactggggaagaaatcttggctcagtatttacaacagcagcagcctggagtcatgagttcttcccatctgctgctgactccctgcagggtggctcctccttacccccacctcttctcaagctgcagtccaccgggtatggttctggatggttcccccaagggagcaggtatgtaggaggtgaagaaaactgagatttcaagtatgggagagtttttactatctccattcctggattaaaagtgctgaaaaagtccacagttaaacattcctttattcaccctatggctcccaagaaaagcattcttcctctggagtactggtgtactaaggggacaatacaccaaatttgttgagtttacaatcaagtctactaaggttggacttccttatcagtttggcgagtcccagggcagaataatcatccatctacaggtctctgtttcctctccctccacagcagtggagagcatcccagtgtttggggcactgtgttcctcttcgtccctgcaccagaccctggaagccttggccagagacctcaccaaactcgacttgcggcgctgggccagcttcatggatgctggagtggagcacgatgacgtagcagagctgctgcaggagctacaaagcctggcccagtgctaccagggtggtgacagcctcgtggactaaagttcccagtgtgggagaaaggagctagtttgcaataaaaacagctggatgcaggagcccagtgtcttcatgcagaggagctcaatgtcgcgggactagctacaccaacatatgcactttttacatttagaaacactgtgattagaccacagaacaataaatatgtgccatcagaccaaaaaaaagtagagaaaggagctgaactccactctcgatgctacttacagaggacatctgtaaagtcttcataaaagaccttgaatgatgcctaggatggcagagcccctgggtcctactccatcctccagcctttgtccttgtcctggcctcctgctctccagatctgtaaactgggctcaaggactgtacaagcagagtacaactacccgcctccccggtgccagggcgcctgttgggtttggtcctgtgtagatgattcccagagtctcattcatccagctcctcttcagacagaaggtccccatggtcagacagctggtctgcattgctggtactggttgcatcatcctcatcctcagagctggcttcacaggcagtgtggaagagctgcatgagttctcgaaaatggtgggaaacctaagaaaggaggagggctgtattcactgatccttagtaacatgttaacatttatgaagcactatatattgatttgcaaaatcttttgtttattccacacagcaaggttgaga

SEQ ID NO: 18131 - DNA, 2737 bp, Homo sapiens
cggcgcggctgaggcgcggcggccccgtggagcagcgcagtatggcgggcggggcccgggaggtgctcacactgcagttgggacattttgccggtttcgtgggcgcgcactggtggaaccagcaggatgctgcgctgggccgagcgaccgattccaaggagcccccgggagagctgtgccccgacgtcctgtatcgtacgggccggacgctgcacggccaggagacctacacgccgcgactcatcctcatggatctgaagggtagtttgagctccctaaaagaggaaggtggactctacagggacaaacagttggatgctgcaatagcatggcaggggaagctcaccacacacaaagaggaactctatcccaagaacccttatctccaagactttctgagtgcagagggagtgctgagtagtgatggtgtctggagggtcaaatccattcccaatggcaaaggttcctcaccactccccaccgctacaactccaaaaccacttatccctacagaggccagcatcagggtctggtcagacttcctcagagtccatctccatccccggagcatctgtatgattcagaagtacaaccacgatggggaagcaggtcggctggaggcttttggccaaggggaaagtgtcctaaaggaacccaagtaccaggaagagctggaggacaggctgcatttctacgtggaggaatgtgactacttgcagggcttccagatcctgtgtgacctgcacgatggcttctctggggtaggcgcgaaggcggcagagctgctacaagatgaatattcagggcggggaataataacctggggcctgctacctggtccctaccatcgtggggaggcccagagaaacatctatcgtctattaaacacagcttttggtctcgtgcacctgactgctcacagctctcttgtctgccccttgtccttgggtgggagcctgggcctgcgacccgagccacctgtcagcttcccttacctgcattatgatgtaagtctcggtgctcttgttctgactgcggcaggctacagggcctcctcatgctcccagtcagccgctgtctgttactggctctgttcttgaggcccgagcttgaactcagctgtgatgtggcctctcagatcacactgtcctatgcttgtccagcctggggtcaaacatacccctgattcgtcccctgggtctctctggtgttaatattctgcctccacacattcttttccaggcctgaggccaagtgcccatcttggtgtcttcttacaggccactctgcccttccactgcagtgccatcctggctacagccctggacacagtcactgttccttatcgcctgtgttcctctccagtttccatggttcatctggctgacatgctgagcttctgtgggaaaaaggtggtgacagcaggagcaatcatccctttccccttggctccaggccagtcccttcctgattccctgatgcagtttggaggagccaccccatggaccccactgtctgcatgtggggagccttctggaacacgttgctttgcccagtcagtggtgctgaggggtatagacagagcatgccacacaagccagctcaccccagggacacctccaccctctgcccttcatgcatgtaccactggggaagaaatcttggctcagtatttacaacagcagcagcctggagtcatgagttcttcccatctgctgctgactccctgcagggtggctcctccttacccccacctcttctcaagctgcagtccaccgggtatggttctggatggttcccccaagggagcagcagtggagagcatcccagtgtttggggcactgtgttcctcttcgtccctgcaccagaccctggaagccttggccagagacctcaccaaactcgacttgcggcgctgggccagcttcatggatgctggagtggagcacgatgacgtagcagagctgctgcaggagctacaaagcctggcccagtgctaccagggtggtgacagcctcgtggactaaagttcccagtgtgggagaaaggagctagtttgcaataaaaacagctggatgcaggagcccagtgtcttcatgcagaggagctcaatgtcgcgggactagctacaccaacatatgcactttttacatttagaaacactgtgattagaccacagaacaataaatatgtgccatcagaccaaaaaaaagtagagaaaggagctgaactccactctcgatgctacttacagaggacatctgtaaagtcttcataaaagaccttgaatgatgcctaggatggcagagcccctgggtcctactccatcctccagcctttgtccttgtcctggcctcctgctctccagatctgtaaactgggctcaaggactgtacaagcagagtacaactacccgcctccccggtgccagggcgcctgttgggtttggtcctgtgtagatgattcccagagtctcattcatccagctcctcttcagacagaaggtccccatggtcagacagctggtctgcattgctggtactggttgcatcatcctcatcctcagagctggcttcacaggcagtgtggaagagctgcatgagttctcgaaaatggtgggaaacctaagaaaggaggagggctgtattcactgatccttagtaacatgttaacatttatgaagcactatatattgatttgcaaaatcttttgtttattccacacagcaaggttgaga

SEQ ID NO: 18132 - DNA, 2431 bp, Homo sapiens
cggcgcggctgaggcgcggcggccccgtggagcagcgcagtatggcgggcggggcccgggaggtgctcacactgcagttgggacattttgccggtttcgtgggcgcgcactggtggaaccagcaggatgctgcgctgggccgagcgaccgattccaaggagcccccgggagagctgtgccccgacgtcctgtatcgtacgggccggacgctgcacggccaggagacctacacgccgcgactcatcctcatggatctgaagggtagtttgagctccctaaaagaggaaggtggactctacagggacaaacagttggatgctgcaatagcatggcaggggaagctcaccacacacaaagaggaactctatcccaagaacccttatctccaagactttctgagtgcagagggagtgctgagtagtgatggtgtctggagggtcaaatccattcccaatggcaaaggttcctcaccactccccaccgctacaactccaaaaccacttatccctacagaggccagcatcagggtctggtcagacttcctcagagtccatctccatccccggagcatctgtatgattcagaagtacaaccacgatggggaagcaggtcggctggaggcttttggccaaggggaaagtgtcctaaaggaacccaagtaccaggaagagctggaggacaggctgcatttctacgtggaggaatgtgactacttgcagggcttccagatcctgtgtgacctgcacgatggcttctctggggtaggcgcgaaggcggcagagctgctacaagatgaatattcagggcggggaataataacctggggcctgctacctggtccctaccatcgtggggaggcccagagaaacatctatcgtctattaaacacagcttttggtctcgtgcacctgactgctcacagctctcttgtctgccccttgtccttgggtgggagcctgggcctgcgacccgagccacctgtcagcttcccttacctgcattatgatgccactctgcccttccactgcagtgccatcctggctacagccctggacacagtcactgttccttatcgcctgtgttcctctccagtttccatggttcatctggctgacatgctgagcttctgtgggaaaaaggtggtgacagcaggagcaatcatccctttccccttggctccaggccagtcccttcctgattccctgatgcagtttggaggagccaccccatggaccccactgtctgcatgtggggagccttctggaacacgttgctttgcccagtcagtggtgctgaggggtatagacagagcatgccacacaagccagctcaccccagggacacctccaccctctgcccttcatgcatgtaccactggggaagaaatcttggctcagtatttacaacagcagcagcctggagtcatgagttcttcccatctgctgctgactccctgcagggtggctcctccttacccccacctcttctcaagctgcagtccaccggcagtggagagcatcccagtgtttggggcactgtgttcctcttcgtccctgcaccagaccctggaagccttggccagagacctcaccaaactcgacttgcggcgctgggccagcttcatggatgctggagtggagcacgatgacgtagcagagctgctgcaggagctacaaagcctggcccagtgctaccagggtggtgacagcctcgtggactaaagttcccagtgtgggagaaaggagctagtttgcaataaaaacagctggatgcaggagcccagtgtcttcatgcagaggagctcaatgtcgcgggactagctacaccaacatatgcactttttacatttagaaacactgtgattagaccacagaacaataaatatgtgccatcagaccaaaaaaaagtagagaaaggagctgaactccactctcgatgctacttacagaggacatctgtaaagtcttcataaaagaccttgaatgatgcctaggatggcagagcccctgggtcctactccatcctccagcctttgtccttgtcctggcctcctgctctccagatctgtaaactgggctcaaggactgtacaagcagagtacaactacccgcctccccggtgccagggcgcctgttgggtttggtcctgtgtagatgattcccagagtctcattcatccagctcctcttcagacagaaggtccccatggtcagacagctggtctgcattgctggtactggttgcatcatcctcatcctcagagctggcttcacaggcagtgtggaagagctgcatgagttctcgaaaatggtgggaaacctaagaaaggaggagggctgtattcactgatccttagtaacatgttaacatttatgaagcactatatattgatttgcaaaatcttttgtttattccacacagcaaggttgaga

SEQ ID NO: 18133 - DNA, 1703 bp, Homo sapiens
atgaactagaggatcccctagctatacaggtgtcctccagtttccatggttcatctggctgacatgctgagcttctgtgggaaaaaggtggtgacagcaggagcaatcatccctttccccttggctccaggccagtcccttcctgattccctgatgcagtttggaggagccaccccatggaccccactgtctgcatgtggggagccttctggaacacgttgctttgcccagtcagtggtgctgaggggtatagacagagcatgccacacaagccagctcaccccagggacacctccaccctctgcccttcatgcatgtaccactggggaagaaatcttggctcagtatttacaacagcagcagcctggagtcatgagttcttcccatctgctgctgactccctgcagggtggctcctccttacccccacctcttctcaagctgcagtccaccgggtatggttctggatggttcccccaagggagcaggtatgtaggaggtgaagaaaactgagatttcaagtatgggagagtttttactatctccattcctggattaaaagtgctgaaaaagtccacagttaaacattcctttattcaccctatggctcccaagaaaagcattcttcctctggagtactggtgtactaaggggacaatacaccaaatttgttgagtttacaatcaagtctactaaggttggacttccttatcagtttggcgagtcccagggcagaataatcatccatctacaggtctctgtttcctctccctccacagcagtggagagcatcccagtgtttggggcactgtgttcctcttcgtccctgcaccagaccctggaagccttggccagagacctcaccaaactcgacttgcggcgctgggccagcttcatggatgctggagtggagcacgatgacgtagcagagctgctgcaggagctacaaagcctggcccagtgctaccagggtggtgacagcctcgtggactaaagttcccagtgtgggagaaaggagctagtttgcaataaaaacagctggatgcaggagcccagtgtcttcatgcagaggagctcaatgtcgcgggactagctacaccaacatatgcactttttacatttagaaacactgtgattagaccacagaacaataaatatgtgccatcagaccaaaaaaaagtagagaaaggagctgaactccactctcgatgctacttacagaggacatctgtaaagtcttcataaaagaccttgaatgatgcctaggatggcagagcccctgggtcctactccatcctccagcctttgtccttgtcctggcctcctgctctccagatctgtaaactgggctcaaggactgtacaagcagagtacaactacccgcctccccggtgccagggcgcctgttgggtttggtcctgtgtagatgattcccagagtctcattcatccagctcctcttcagacagaaggtccccatggtcagacagctggtctgcattgctggtactggttgcatcatcctcatcctcagagctggcttcacaggcagtgtggaagagctgcatgagttctcgaaaatggtgggaaacctaagaaaggaggagggctgtattcactgatccttagtaacatgttaacatttatgaagcactatatattgatttgcaaaatcttttgtttattccacacagcaaggttgaga

SEQ ID NO: 18134 - DNA, 1529 bp, Homo sapiens
agtacacaggctcaagatggagacacaggctcaagatgaacacgttgctttgcccagtcagtggtgctgaggggtatagacagagcatgccacacaagccagctcaccccagggacacctccaccctctgcccttcatgcatgtaccactggggaagaaatcttggctcagtatttacaacagcagcagcctggagtcatgagttcttcccatctgctgctgactccctgcagggtggctcctccttacccccacctcttctcaagctgcagtccaccgggtatggttctggatggttcccccaagggagcaggtatgtaggaggtgaagaaaactgagatttcaagtatgggagagtttttactatctccattcctggattaaaagtgctgaaaaagtccacagttaaacattcctttattcaccctatggctcccaagaaaagcattcttcctctggagtactggtgtactaaggggacaatacaccaaatttgttgagtttacaatcaagtctactaaggttggacttccttatcagtttggcgagtcccagggcagaataatcatccatctacaggtctctgtttcctctccctccacagcagtggagagcatcccagtgtttggggcactgtgttcctcttcgtccctgcaccagaccctggaagccttggccagagacctcaccaaactcgacttgcggcgctgggccagcttcatggatgctggagtggagcacgatgacgtagcagagctgctgcaggagctacaaagcctggcccagtgctaccagggtggtgacagcctcgtggactaaagttcccagtgtgggagaaaggagctagtttgcaataaaaacagctggatgcaggagcccagtgtcttcatgcagaggagctcaatgtcgcgggactagctacaccaacatatgcactttttacatttagaaacactgtgattagaccacagaacaataaatatgtgccatcagaccaaaaaaaagtagagaaaggagctgaactccactctcgatgctacttacagaggacatctgtaaagtcttcataaaagaccttgaatgatgcctaggatggcagagcccctgggtcctactccatcctccagcctttgtccttgtcctggcctcctgctctccagatctgtaaactgggctcaaggactgtacaagcagagtacaactacccgcctccccggtgccagggcgcctgttgggtttggtcctgtgtagatgattcccagagtctcattcatccagctcctcttcagacagaaggtccccatggtcagacagctggtctgcattgctggtactggttgcatcatcctcatcctcagagctggcttcacaggcagtgtggaagagctgcatgagttctcgaaaatggtgggaaacctaagaaaggaggagggctgtattcactgatccttagtaacatgttaacatttatgaagcactatatattgatttgcaaaatcttttgtttattccacacagcaaggttgaga

SEQ ID NO: 18135 - DNA, 1645 bp, Homo sapiens
ttggtgggataccccttgttctatagacgtggtgacaagagtaagaggctggtgattagacaaaacatctcactgcgggcttcgttaacattagcacgctctgtggtttggtctccctatatattattcactcttgggaacagttgttttatgagctattctactctcgccccgcgccccccgttataaactatttgtgtgtgaggcgtaatgatctactacccaaccgatgacgtgtgttactcggtcgtctatggattcctcaatgagtcggtgcgcctgtttcaatgagagatagccgccactgctgggacgtagttgttgtgctacaaaagccacccggcccttttttatgtcatgacgtggtttttctctttttattctttttttttttttgtcccttctttttttttttttttttgtttttctttttttttttttttttttttttttttttttttttttttttttttttttttttttttttttttttttttttttttttttttttttttccacagttaaacattcctttattcaccctatggctcccaagaaaagcattcttcctctggagtactggtgtactaaggggacaatacaccaaatttgttgagtttacaatcaagtctactaaggttggacttccttatcagtttggcgagtcccagggcagaataatcatccatctacaggtctctgtttcctctccctccacagcagtggagagcatcccagtgtttggggcactgtgttcctcttcgtccctgcaccagaccctggaagccttggccagagacctcaccaaactcgacttgcggcgctgggccagcttcatggatgctggagtggagcacgatgacgtagcagagctgctgcaggagctacaaagcctggcccagtgctaccagggtggtgacagcctcgtggactaaagttcccagtgtgggagaaaggagctagtttgcaataaaaacagctggatgcaggagcccagtgtcttcatgcagaggagctcaatgtcgcgggactagctacaccaacatatgcactttttacatttagaaacactgtgattagaccacagaacaataaatatgtgccatcagaccaaaaaaaagtagagaaaggagctgaactccactctcgatgctacttacagaggacatctgtaaagtcttcataaaagaccttgaatgatgcctaggatggcagagcccctgggtcctactccatcctccagcctttgtccttgtcctggcctcctgctctccagatctgtaaactgggctcaaggactgtacaagcagagtacaactacccgcctccccggtgccagggcgcctgttgggtttggtcctgtgtagatgattcccagagtctcattcatccagctcctcttcagacagaaggtccccatggtcagacagctggtctgcattgctggtactggttgcatcatcctcatcctcagagctggcttcacaggcagtgtggaagagctgcatgagttctcgaaaatggtgggaaacctaagaaaggaggagggctgtattcactgatccttagtaacatgttaacatttatgaagcactatatattgatttgcaaaatcttttgtttattccacacagcaaggttgaga

SEQ ID NO: 18136 - DNA, 1181 bp, Homo sapiens
ggtgggaagtggagaggggagggaggagggaggggaggaagaggaatgtatccacagttaaacattcctttattcaccctatggctcccaagaaaagcattcttcctctggagtactggtgtactaaggggacaatacaccaaatttgttgagtttacaatcaagtctactaaggttggacttccttatcagtttggcgagtcccagggcagaataatcatccatctacaggtctctgtttcctctccctccacagcagtggagagcatcccagtgtttggggcactgtgttcctcttcgtccctgcaccagaccctggaagccttggccagagacctcaccaaactcgacttgcggcgctgggccagcttcatggatgctggagtggagcacgatgacgtagcagagctgctgcaggagctacaaagcctggcccagtgctaccagggtggtgacagcctcgtggactaaagttcccagtgtgggagaaaggagctagtttgcaataaaaacagctggatgcaggagcccagtgtcttcatgcagaggagctcaatgtcgcgggactagctacaccaacatatgcactttttacatttagaaacactgtgattagaccacagaacaataaatatgtgccatcagaccaaaaaaaagtagagaaaggagctgaactccactctcgatgctacttacagaggacatctgtaaagtcttcataaaagaccttgaatgatgcctaggatggcagagcccctgggtcctactccatcctccagcctttgtccttgtcctggcctcctgctctccagatctgtaaactgggctcaaggactgtacaagcagagtacaactacccgcctccccggtgccagggcgcctgttgggtttggtcctgtgtagatgattcccagagtctcattcatccagctcctcttcagacagaaggtccccatggtcagacagctggtctgcattgctggtactggttgcatcatcctcatcctcagagctggcttcacaggcagtgtggaagagctgcatgagttctcgaaaatggtgggaaacctaagaaaggaggagggctgtattcactgatccttagtaacatgttaacatttatgaagcactatatattgatttgcaaaatcttttgtttattccacacagcaaggttgaga

SEQ ID NO: 18137 - DNA, 2101 bp, Homo sapiens
cggcgcggctgaggcgcggcggccccgtggagcagcgcagtatggcgggcggggcccgggaggtgctcacactgcagttgggacattttgccggtttcgtgggcgcgcactggtggaaccagcaggatgctgcgctgggccgagcgaccgattccaaggagcccccgggagagctgtgccccgacgtcctgtatcgtacgggccggacgctgcacggccaggagacctacacgccgcgactcatcctcatggatctgaagggtagtttgagctccctaaaagaggaaggtggactctacagggacaaacagttggatgctgcaatagcatggcaggggaagctcaccacacacaaagaggaactctatcccaagaacccttatctccaagactttctgagtgcagagggagtgctgagtagtgatggtgtctggagggtcaaatccattcccaatggcaaaggttcctcaccactccccaccgctacaactccaaaaccacttatccctacagaggccagcatcagggtctggtcagacttcctcagagtccatctccatccccggagcatctgtatgattcagaagtacaaccacgatggggaagcaggtcggctggaggcttttggccaaggggaaagtgtcctaaaggaacccaagtaccaggaagagctggaggacaggctgcatttctacgtggaggaatgtgactacttgcagggcttccagatcctgtgtgacctgcacgatggcttctctggggtaggcgcgaaggcggcagagctgctacaagatgaatattcagggcggggaataataacctggggcctgctacctggtccctaccatcgtggggaggcccagagaaacatctatcgtctattaaacacagcttttggtctcgtgcacctgactgctcacagctctcttgtctgccccttgtccttgggtgggagcctgggcctgcgacccgagccacctgtcagcttcccttacctgcattatgatgccactctgcccttccactgcagtgccatcctggctacagccctggacacagtcactgttccttatcgcctgtgttcctctccagtttccatggttcatctggctgacatgctgagcttctgtgggaaaaaggtggtgacagcaggagcaatcatccctttccccttggctccaggccagtcccttcctgattccctgatgcagtttggaggagccaccccatggaccccactgtctgcatgtggggagccttctggaacacgttgctttgcccagtcagtggtgctgaggggtatagacagagcatgccacacaagccagctcaccccagggacacctccaccctctgcccttcatgcatgtaccactggggaagaaatcttggctcagtatttacaacagcagcagcctggagtcatgagttcttcccatctgctgctgactccctgcagggtggctcctccttacccccacctcttctcaagctgcagtccaccgggtatggttctggatggttcccccaagggagcaggtatgtaggaggtgaagaaaactgagatttcaagtatgggagagtttttactatctccattcctggattaaaagtgctgaaaaagtccacagttaaacattcctttattcaccctatggctcccaagaaaagcattcttcctctggagtactggtgtactaaggggacaatacaccaaatttgttgagtttacaatcaagtctactaaggttggacttccttatcagtttggcgagtcccagggcagaataatcatccatctacaggtctctgtttcctctccctccacagcagtggagagcatcccagtgtttggggcactgtgttcctcttcgtccctgcaccagaccctggaagccttggccagagacctcaccaaactcgacttgcggcgctgggccagcttcatggatgctggagtggagcacgatgacgtagcagagctgctgcaggagctacaaagcctggcccagtgctaccagggtggtgacagcctcgtggactaaagttcccagtgtgggagaaaggagctagtttgcaataaaaacagctggatgcagga

SEQ ID NO: 18138 - DNA, 1254 bp, Homo sapiens
cggcgcggctgaggcgcggcggccccgtggagcagcgcagtatggcgggcggggcccgggaggtgctcacactgcagttgggacattttgccggtttcgtgggcgcgcactggtggaaccagcaggatgctgcgctgggccgagcgaccgattccaaggagcccccgggagagctgtgccccgacgtcctgtatcgtacgggccggacgctgcacggccaggagacctacacgccgcgactcatcctcatggatctgaaggttacccccacctcttctcaagctgcagtccaccgggtatggttctggatggttcccccaagggagcagcagtggagagcatcccagtgtttggggcactgtgttcctcttcgtccctgcaccagaccctggaagccttggccagagacctcaccaaactcgacttgcggcgctgggccagcttcatggatgctggagtggagcacgatgacgtagcagagctgctgcaggagctacaaagcctggcccagtgctaccagggtggtgacagcctcgtggactaaagttcccagtgtgggagaaaggagctagtttgcaataaaaacagctggatgcaggagcccagtgtcttcatgcagaggagctcaatgtcgcgggactagctacaccaacatatgcactttttacatttagaaacactgtgattagaccacagaacaataaatatgtgccatcagaccaaaaaaaagtagagaaaggagctgaactccactctcgatgctacttacagaggacatctgtaaagtcttcataaaagaccttgaatgatgcctaggatggcagagcccctgggtcctactccatcctccagcctttgtccttgtcctggcctcctgctctccagatctgtaaactgggctcaaggactgtacaagcagagtacaactacccgcctccccggtgccagggcgcctgttgggtttggtcctgtgtagatgattcccagagtctcattcatccagctcctcttcagacagaaggtccccatggtcagacagctggtctgcattgctggtactggttgcatcatcctcatcctcagagctggcttcacaggcagtgtggaagagctgcatgagttctcgaaaatggtgggaaacctaagaaaggaggagggctgtattcactgatccttagtaacatgttaacatttatgaagcactatatattgatttgcaaaatcttttgtttattccacacagcaaggttgaga

SEQ ID NO: 18139 - DNA, 1835 bp, Homo sapiens
cggcgcggctgaggcgcggcggccccgtggagcagcgcagtatggcgggcggggcccgggaggtgctcacactgcagttgggacattttgccggtttcgtgggcgcgcactggtggaaccagcaggatgctgcgctgggccgagcgaccgattccaaggagcccccgggagagctgtgccccgacgtcctgtatcgtacgggccggacgctgcacggccaggagacctacacgccgcgactcatcctcatggatctgaagggtagtttgagctccctaaaagaggaaggtggactctacagggacaaacagttggatgctgcaatagcatggcaggggaagctcaccacacacaaagaggaactctatcccaagaacccttatctccaagactttctgagtgcagagggagtgctgagtagtgatggtgtctggagggtcaaatccattcccaatggcaaaggttcctcaccactccccaccgctacaactccaaaaccacttatccctacagaggccagcatcagggtctggtcagacttcctcagagtccatctccatccccggagcatctgtatgattcagaagtacaaccacgatggggaagcaggtcggctggaggcttttggccaaggggaaagtgtcctaaaggaacccaagtaccaggaagagctggaggacaggctgcatttctacgtggaggaatgtgactacttgcagggcttccagatcctgtgtgacctgcacgatggcttctctggggtaggcgcgaaggcggcagagctgctacaagatgaatattcagggcggggaataataacctggggcctgctacctggtccctaccatcgtggggaggcccagagaaacatctatcgtctattaaacacagcttttggtctcgtgcacctgactgctcacagctctcttgtctgccccttgtccttgggtgggagcctgggcctgcgacccgagccacctgtcagcttcccttacctgcattatgatgccactctgcccttccactgcagtgccatcctggctacagccctggacacagtcactgttccttatcgcctgtgttcctctccagtttccatggttcatctggctgacatgctgagcttctgtgggaaaaaggtggtgacagcaggagcaatcatccctttccccttggctccaggccagtcccttcctgattccctgatgcagtttggaggagccaccccatggaccccactgtctgcatgtggggagccttctggaacacgttgctttgcccagtcagtggtgctgaggggtatagacagagcatgccacacaagccagctcaccccagggacacctccaccctctgcccttcatgcatgtaccactggggaagaaatcttggctcagtatttacaacagcagcagcctggagtcatgagttcttcccatctgctgctgactccctgcagggtggctcctccttacccccacctcttctcaagctgcagtccaccgggtatggttctggatggttcccccaagggagcaggtctctgtttcctctccctccacagcagtggagagcatcccagtgtttggggcactgtgttcctcttcgtccctgcaccagaccctggaagccttggccagagacctcaccaaactcgacttgcggcgctgggccagcttcatggatgctggagtggagcacgatgacgtagcagagctgctgcaggagctacaaagcctggcccagtgctaccagggtggtgacagcctcgtggactaaagttcccagtgtgggagaaaggagctagtttgcaataaaaacagctggatgcagga

SEQ ID NO: 18140 - DNA, 1665 bp, Homo sapiens
cggcgcggctgaggcgcggcggccccgtggagcagcgcagtatggcgggcggggcccgggaggtgctcacactgcagttgggacattttgccggtttcgtgggcgcgcactggtggaaccagcaggatgctgcgctgggccgagcgaccgattccaaggagcccccgggagagctgtgccccgacgtcctgtatcgtacgggccggacgctgcacggccaggagacctacacgccgcgactcatcctcatggatctgaagggtagtttgagctccctaaaagaggaaggtggactctacagggacaaacagttggatgctgcaatagcatggcaggggaagctcaccacacacaaagaggaactctatcccaagaacccttatctccaagactttctgagtgcagagggagtgctgagtagtgatggtgtctggagggtcaaatccattcccaatggcaaaggttcctcaccactccccaccgctacaactccaaaaccacttatccctacagaggccagcatcagggtctggtcagacttcctcagagtccatctccatccccggagcatctgtatgattcagaagtacaaccacgatggggaagcaggtcggctggaggcttttggccaaggggaaagtgtcctaaaggaacccaagtaccaggaagagctggaggacaggctgcatttctacgtggaggaatgtgactacttgcagggcttccagatcctgtgtgacctgcacgatggcttctctggggtaggcgcgaaggcggcagagctgctacaagatgaatattcagggcggggaataataacctggggcctgctacctggtccctaccatcgtggggaggcccagagaaacatctatcgtctattaaacacagcttttggtctcgtgcacctgactgctcacagctctcttgtctgccccttgtccttgggtgggagcctgggcctgcgacccgagccacctgtcagcttcccttacctgcattatgatgccactctgcccttccactgcagtgccatcctggctacagccctggacacagtcactgttccttatcgcctgtgttcctctccagtttccatggttcatctggctgacatgctgagcttctgtgggaaaaaggtggtgacagcaggagcaatcatccctttccccttggctccaggccagtcccttcctgattccctgatgcagtttggaggagccaccccatggaccccactgtctgcatgtggggagccttctggctttgtccttgtcctggcctcctgctctccagatctgtaaactgggctcaaggactgtacaagcagagtacaactacccgcctccccggtgccagggcgcctgttgggtttggtcctgtgtagatgattcccagagtctcattcatccagctcctcttcagacagaaggtccccatggtcagacagctggtctgcattgctggtactggttgcatcatcctcatcctcagagctggcttcacaggcagtgtggaagagctgcatgagttctcgaaaatggtgggaaacctaagaaaggaggagggctgtattcactgatccttagtaacatgttaacatttatgaagcactatatattgatttgcaaaatcttttgtttattccacacagcaaggttgaga

SEQ ID NO: 18141 - DNA, 1487 bp, Homo sapiens
cggcgcggctgaggcgcggcggccccgtggagcagcgcagtatggcgggcggggcccgggaggtgctcacactgcagttgggacattttgccggtttcgtgggcgcgcactggtggaaccagcaggatgctgcgctgggccgagcgaccgattccaaggagcccccgggagagctgtgccccgacgtcctgtatcgtacgggccggacgctgcacggccaggagacctacacgccgcgactcatcctcatggatctgaagggtagtttgagctccctaaaagaggaaggtggactctacagggacaaacagttggatgctgcaatagcatggcaggggaagctcaccacacacaaagaggaactctatcccaagaacccttatctccaagactttctgagtgcagagggagtgctgagtagtgatggtgtctggagggtcaaatccattcccaatggcaaaggttcctcaccactccccaccgctacaactccaaaaccacttatccctacagaggccagcatcagggtctggtcagacttcctcagagtccatctccatccccggagcatctgtatgattcagaagtacaaccacgatggggaagcaggtcggctggaggcttttggccaaggggaaagtgtcctaaaggaacccaagtaccaggaagagctggaggacaggctgcatttctacgtggaggaatgtgactacttgcagggcttccagatcctgtgtgacctgcacgatggcttctctggggtaggcgcgaaggcggcagagctgctacaagatgaatattcagggcggggaataataacctggggcctgctacctggtccctaccatcgtggggaggcccagagaaacatctatcgtctattaaacacagcttttggtctcgtgcacctgactgctcacagctctcttgtctgccccttgtccttgggtgggagcctgggcctgcgacccgagccacctgtcagcttcccttacctgcattatgatgtaagtctcggtgctcttgttctgactgcggcaggctacagggcctcctcatgctcccagtcagccgctgtctgttactggctctgttcttgaggcccgagcttgaactcagctgtgatgtggccttcaaggactgtacaagcagagtacaactacccgcctccccggtgccagggcgcctgttgggtttggtcctgtgtagatgattcccagagtctcattcatccagctcctcttcagacagaaggtccccatggtcagacagctggtctgcattgctggtactggttgcatcatcctcatcctcagagctggcttcacaggcagtgtggaagagctgcatgagttctcgaaaatggtgggaaacctaagaaaggaggagggctgtattcactgatccttagtaacatgttaacatttatgaagcactatatattgatttgcaaaatcttttgtttattccacacagcaaggttgaga

SEQ ID NO: 18142 - DNA, 1177 bp, Homo sapiens
cggcgcggctgaggcgcggcggccccgtggagcagcgcagtatggcgggcggggcccgggaggtgctcacactgcagttgggacattttgccggtttcgtgggcgcgcactggtggaaccagcaggatgctgcgctgggccgagcgaccgattccaaggagcccccgggagagctgtgccccgacgtcctgtatcgtacgggccggacgctgcacggccaggagacctacacgccgcgactcatcctcatggatctgaagggtagtttgagctccctaaaagaggaaggtggactctacagggacaaacagttggatgctgcaatagcatggcaggggaagctcaccacacacaaagaggaactctatcccaagaacccttatctccaagactttctgagtgcagaggactgcgactcggtgaacagaaaggaggctatgcggtgtggccagccaactcaaggaggacgaagcaacctttgcctctaaactgcctggaaccaaatgtcgatttttctgacccctcccagggagtgctgagtagtgatggtgtctggagggtcaaatccattcccaatggcaaaggttcctcaccactccccaccgctacaactccaaaaccacttatccctacagaggccagcatcagggtctggtcagacttcctcagagtccatctccatccccggagcatctgtatgattcagaagtacaaccacgatggggaagcaggtcggctggaggcttttggccaaggggaaagtgtcctaaaggaacccaagtaccaggaagagctggaggacaggctgcatttctacgtggaggaatgtgactacttgcagggcttccagatcctgtgtgacctgcacgatggcttctctggggtaggcgcgaaggcggcagagctgctacaagatgaatattcagggcggggaataataacctggggcctgctacctggtccctaccatcgtgggggccagagacctcaccaaactcgacttgcggcgctgggccagcttcatggatgctggagtggagcacgatgacgtagcagagctgctgcaggagctacaaagcctggcccagtgctaccagggtggtgacagcctcgtggactaaagttcccagtgtgggagaaaggagctagtttgcaataaaaacagctggatgcagga

SEQ ID NO: 18143 - DNA, 358 bp, Homo sapiens
gtaaacggggattttaatcattttaagtgtcttagaatgatattttgggaaaaagcactccttttcctaaggactgcgactcggtgaacagaaaggaggctatgcggtgtggccagccaactcaaggaggacgaagcaacctttgcctctaaactgcctggaaccaaatgtcgatttttctgacccctcccagggagtgctgagtagtgatggtgtctggagggtcaaatccattcccaatggcaaaggtgagacttctccagatactgatggatgggggcttgggtagagcagaaacatggagaaaggtacatttcctctgcttgtcttcaggttcctcaccactccccaccgctac

SEQ ID NO: 18144 - DNA, 447 bp, Homo sapiens
agatgtaagtcttggatcatgtttacttgtggcagggaagcaggtcggctggaggcttttggccaaggggaaagtgtcctaaaggaacccaagtaccaggaagagctggaggacaggctgcatttctacgtggaggaatgtgactacttgcaggtagtggcgtggcaatgtgcactccagggtggaagctcttctcatcctgctaactatcttttgtcactcacccccgtccagggcttccagatcctgtgtgacctgcacgatggcttctctggggtaggcgcgaaggcggcagagctgctacaagatgaatattcagggcggggaataataacctggggcctgctacctggtccctaccatcgtgggtgagtggaacttagagaagtaaacagtcacacagtggggagggagaaatcagaatcccagtgggagagctgcttaata

SEQ ID NO: 18145 - DNA, 1517 bp, Homo sapiens
ctctggccgttgtcactcgactaccaagatggcggcccccgggagctgtgctctatggagctattgcggccgtgggtggtcgcgggcgatgcggggctgccagctcctcgggcttcgtagctcttggcccggggacctactaagtgctcggctcttgtcccaagagaagcgggcagcggaaacgcactttgggtttgagactgtgtcggaagaggagaaggggggcaaagtctatcaggtgtttgaaagtgtggctaagaagtatgatgtgatgaatgatatgatgagtcttggtatccatcgtgtttggaaggatttgctgctctggaagatgcacccgcttcctgggacccagctgcttgatgttgctggaggcacaggtgacattgcattccggttccttaattatgttcagtcccagcatcagagaaaacagaagaggcagttaagggcccaacaaaatttatcctgggaagaaattgccaaagagtaccagaatgaagaagattccttgggcgggtctcgtgtcgtggtgtgtgacatcaacaaggagatgctaaaggttggaaagcagaaagccttggctcaaggatacagagctggacttgcatgggtattaggagatgctgaagaactgccctttgatgatgacaagtttgatatttacaccattgcctttgggatccggaatgtcacacacattgatcaggcactccaggaagctcatcgggtgctgaaaccaggaggacggtttctctgtctggaatttagccaagtgaacaatcccctcatatccaggctttatgatctatatagcttccaggtcatccctgtcctgggagaggtcatcgctggagactggaagtcctatcagtaccttgtagagagtatccgaaggtttccgtctcaggaagagttcaaggacatgatagaagatgcaggctttcacaaggtgacttacgaaagtctaacatcaggcattgtggccattcattctggcttcaaactttaattcctttcctatcatggagcatgaaccagtcatatcctgttgaaagcctggaactgaaggataatctggcaaatgagacagcagcagagcatctcctcttaaggatacgtgccttggactcatgtttgaatcgaacagtctcaaagtggaagaacaaattcttgtcacttttttacagctttctttggagctgcttcagtccatctcccagaggcatttggtctgtatctttgctcaactgctaatttctcttggctgtagggtgtgtggttaaggtacaaccacccctaaagctcagttttgaagtgagtgtatttatagcttctctgctggtgctgccttctagagggatgatagatcatttgaacccaatgacaatttttaaccagaaaatttaattgtacctgaatcaacctttcagcctaggacgaagtctaggcccaagtcagagtattaatgatcatgagaattgtgtgctgaaccagtaaacgagtttaccttttga

SEQ ID NO: 18146 - DNA, 726 bp, Homo sapiens
ctctggccgttgtcactcgactaccaagatggcggcccccgggagctgtgctctatggagctattgcggccgtgggtggtcgcgggcgatgcggggctgccagctcctcgggcttcgtagctcttggcccggggacctactaagtgctcggctcttgtcccaagagaagcgggcagcggaaacgcactttgggtttgagactgtgtcggaagaggagaaggggggcaaagaactcctttaatgtgaaagtttttgctggcatcacttcttctgggacatcttcaacctttttgtcacagctccatttcttgttcatgttgtctatcaggtgtttgaaagtgtggctaagaagtatgatgtgatgaatgatatgatgagtcttggtatccatcgtgtttggaaggatttgctgctctggaagatgcacccgcttcctgggacccagctgcttgatgttgctggaggcacaggtgacattgcattccggttccttaattatgttcagtcccagcatcagagaaaacagaagaggcagttaagggcccaacaaaatttatcctgggaagaaattgccaaagagtaccagaatgaagaagattccttgggcgggtctcgtgtcgtggtgtgtgacatcaacaaggagatgctaaaggttggaaagcagaaagccttggctcaaggatacagagctggacttgcatgagctcattatggtagcatgcttca

SEQ ID NO: 18147 - DNA, 467 bp, Homo sapiens
atcgtctcatgagctagtgtagactgatagaatatgcacggcttgtcacaagggtgacttacgaaagtctaacatcaggcattgtggccattcattctggcttcaaactttaattcctttcctatcatggagcatgaaccagtcatatcctgttgaatgcctggaactgaaggataatctggcaaatgagacagcagcagagcatctcctcttaaggatacgtgccttggactcatgtttgaatcgaacagtctcaaagtggaagaacaaattcttgtcacttttttacagctttctttggagctgcttcagtccatctcccagaggcatttggtctgtatctttgctcaactgctaatttctcttggctgtagggtgtgtggttaaggtacaaccacccctaaagctcagttttgaagtgagtgtatttatagcttctctgctggtgctgccttctagagggatga

SEQ ID NO: 18148 - DNA, 1607 bp, Homo sapiens
ctctggccgttgtcactcgactaccaagatggcggcccccgggagctgtgctctatggagctattgcggccgtgggtggtcgcgggcgatgcggggctgccagctcctcgggcttcgtagctcttggcccggggacctactaagtgctcggctcttgtcccaagagaagcgggcagcggaaacgcactttgggtttgagactgtgtcggaagaggagaaggggggcaaagaactcctttaatgtgaaagtttttgctggcatcacttcttctgggacatcttcaacctttttgtcacagctccatttcttgttcatgttgtctatcaggtgtttgaaagtgtggctaagaagtatgatgtgatgaatgatatgatgagtcttggtatccatcgtgtttggaaggatttgctgctctggaagatgcacccgcttcctgggacccagctgcttgatgttgctggaggcacaggtgacattgcattccggttccttaattatgttcagtcccagcatcagagaaaacagaagaggcagttaagggcccaacaaaatttatcctgggaagaaattgccaaagagtaccagaatgaagaagattccttgggcgggtctcgtgtcgtggtgtgtgacatcaacaaggagatgctaaaggttggaaagcagaaagccttggctcaaggatacagagctggacttgcatgggtattaggagatgctgaagaactgccctttgatgatgacaagtttgatatttacaccattgcctttgggatccggaatgtcacacacattgatcaggcactccaggaagctcatcgggtgctgaaaccaggaggacggtttctctgtctggaatttagccaagtgaacaatcccctcatatccaggctttatgatctatatagcttccaggtcatccctgtcctgggagaggtcatcgctggagactggaagtcctatcagtaccttgtagagagtatccgaaggtttccgtctcaggaagagttcaaggacatgatagaagatgcaggctttcacaaggtgacttacgaaagtctaacatcaggcattgtggccattcattctggcttcaaactttaattcctttcctatcatggagcatgaaccagtcatatcctgttgaaagcctggaactgaaggataatctggcaaatgagacagcagcagagcatctcctcttaaggatacgtgccttggactcatgtttgaatcgaacagtctcaaagtggaagaacaaattcttgtcacttttttacagctttctttggagctgcttcagtccatctcccagaggcatttggtctgtatctttgctcaactgctaatttctcttggctgtagggtgtgtggttaaggtacaaccacccctaaagctcagttttgaagtgagtgtatttatagcttctctgctggtgctgccttctagagggatgatagatcatttgaacccaatgacaatttttaaccagaaaatttaattgtacctgaatcaacctttcagcctaggacgaagtctaggcccaagtcagagtattaatgatcatgagaattgtgtgctgaaccagtaaacgagtttaccttttga

SEQ ID NO: 18149 - DNA, 1165 bp, Homo sapiens
tcgtgccgaattcggcagagggaggcacgtgacattgcattccggttccttaattatgttcagtcccagcatcagagaaaacagaagaggcagttaagggcccaacaaaatttatcctgggaagaaattgccaaagagtaccagaatgaagaagattccttgggcgggtctcgtgtcgtggtgtgtgacatcaacaaggagatgctaaaggttggaaagcagaaagccttggctcaaggatacagagctggacttgcatgggtattaggagatgctgaagaactgccctttgatgatgacaagtttgatatttacaccattgcctttgggatccggaatgtcacacacattgatcaggcactccaggaagctcatcgggtgctgaaaccaggaggacggtttctctgtctggaatttagccaagtgaacaatcccctcatatccaggctttatgatctatatagcttccaggtcatccctgtcctgggagaggtcatcgctggagactggaagtcctatcagtaccttgtagagagtatccgaaggtttccgtctcaggaagagttcaaggacatgatagaagatgcaggctttcacaaggtgacttacgaaagtctaacatcaggcattgtggccattcattctggcttcaaactttaattcctttcctatcatggagcatgaaccagtcatatcctgttgaaagcctggaactgaaggataatctggcaaatgagacagcagcagagcatctcctcttaaggatacgtgccttggactcatgtttgaatcgaacagtctcaaagtggaagaacaaattcttgtcacttttttacagctttctttggagctgcttcagtccatctcccagaggcatttggtctgtatctttgctcaactgctaatttctcttggctgtagggtgtgtggttaaggtacaaccacccctaaagctcagttttgaagtgagtgtatttatagcttctctgctggtgctgccttctagagggatgatagatcatttgaacccaatgacaatttttaaccagaaaatttaattgtacctgaatcaacctttcagcctaggacgaagtctaggcccaagtcagagtattaatgatcatgagaattgtgtgctgaaccagtaaacgagtttaccttttga

SEQ ID NO: 18150 - DNA, 1463 bp, Homo sapiens
ctctggccgttgtcactcgactaccaagatggcggcccccgggagctgtgctctatggagctattgcggccgtgggtggtcgcgggcgatgcggggctgccagctcctcgggcttcgtagctcttggcccggggacctactaagtgctcggctcttgtcccaagagaagcgggcagcggaaacgcactttgggtttgagactgtgtcggaagaggagaaggggggcaaagtctatcaggtgtttgaaagtgtggctaagaagtatgatgtgatgaatgatatgatgagtcttggtatccatcgtgtttggaaggatttgctgctctggaagatgcacccgcttcctgggacccagctgcttgatgttgctggaggcacaggtgacattgcattccggttccttaattatgttcagtcccagcatcagagaaaacagaagaggcagttaagggcccaactgggcgggtctcgtgtcgtggtgtgtgacatcaacaaggagatgctaaaggttggaaagcagaaagccttggctcaaggatacagagctggacttgcatgggtattaggagatgctgaagaactgccctttgatgatgacaagtttgatatttacaccattgcctttgggatccggaatgtcacacacattgatcaggcactccaggaagctcatcgggtgctgaaaccaggaggacggtttctctgtctggaatttagccaagtgaacaatcccctcatatccaggctttatgatctatatagcttccaggtcatccctgtcctgggagaggtcatcgctggagactggaagtcctatcagtaccttgtagagagtatccgaaggtttccgtctcaggaagagttcaaggacatgatagaagatgcaggctttcacaaggtgacttacgaaagtctaacatcaggcattgtggccattcattctggcttcaaactttaattcctttcctatcatggagcatgaaccagtcatatcctgttgaaagcctggaactgaaggataatctggcaaatgagacagcagcagagcatctcctcttaaggatacgtgccttggactcatgtttgaatcgaacagtctcaaagtggaagaacaaattcttgtcacttttttacagctttctttggagctgcttcagtccatctcccagaggcatttggtctgtatctttgctcaactgctaatttctcttggctgtagggtgtgtggttaaggtacaaccacccctaaagctcagttttgaagtgagtgtatttatagcttctctgctggtgctgccttctagagggatgatagatcatttgaacccaatgacaatttttaaccagaaaatttaattgtacctgaatcaacctttcagcctaggacgaagtctaggcccaagtcagagtattaatgatcatgagaattgtgtgctgaaccagtaaacgagtttaccttttga

SEQ ID NO: 18151 - DNA, 1452 bp, Homo sapiens
atttgccaccttcttgtcgtatgaaatatcttttctatgccttggcaaattgccatatttctttctaagtttttatctacttctgatattttatcctttgtgctttcaatgttatgaaatacctccaagaactcctttaatgtgaaagtttttgctggcatcacttcttctgggacatcttcaacctttttgtcacagctccatttcttgttcatgttgtctatcaggtgtttgaaagtgtggctaagaagtatgatgtgatgaatgatatgatgagtcttggtatccatcgtgtttggaaggatttgctgctctggaagatgcacccgcttcctgggacccagctgcttgatgttgctggaggcacaggtgacattgcattccggttccttaattatgttcagtcccagcatcagagaaaacagaagaggcagttaagggcccaactgggcgggtctcgtgtcgtggtgtgtgacatcaacaaggagatgctaaaggttggaaagcagaaagccttggctcaaggatacagagctggacttgcatgggtattaggagatgctgaagaactgccctttgatgatgacaagtttgatatttacaccattgcctttgggatccggaatgtcacacacattgatcaggcactccaggaagctcatcgggtgctgaaaccaggaggacggtttctctgtctggaatttagccaagtgaacaatcccctcatatccaggctttatgatctatatagcttccaggtcatccctgtcctgggagaggtcatcgctggagactggaagtcctatcagtaccttgtagagagtatccgaaggtttccgtctcaggaagagttcaaggacatgatagaagatgcaggctttcacaaggtgacttacgaaagtctaacatcaggcattgtggccattcattctggcttcaaactttaattcctttcctatcatggagcatgaaccagtcatatcctgttgaaagcctggaactgaaggataatctggcaaatgagacagcagcagagcatctcctcttaaggatacgtgccttggactcatgtttgaatcgaacagtctcaaagtggaagaacaaattcttgtcacttttttacagctttctttggagctgcttcagtccatctcccagaggcatttggtctgtatctttgctcaactgctaatttctcttggctgtagggtgtgtggttaaggtacaaccacccctaaagctcagttttgaagtgagtgtatttatagcttctctgctggtgctgccttctagagggatgatagatcatttgaacccaatgacaatttttaaccagaaaatttaattgtacctgaatcaacctttcagcctaggacgaagtctaggcccaagtcagagtattaatgatcatgagaattgtgtgctgaaccagtaaacgagtttaccttttga

SEQ ID NO: 18152 - DNA, 636 bp, Homo sapiens
ctctggccgttgtcactcgactaccaagatggcggcccccgggagctgtgctctatggagctattgcggccgtgggtggtcgcgggcgatgcggggctgccagctcctcgggcttcgtagctcttggcccggggacctactaagtgctcggctcttgtcccaagagaagcgggcagcggaaacgcactttgggtttgagactgtgtcggaagaggagaaggggggcaaagtctatcaggtgtttgaaagtgtggctaagaagtatgatgtgatgaatgatatgatgagtcttggtatccatcgtgtttggaaggatttgctgctctggaagatgcacccgcttcctgggacccagctgcttgatgttgctggaggcacaggtgacattgcattccggttccttaattatgttcagtcccagcatcagagaaaacagaagaggcagttaagggcccaacaaaatttatcctgggaagaaattgccaaagagtaccagaatgaagaagattccttgggcgggtctcgtgtcgtggtgtgtgacatcaacaaggagatgctaaaggttggaaagcagaaagccttggctcaaggatacagagctggacttgcatgagctcattatggtagcatgcttca

SEQ ID NO: 18153 - DNA, 486 bp, Homo sapiens
ctctggccgttgtcactcgactaccaagatggcggcccccgggagctgtgctctatggagctattgcggccgtgggtggtcgcgggcgatgcggggctgccagctcctcgggcttcgtagctcttggcccggggacctactaagtgctcggctcttgtcccaagagaagcgggcagcggaaacgcactttgggtttgagactgtgtcggaagaggagaaggggggcaaagtctatcaggtgtttgaaagtgtggctaagaagtatgatgtgatgaatgatatgatgagtcttggtatccatcgtgtttggaaggatttgctgctctggaagatgcacccgcttcctgggacccagctgcttgatgttgctggaggcacaggtaatgtcgagtttggtatccttcactaccattgagcatgttttacagaaattagtctctcttgtaatgagccagcaccaccaatacaggcagcaccaccaataca

SEQ ID NO: 18154 - DNA, 507 bp, Homo sapiens
gacggtttctctgtctggaatttagccaagtgaacaatcccctcatatccaggttggcattgttaatagggctttatcttcattgtatagccaaggttcccaccccgaaatggattgaaaatagccagtaagctataagcatgaactttgtagttcagagtaccagaggtcagccagttctgaatgacaatacctaggccacaagagtctcaaaccagacccaagttggcttacatatgtatattaagaaattgacttagaagcccctatttaaaaatcaggaaatgcctggtccaatggtagtgggttatcagaacttattagtggcaataacgttgctactcaacccccctctgataaatttgactggcttaaaaaaaaaaaaaatcaggaaatttgggccaagtgcagtggctcatgcttgtaatcccagcactttgggaggctgaggcgggaggatcacttgaggccaggagttcaagaccagcctgggcaaccgtgagaccc

SEQ ID NO: 18155 - DNA, 483 bp, Homo sapiens
attttaaaaatcttttttcttgatggtgaacaagttttgtcctatgctatggaggaggcatagcacagtgattaagagcttgggctctgtagttggactatgtgggtttaaactttaaacccagatcaattgtatattagctacatgagctaatctctttaagcttccatttcctccctggtaaaatgaaattggcaaataactttctaaggttagtgaagataggaaatactcgaaggctgcttactatccttattacattaaagttatgggtatcttgaaactacaaacctgatgtataatttcagttttctctcatggtcttgttactaccatcatactcttgatattttaggatactttaggattacctttgaagaaccctttctagttaattctttgaatatgttttatacttatttgatggtagttgtaactgtgtacatttgaataaaatttctaaccataaaatttcgccattgc

SEQ ID NO: 18156 - DNA, 511 bp, Homo sapiens
cattttaagtcggtaattggcccgacaggggacgtgaactgtacactgagtcacagaatagtacagaaaatctcagaatggcttcacctcccatcaggaaagcctcccgtgtaccaagccctgtagagacacatttctggcatttggaggagtgcagacgttcaaaataagaaagagcttcagaggacaaccgtcccctgggttcccggccttttccacatcagaagactctttgatatgttcccctctttccctagggccccttgttctaaaggatgcagccagcaaactaaactgctctgatcatctaaaaaaaaaggatatgtttcccacagaataaccacagatctatataacgaatgatcactcagttaatatgatgcctctaaaagataagtggcctgtctcatctaaaataatcataatatcaataataatatgattttattgggtgcttactaaagcccagatgagggatttacaatgcttatcttacttaatccttaaaaaa

SEQ ID NO: 18157 - DNA, 396 bp, Homo sapiens
ttttatttctgagtttgaaacgagataacatttttatgatttgtattatgttttctatgagactcatctgaattgcataatctcaatctgctgagtaaaatagtttggccttttgcaaaagccacccctttgctagccttaagcgcttcacttgtttgaaggtggggaatcctgcagagtcttagatcttgggtaccagctgactaaatgtataaattactaattcctacatggatagagggggtgatagccatattacttttaaaataaatgagagaaggaggccacatgaaagaaggcatgaaatatcaaattctctctatgtgaaatagccccctcccgggttcttcctacttatctaactacagatccttcgtagtactcctggcctaggca

SEQ ID NO: 18158 - DNA, 393 bp, Homo sapiens
aagcaagtttcaactttcaccctcatctcagagctctggtaaggattagaacaactcgagtatctttacagaatgacctgtaatctgcaaagtgcttttaattgagaaggatgatgtgttacatgttctgttatgctctttacccaggtctttcatctctgaagaaggcggtgggaaacaaatgttatttctcctcttcatactccttttctcatttattctgcaggtattatattataggtggtacaagtgaatagtaacaatagaggattcattgagtctttagtctgtgttggctacaattctaagctgtttacatatattaactcatttaatccttataacagctctctgagtcaatactgttattgggtccatttttacagatgagta

SEQ ID NO: 18159 - DNA, 365 bp, Homo sapiens
cacccccaccccaatactattgtactgtttattgaataatacttcctttcattgctgatttcagaggacactgtatcataaacttaatattagaataagagctatttcagttcaaaaatgaatttttttctctaattaaaaagaattgttatatttaaacctgatctatttaaatgtagtcagtagtaaaattggctaatgtttaacctgtttgaatggtatttggtgcatattctttcttcccttcaagcacaattaaacataaaagtggctaatcatttcgccctcttgttatccacaaccacagagagcctaccagttttaaacccttgttcatatccagagtaccaccatcttcctggagg

SEQ ID NO: 18160 - DNA, 376 bp, Homo sapiens
cgttcattccacagatactgattgaatgcctgcatgtaacaagccatgcttggggtgctcatgatacagccgtgaatgaaacacacaaaaattgctgctctcatgaaactctcttttttggtgcattgacctttacactgattatatcatctcccccctcaaagaggacaaatctaaggctcagataagttgtatttgtccaaagacaggcacctgggaagtagatgaacagagatcaatatccagttgtctatagcttcaaagcttggtttttttcctctttacctcctaaaagaagtgaggacaagattgctaattaaactgagttcatggaaatattaaaggatatataaacagaaggaagtaataaagaaac

SEQ ID NO: 18161 - DNA, 460 bp, Homo sapiens
tcttttgatggctgttttgtgttcctgccaaggagcagggaggaatgtcatgtctttatgcattatttcttccttcccagcttgtgctaactgcactattttaatatttaaaatcccacgtttttatgactgtatttcaagtcagaatctgacttccttaggaatcccccaaaatgcctttgcatcctgccctgaagggcacctcctttccttttctaacttccccacgtgcttcctctgtgaccttcagccaggaaactacagagcaacaacaggaattagagggaccatggccttcagttagaagacagtagtcaaaagacaggctaaatcacgtgataagtgctaaagtacagtttgtgaggctttttatttaaaatgggagagttgctggttgatatgaaatgatgaaatgactgaatatattaacaagctggattttcactgaagaccacaattt

SEQ ID NO: 18162 - DNA, 401 bp, Homo sapiens
gttggtcaggctggtctcgaactcctgacctcaaggcctgccttggcctcccaaagtgctgggattacaggcataagccaccgtgcccagccacctctgagcactttagatagtatgtcttaagaacaaagacatagcccggcgcaagtggtcacgcctgtaatcccagcagtttgggaggctgagtcgggcggatcaccttaggtcaggagttcgcggcaaaaccccgttactactaaaaatacaaaaaattagctgggtgtggtggcgtgcacctgtaatcccagctactcgggaggctgaggctggagaatcacttgaacccaggaggcagaggctgcagtgagccgagatggcaccactgcactgtagcctgggtgacagagcaagacttggtctca

SEQ ID NO: 18163 - DNA, 424 bp, Homo sapiens
caatgatactttcattacaattttttcagtcaagtatttctttagggaatctttcctataattcatagtgagctaatttgatcatgtattaatagagatttcatggagatttgtttttaaaggtttttatgtgaaacctttaaaaggcctcccaacaaaaactttacttcatgactagatatgatttaatcatgattatgtcaaaattgtaatttttaaaatgccttaagaaaaataatttctgcatacatttgtgtaatttttctaaaatgcaaaatttgtaacaatttctaaggtgtagaaaaaacatttacttaagttgctggtttttttaatattcatgtgtatgttttgggattttgtagatataacctatgccttagattactacatgttgatgtgacttgctgatgtttcaccaaaa

SEQ ID NO: 18164 - DNA, 333 bp, Homo sapiens
agccaattctgacctttaacctttatgcttgactgccaatcagtggctgagaattctggccccagctaaacaaaagttacacactcatcctgccagcatccaacccaaaagctggtagcttctcttctgcttgtctctcatgctactgctgttgtagcatctatgattgctgtgctgagccctcaagaacatggagcagaagcaggataaaaatcttctgatctctagtcagaatcatgtcagccaagtcaatctattcttcataaaccaagagtaatcatagtcacaaacgttgcaataataaaaatgccttattagtacataaaatggaga

SEQ ID NO: 18165 - DNA, 463 bp, Homo sapiens
gtaaccccattacctactcatagaggaggaactggaagccagagagggagatgccttattgacacagagcacaagtggcaggagctggcttcagacctcagtccatccggtgtggcagtccctcttcccaggaccaggtggagctggagagaaggaggaagaggagtctgtgaggtccagatggagatgctcggcaggccctttccaaaggtgggaggtgaggtcggcctggaaccctactggatgcttaagtgtcctgccgcactgctgatgaaagcaggtccccaccgcagtgtatatacattgtgtgtttgcatctaaaacgtctatagttgtttgaaatgtttaaatctttaacccatctgagatgtgttttcatgtatggtgtgacacagagctctaatttgctctttttgcagatatccagtttgctaagcaccatttattgttccaacaccatctt

SEQ ID NO: 18166 - DNA, 521 bp, Homo sapiens
gctgggaagtttggagttcctgggtctttgcctgtgccggagcagctgctctgccaagactccccatatctgtatgtcagactgaaggctctagtggagtggcttcacaagggcgtctcttgacccaagggttgcaaagatccgttggagaagcgtggtttcccagggtcacacgttcactcactgcttccctgggccagagaggttcaccttgctctgtgtcgctccaaggtgggctgtcatcctgcctctcttttctttgttctctgtgggtcaagttgtttccttgattagtcccaatgcaagtacatggatgtttcagatgaaggtgctgtatttactcaccccttttcctgttattttcaagtgtaagttatatgtggctcacattcattttggtttttatgtgggaaatatatacaaagatatctgtcaaatgatagtaactacattttgcttctcaattcagactacatagaaaatggaagacctaaaggaatataatgtaattatcattatag

SEQ ID NO: 18167 - DNA, 496 bp, Homo sapiens
aaacattctaaattttatttttaattattgtaacttcatgagaggtttgttcatgttccttaatttgtagagtttctaattgtcttgagtctctcgggtacaggcttaaggattgatgagttattaaggaaaagaatctacctgctaaatcccccataaaccccccaagagggcctccattttcaatagaagcttaatgaaggagataataaaaaagagaagacaacagaattacagagactaagtaaatatacttatttccttaaatgtacttatttaaatatacttctttaaatatattatataaataaatagaaggagctggggatgtggtggtgcacacctgtagtcctagctactcaggaagttcaggagggatgattgcttgagcccaggacctcaaggctgcagtgaactatgatcacatcactgcattccagcctgggccacagagtgagaccttaaaaaaaagtgagtgagtgagtctctttaaaaa

SEQ ID NO: 18168 - DNA, 929 bp, Homo sapiens
tccgcaagctccctgtgatgcagaatgggaaggcagttcccggcccaagtccccaacgtgttctggccagtttaaaccccactgcgaaccggggaagtggccttattcctgtgacacgggtgagagctgaagtaggtctcggtccctggccgccaggaggtgcaagcaagctaccactactgcagacgctccaggcccgcccgctgtgggtgggactggggaaaggaccccatctcggccttggcaccttctactacaacgcagacaggaatagacaactgcctcaccctgctctgggcctcccctgagctagaccctgtgagattctgggacattgcaagtcaatctggtatgggggacagaattccgaaaatggccccctccgagatttccgtgcccaaatccccagaacctgtaaatatgattatctcacctatgaatagttacactacatggtgaaagggtttttgcggaaataattaaggttactcattagctgatcttaaaataggatatgattctggattattttggtaggtccaaggtatcataagggtccttaaaggcagaagaggaaggtggagaaacttgaagtaggagaagggttccagaggctttgaaggtagagaggtccatgagaggaaatgcaacaggacaggtgtcatgctgagaatctgagaagagctgcaacaacagccagcaagaaaacagacctcatggcccggcgcagtggctcatgcctgtaatcccagcactttgggaggccaaggcgggtggatcacgtcaggagatcgagaccatcctgactaacacagtgaaaccccatctctactaaaaatacagataggccgacccctacagataggccgacccctacagataggccgacccctacagataggccgacccctacagataggccgacccct

SEQ ID NO: 18169 - DNA, 1001 bp, Homo sapiens
tccgcaagctccctgtgatgcagaatgggaaggcagttcccggcccaagtccccaacgtgttctggccagtttaaaccccactgcgaaccggggaagtggccttattcctgtgacacgggtgagagctgaagtaggtctcggtccctggccgccaggaggtgcaagcaagctaccactactgcagacgctccaggcccgcccgctgtgggtgggactggggaaaggaccccatctcggccttggcaccttctactacaacgcagacaggaatagacaactgcctcaccctgctctgggcctcccctgagctagaccctgtgagattctgggacattgcaagtcaatctggtatgggggacagaattccgaaaatggccccctccgagatttccgtgcccaaatccccagaacctgtaaatatgattatctcacctatgaatagttacactacatggtgaaagggtttttgcggaaataattaaggttactcattagctgatcttaaaataggatatgattctggattattttggtaggtccaaggtatcataagggtccttaaaggcagaagaggaaggtggagaaacttgaagtaggagaagggttccagaggctttgaaggtagagaggtccatgagaggaaatgcaacaggacaggtgtcatgctgagaatctgagaagagctgcaacaacagccagcaagaaaacagacctcatggcccggcgcagtggctcatgcctgtaatcccagcactttgggaggccaaggcgggtggatcacgtcaggagatcgagaccatcctgactaacacagtgaaaccccatctctactaaaaatacagaaaattagctgggcgtggtggcaggcgcctgtagtcccagctactcgggagactgaggcaggagactggcatgaacccgggaggcggagcttgaagtgagctgagatcgcgccactgcactccagcctgggcgacagaacgagactccgtctcaaaaa

SEQ ID NO: 18170 - DNA, 368 bp, Homo sapiens
agatcaacgaagaaaagaaggagaaggggaagtaaagaaggggaagaagatcaaaacccaccatgccccaggctcagcggtgtgctgatggaagtggaagagcctgaaatcttgcaggactcactggatagatgttattcgactccgtcaatgttctttgaactacctgactcattccagcactacagaagtgtgttttactcatttgaggaacagcgtgttggctgggctcttgacatggatgaaatggaaaagtaccaagaagtggaagaagaccaagacccatcatgccccaggctcagcagggagctgctggatgagaaagagcctgaagtcttgcgggactccctggatagatgttattcgga

SEQ ID NO: 18171 - DNA, 818 bp, Homo sapiens
aggactctgccggtgcagaatatgaacaacgccatgttcttgcagaaaacgcttagcctgagtttcataggaggtaatcaccagacaactgcagaatgtagaacactgagcaggacaactgacctgtctccttcacatagtccatatcaccacaaatcacacaacaaaaaggagaagagatattttgggttcaaaaaaagtaaaaagataatatagctgcatttctttagttattttgaaccccaaatatttcctcatctttttgttgttgtcattgatggtggtgacatggacttgtttatagaggacaggtcagctgtctggctcaatgatctacattctgaagttgtctgaaaatgtcttcatgattaaattcagcctaaacgttttgccgggaacactgcagagacaatgctgtgagtttccaaccttagcccatctgcgggcagagaaggtctagtttgtccatcagcattatcatgatatcaggactggttacttggttaaggaggggtctaggagatctgtcccttttagagacaccttacttataatgaagtatttgggagggtggttttcaaaagtagaaatgtcctgtattccgatgatcatcctgtaaacattttatcatttattaatcatccctgcctgtgtctattattatattcatatctctacgctggaaactttctgcctctatgtttactgtgcctttgtttttgctagtgtgtgttgttgaaaaaaaaaacattctctgcctgagttttaatttttgtccaaagttattttaatctatacaattaaaagcttttgcctat

SEQ ID NO: 18172 - DNA, 1323 bp, Homo sapiens
agatcaacgaagaaaagaaggagaaggggaagtaaagaaggggaagaagatcaaaacccaccatgccccaggctcagcggtgtgctgatggaagtggaagagcctgaaatcttgcaggactcactggatagatgttattcgactccgtcaatgttctttgaactacctgactcattccagcactacagaagtgtgttttactcatttgaggaacagcacatcagcttcgcccttgacgtggacaataggtttcttactttgatgggaacaagtctccacctggtcttccagatgggagtcatattcccacagtaagcagcccttactaagccgagagatgtcattcctgcaggcaggacctataggcacgtgaagatttgaatgaaactatagttccatttggaagcccagacataggatgggtcagtgggcatggctctattcctattctcagaccatgccagtggcaacctgtgctcagtctgaagacaatggacccaagttaggtgtgacacgttcacataactgtgcagcacatgccgggagtgatcagtcagacattttaatttgaaccacgtatctctgggtagctacaaagttcctcagggatttcattttgcaggcatgtctctgagcttctatacctgctcaaggtcagtgtcatctttgtgtttagctcatccaaaggtgttaccctggtttcaatgaacctaacctcattctttgtatcttcagtgttgaattgttttagctgatccatctttaacacaggagggatccttggctgaggattgtatttcagaaccaccaactgctcttgacaattgttaacccgctaggctcctttggttagagaagccacagtccttcagcctccaattggtgttagtacttaggaagaccacagctagatggacaaacagcattgggaggccttagcccatctgcgggcagagaaggtctagtttgtccatcagcattatcatgatatcaggactggttacttggttaaggaggggtctaggagatctgtcccttttagagacaccttacttataatgaagtatttgggagggtggttttcaaaagtagaaatgtcctgtattccgatgatcatcctgtaaacattttatcatttattaatcatccctgcctgtgtctattattatattcatatctctacgctggaaactttctgcctctatgtttactgtgcctttgtttttgctagtgtgtgttgttgaaaaaaaaaacattctctgcctgagttttaatttttgtccaaagttattttaatctatacaattaaaagcttttgcctat

SEQ ID NO: 18173 - DNA, 373 bp, Homo sapiens
cccttggggtacctctggggctggcgtctttacatcacgacgacagaaagctggcccgcacagactatggccacggcgtcttagaggttttgtttctctgcaggcgtccagtgctctgtttctttccctcctcaccactctccaaaccacactcacacaaatacacgtccctatgtgcaaagacgcgcatatgtatattgtatatcagtgtgacactcacacatacgtgcggtgttagcatagcctttccccctcgagtccctgttgtgcttcccagcacccagcatcctccaaagcaggcagtggcacactatcactcataaactaaatccagccactgcctgctttgtaaataaagttttgctggaacaca

SEQ ID NO: 18174 - DNA, 339 bp, Homo sapiens
tggctaatttttgtatttttagtagagatggggtttcaccatgttgacccaggctggttaactcgaactcctggcctcaagtgattcacccgccttggcttcccaaagtgctgggattatagatgtgagccacggtgcctggccaagaccctgtctcaattaaaaaaaaaaaaaaagggtagggggtgtgttgtaaatacagaaagtagcccaaaggctgggtaccatggtacatgactgtaatcccagctacttgagagtctgagatgggataatcacttgatcccacccaggagtgtgaatcaggcctgggcatcataatgagactatttagtctcc

SEQ ID NO: 18175 - DNA, 1104 bp, Homo sapiens
gccttcatttagcagtaatattcacatttttattttagacagttaagttcatgtgtttgattttgtcatgtcagcataaatgagaaaaagaagtggatcatgcagctaatgagtaaccaacattttgtaaagttttaaagttttagcaaacaacattattccatctcatttaaaggttaaaaaagaagagacaactctagccaaagtagaaatttatattctacacgtccaaactgtctcctagcagcttttggactatatatcacttgatgttaaagtatcttttatttgtaataaatattcaaatttctatttagaagctctaatgtatacctagattaaatcaaatcacagttttatgcttttaaaatatatgtatttcaaactgtatattttaatttctgagtgcatgttatatagtatttaatacttcagatgtcttggcaaattcaatataagtatttattcccacaagcgatatatgggatatctcttaaaaattatgaatatgtaccatttccttcaaagtcatcctagcctatgctgtatcaaaagtattgtatattttatggagatttagtgatatacatgtaaatgttttttaagttattttattgaagttcaatctttacataaaattaaaatctttttttaaaaaaagtgtcagtgccagaactgtaaatgaaaataatcaaataaaagttaaaataattcaaaaaaaaaaaaaaaaaaaaaaaaaaaaaaaaaaaaaaaaaaaaagggggggggggttaaagaattttaccctggggggggcacaattgggtaacccatttttgtggaaagagggggccccataagggaagccgtcgttaaaataaggcagggaagagggcgcgcgacaataaaaacaagctccgatacgataggaaaaccagcgaccgcaagggcacccaatgagggaaagaacccaacaacccgcgagggagcaacaaaatgagacacaaacccccaaacagagaataacagcccgggggaaaataaaaactgtaaagggacaacgtgataacacgccgcgaatataacagcgcagaaaatggcacccggatcgataaagaaataacg

SEQ ID NO: 18176 - DNA, 440 bp, Homo sapiens
aggctgtttgctgctttgtgacaagtgtggcctttattccaagttctagtaccttgctcctcatttccatctgaggcctcttcagaatgacctttacatatttctatcaacattctggtcatgagcacttaagtaatctctaagaagattcaggctgggcacggtggctcacgcctgtaatccctgcactgtgggaggccaaggcaggcagatcacctgaggtttggtgtttgagaccagcctggccaacatggcagaacccctcctctaataaaaatacaaaaattagtggggcttggtggcgcatgcctgtaatcccagctacttgggaggctgaggcaggagaatcacttgaacctggaaggtagaggttgcagtgagctgagattgcaccattgcactccaacttgggcgacagagcaagactgtcttaaaaaaaa

SEQ ID NO: 18177 - DNA, 427 bp, Homo sapiens
gagattccatccgcacgagacaaacccagcagttcggagcagtcaagacaggttggaggaacaaaggaaggaggtcatgttaccagtttctaaggcttggggtcatctggaagaagctggaatcacagtacaggtggaatggaagtgcaatggaagaagtggaaccacagtgaagcatgttccagaaggccagggcggtcggttctgctgcacaaatgaggtcagagcaatcaagagagccaaggaagtcctacttatctggattaaataactcaatctacaaactactcaactttaatataaggtggaaaataggatttcaaaagaaaagaagaaggagaagaacaaggacaagaaactgagttttggcagaaggcaagtgagcaattaaaaataaatctttcatgatttgttcccacaggcaaaa

SEQ ID NO: 18178 - DNA, 1025 bp, Homo sapiens
agtgaggtcggcgcccgccagtaacaaacatggctccctgaagccgctcaggctcaagagcaacatggaggtctgcacttaatcgctcctctccgggggcggccataccgaggaggcgtctcttccgtgcaggcaggctctcctggggacctcagagattctctccagcggcagcggaaaacggacaatgggtggattcgggtccagattctggtaggagggagtttgggatcgagatctggaaaaaagcactagactggaagaggacgcgatggagtcggagccgctggcggggacaaaaaccagaggccggggaaggcgccggtgggaggcaaggcacggatggactttacctgcgcacgcgtcgcagccatctccgcgcacagtggtggccaccgcgactggtgctgaagtgttggcgcgtgccgggcgctccgctgggacccgggttgctggccctgagtctcagctttctcatctgtacggttgggacaagtacagtaaccctcgcccgtcaagacgggccagggctgtggcgagggtccacgccttagagcaggtacctatcttgtgcagggccctgagatggggtctgactcagttcctgcggggaacttcaccagtgacccagtcagtgcccttcagttaaagaccaccaggagcacacttgcaggagtagggctgattggagccattgtacagtgtcgggaacataccaggacactgagaatagtgtcatgtcataaggacccagagcaggtggaccctgctgtgatgcacaaagaggaccacgcaagatatgataaagatctacatcactgaattttggttccatttttgtatctcagcttcccggaaataaaaaagaattctaacattcatactttcagtattttatgtgagaggttttgttgtcaaaatcaagtctgagagcaatgtttgttgggcctttaattggagtcaccaagtgataaaggggacattgtcctcaacaataaccctataataaacacgttttcgacaat

SEQ ID NO: 18179 - DNA, 387 bp, Homo sapiens
  misc_feature (13)..(13): n is a, c, g, or t
tgtgaggaaaggngggtaggataatattcaggcaggagtagggctgattggagccattgtacagtgtcgggaacataccaggacactgagaatagtgtcatgtcataaggacccagagcaggtggaccctgctgtgatgcacaaagaggaccacgcaagatatgataaagatctacatcactgaattttggttccatttttgtatctcagcttcccggaaataaaaaagaattctaacattcatactttcagtattttatgtgagaggttttgttgtcaaaatcaagtctgagagcaatgtttgttgggcctttaattggagtcaccaagtgataaaggggacattgtcctcaacaataaccctataataaacacgttttcgacaat

SEQ ID NO: 18180 - DNA, 502 bp, Homo sapiens
  misc_feature (13)..(13): n is a, c, g, or t
tgtgaggaaaggngggtaggataatattcaggcaggagtagggctgattggagccattgtacagtgtcgggaacataccaggacactgagaatagtgtcatgtcataaggacccagagcaggtggaccctgctgtgatgcacaaagaggaccacgcaagatatgataaagatctacatcactgaattttggttccatttttgtatctcagcttcccggaaataaaaaagaattctaacattcatactttcagtattttatgtgagaggttttgttgtcaaaatcaagtctgagagcaatgtttgttgggcctttaattggagtcaccaagtgataaaggggacattgtcctcaacaataaccctataataaacacgttttcgacaataaatatatgacaatttcttaaaagcaatttcttgggcaatcaagacagtatggcttgagtatggagttatacgatggtttggattaatccagtattaaatctttggttattacag

SEQ ID NO: 18181 - DNA, 246 bp, Homo sapiens
  misc_feature (13)..(13): n is a, c, g, or t
tgtgaggaaaggngggtaggataatattcaggcaggagtagggctgattggagccattgtacagtgtcgggaacataccaggacactgagaatagtgtcatgtcataaggacccagagcaggtggaccctgctgtgatgcacaaagaggaccacgcaagatatgataaagatctacatcactgaattttggttccatttttgtatctcagcttcccggaaataaaaaagaattctaacattcatac

SEQ ID NO: 18182 - DNA, 671 bp, Homo sapiens
  misc_feature (13)..(13): n is a, c, g, or t
tgtgaggaaaggngggtaggataatattcaggcaggagtagggctgattggagccattgtacagtgtcgggaacataccaggacactgagaatagtgtcatgtcataaggacccagagcaggtggaccctgctgtgatgcacaaagaggaccacgcaagatatgataaagatctacatcactgaattttggttccatttttgtatctcagcttcccggaaataaaaaagaattctaacattcatactttcagtattttatgtgagaggttttgttgtcaaaatcaagtctgagagcaatgtttgttgggcctttaattggagtcaccaagtgataaaggggacattgtcctcaacaataaccctataataaacacgttttcgacaataaatatatgacaatttcttaaaagcaatttcttgggcaatcaagacagtatggcttgagtatggagttatacgatggtttggattaatccagtattaaatctttggttattacagaaatcagtggagcctattcttccaaataatccttaaatattacttatctcaactgagattttggtgaaaatttagctttagagcttttattgacctgccaatgacctgaagttaagattattcttttccactgaatgaagacaaaccaccttataaaaattaacccaga

SEQ ID NO: 18183 - DNA, 416 bp, Homo sapiens
ttccacagtctgcagaatataaaataaatgtcttgaataagctacgaagaccaaggcacttttcggagcagatttttttgtcttaaagttttatctcatgcaaacactgcatataacacaaacttatataatcaatgcttttagcaaaatgtcatagtagaaccaaggcccagttgttagctgaaatctatataaatataggcaggagtagggctgattggagccattgtacagtgtcgggaacataccaggacactgagaatagtgtcatgtcataaggacccagagcaggtggaccctgctgtgatgcacaaagaggaccacgcaagatatgataaagatctacatcactgaattttggttccatttttgtatctcagcttcccggaaataaaaaagaattctaacattcatac

SEQ ID NO: 18184 - DNA, 917 bp, Homo sapiens
agtgaggtcggcgcccgccagtaacaaacatggctccctgaagccgctcaggctcaagagcaacatggaggtctgcacttaatcgctcctctccgggggcggccataccgaggaggcgtctcttccgtgcaggcaggctctcctggggacctcagagattctctccagcggcagcggaaaacggacaatgggtggattcgggtccagattctggtaggagggagtttgggatcgagatctggaaaaaagcactagactggaagaggacgcgatggagtcggagccgctggcggggacaaaaaccagaggccggggaaggcgccggtgggaggcaaggcacggatggactttacctgcgcacgcgtcgcagccatctccgcgcacagtggtggccaccgcgactggtgctgaagtgttggcgcgtgccgggcgctccgctgggacccgggttgctggccctgagtctcagctttctcatctgtacggttgggacaagtacagtaaccctcgcccgtcaagacgggccagggctgtggcgagggtccacgccttagagcaggtacctatcttgtgcagggccctgagatggggtctgactcagttcctgcggggaacttcaccagtgacccagtcagtgcccttcagttaaagaccaccaggagcacacttgcaggagtagggctgattggagccattgtacagtgtcgggaacataccaggacactgagaatagtgtcatgtcataaggacccagagcaggtggaccctgctgtgatgcacaaagaggaccacgcaagatatgataaagatctacatcactgaattttggttccatttttgtatctcagcttcccggaaataaaaaagaattctaacattcatacaaaaaaataataataatggcctcgttggcctca

SEQ ID NO: 18185 - DNA, 344 bp, Homo sapiens
aggagactaatgggagactgacacagagcttaggatctctgagggccacagcctcaggggtgataaaacaaaacacactcagcttgtctgtctcagtcttgcccctcagtgggatggaaaggagtctctctcccctcagtgcctacccacagcttgcacttaggtaggtctggggctggtagtcagtctgtgtaagcccaacagttccaagccaaaaatctgaagtattcatagatggtagtattcctagatgcatggcagaaaaaaatgtaaatatgtaaatcctctctgtaggaatgcattttaaatagaggactcagtttccaaagacatgagatggtcac

SEQ ID NO: 18186 - DNA, 299 bp, Homo sapiens
ccagtcatatggtaccctttgaatgccaccgcccccccagcccctgagatggtttttttccagtgtaaaactcatgtaaaccactgaagagatatttcagttgaaggaagaaaacagaagcagcagccatctccgccaccaggagcaaacacactgcgcactttcatccacggcaagggcgaggggtcaacgtggaacttttcaagcatgggttgtggcaagcttatctatccaagtttccctaaaagtccaagctgtttcatttttgattccatctctccttctaccctgatatcgtg

SEQ ID NO: 18187 - DNA, 1091 bp, Homo sapiens
tgtgtgtgtgtgtgtgtgtgtgtgtgtatacacaggatacgtgggaacactacttcctgctccatttttctgttaacttaaaactgctctgaaaaacagtctattatttttttaaaaaatacacccactatatgctatctataaaagatacacaacttaaaactgacaaacccacaagcatagctggagacttaaaacattactagaatagtcaaagaaaaaatacgtgttctgaacaacattatgctccaacttgagttgatattcacagaacactacacccaacaactattacatattcttatcaagtgcatatggaacattcaccaagatagactattggtagtctcagcagatttcaaaggcttaaaacattacacagtacaatttctaaccaccccagagagtaaaatatctagaaaagcctcatatatttggaaactaaacatatttctaaataacccatgggacaaagaagaaaatcacaggagaaattaaaatatagtttcaactaaacaaaagccaaaacatcaaaattttgaaatgcattagttttagagcttagaaggaaatttatatacttaaatgcttataatagaaaagaagaaaagtttaaatcagtgatataagctttcaccttaagctaaaaaaagaaaagcaaattaaacccaaaataagtagacagaagtaggtaagaacagaaatcagtgaagcatacgatagagacaacagaatgaatgctggttctttaaaaagatctaatagatacatctctatacagactgatcaagaaaagtcacatattaagatgtgtaatgggcattatgacatctatatacgtttaaaaggcaaacaggaataatataaacaattttatgccaatatcaaattaccaaaattggcacaagaaaaaaatgatagccctacatcaattaaagaaattgtaaatctttccaaaaagaaacctccaggccctaatggctacactagagaactcttaccaaggccattacgaggaagtaataccagtcttatctaaactcttcagtattaccaagaagacaaaactccacaggccaatatccctcatg

SEQ ID NO: 18188 - DNA, 398 bp, Homo sapiens
ccactactctacttggaggggaaagaggtttctcttaaggaagatggcattgtctggacctgccataatgtttttatacacaacatacaatattcaatcaaaaaggccaggcatggtggctcacgcctgtaatccagcactttgggaggctgaggcaggcaggtcacttgagcccaggagttcaagaccagcctggacaacacagtgaaaccccatctctataaaaaaaagaaaataagaaagaaagaaaaaattagctgggcgtagtgctgtgcacctgtagtcccagctactcaggaggctgtggtgggaggacctcttgagcccaagaagtcaaggctgcagtgagttgtgatcaccactgcactccagtgtgggcaacagagcaagactctgtc

SEQ ID NO: 18189 - DNA, 410 bp, Homo sapiens
tgaacttcaaggctctcctactgccctaactcagtcatgggatatccacaaaaaacttaagagcttagcctttttctctcagctgggcttagccccatagatgaaagacattccttgttaagggtaaggtgtagctgctgcagatacagtttgcctttagagatatggacaggagccctggataacaagacacgtagtgagggaaaacatcttgattggtatcaagagaagacaggggttgagtcctgactaaactatttactaacattaggaattatattagcaaattttctgagcttcagattcctcattctaaagtagaaacaacagtcctttctgcccagccctattcacgatgtaacaagtttcaaatgacctaattggaatgaagactatacgtgctacataaa

SEQ ID NO: 18190 - DNA, 1247 bp, Homo sapiens
acacataaaattaaccatcacaagttcaccccttctcagttgggctcccatacacatcttcaaccatactgaatctccaaatactgacaataacatggccatagttccacctaacatgatgctgctatcctgcatacaccaaaaatgctctgtttctttccccagaagaggatgcaaagtctttgggtgacatttacttttcttgatatcctgtaccttaaatatatgatgtaaagctaacaatacctaaatactataagtcaatatatcttatgttatatgataaagggatgagagggaagaaagcaaagatatttgagatagaaacacacacacacacacacatttcatgtagcttcaggtttctctgataaacattctgaaattgctccttgaattttcagtacctaattaaaggtatggtagtttctctttaatactgtgatgccttgtttgtgagtttggataactcagtggcctttataactccagtcattcattaaagatgctattttgaaagcattgtctgggagtttatattgacttttcttgcaaatggacatccccaacctcctcacagtgagaactaatgaatataattttcacccatttcttctccacccgtttcttcttaacctacaatgcagttaaatccagtggttaaagaatctgttgagcatttcgtgtatgtaattccctaatagtggctctagatgtaatggtttgcattaatctatttaacttagttttatgtaatgaattaaactaaaactcactctatctgtctgtctctctctctctctctctgtgtacatgtctttatttatttatttatttatttatttatttatttattttagacggagtctcgctctgtcgcccaggctggaatgcagtggcacaatcttggctcactgcaacctccgcctcccgggttcaagtgattctcctgcctcagcctcctgagtagctgggactacaggggcacatcactatgcccagctatgttttatattcttaatagagatggggtttcactcttctggccgggctggtcttgaactcccgaccttgcgatccacccaccttggcctcccaaagtcctgggattacagacatgagcaaccacacctggctgtctctttttataaaaaatacaagcatatatatttagggttatgtggaataatatgcctttgccagtttagtgcttttgaacatacatcagtcatggcatttaggcatga

SEQ ID NO: 18191 - DNA, 374 bp, Homo sapiens
gaaatttgttttttaaaaaactcaaatacacaatttattcttctgataatcttcctgtattttttccataaggaggtaggaaaagtaggaaacaaaattttgatggaggatgaataaagatattgtggacatggtttctttattgcaatcagaatcctttctgtttgtcacccttcctaaacaatctgataaatgtgtttattatcacagtaatctgttgtcctgctttgccaagctgtcagtcaggacaagcaattataaggaacaggaagactcatcttggctgatggccaggtgggcaggtgggaataagaggtttattcacctgtggtacaaagtaaatgggtagaaaggaaaattgagttgccagggag

SEQ ID NO: 18192 - DNA, 2701 bp, Homo sapiens
aacgaaattaacgggaggtctgactgcaaggggagggggctcgcgatctaaaacgagaagagatctcggggtctcatactgcgccattcggctgcggtacatctcggcactctagctgcagccgggagaggccttgccgccaccgctgtcgcccaagcctccactgccgctgccacctcagcgccggcctctgcatccccagctccagctccgctctgcgccgctgctgccatcgccgctgccactcaagcatccgtgagtcattttctgcccatctctggtcgcgcggtctccctggtagagtttgtaggcttgcaagatggcagaagcagattttaaaatggtctcggaacctgtcgcccatggggttgccgaagaggagatggctagctcgactagtgattctggggaagaatctgacagcagtagctctagcagcagcactagtgacagcagcagcagcagcagcactagtggcagcagcagcggcagcggcagcagcagcagcagcagcggcagcactagcagccgcagccgcttgtatagaaagaagagggtacctgagccttccagaagggcgcggcgggccccgttgggaacaaatttcgtggataggctgcctcaggcagttagaaatcgtgtgcaagcgcttagaaacattcaagatgaatgtgacaaggtagataccctgttcttaaaagcaattcatgatcttgaaagaaaatatgctgaactcaacaagcctctgtatgataggcggtttcaaatcatcaatgcagaatacgagcctacagaagaagaatgtgaatggaattcagaggatgaggagttcagcagtgatgaggaggtgcaggataacacccctagtgaaatgcctcccttagagggtgaggaagaagaaaaccctaaagaaaacccagaggtgaaagctgaagagaaggaagttcctaaagaaattcctgaggtgaaggatgaagaaaaggaagttcctaaagaaattcctgaggtaaaggctgaagaaaaagcagattctaaagactgtatggaggcaacccctgaagtaaaagaagatcctaaagaagtcccccaggtaaaggcagatgataaagaacagcctaaagcaacagaggctaaggcaagggctgcagtaagagagactcataaaagagttcctgaggaaaggcttcaggacagtgtagatcttaaaagagctaggaagggaaagcctaaaagagaagaccctaaaggcattcctgactattggctgattgttttaaagaatgttgacaagctcgggcctatgattcagaagtatgatgagcccattctgaagttcttgtcggatgttagcctgaagttctcaaaacctggccagcctgtaagttacacctttgaatttcattttctacccaacccatacttcagaaatgaggtgctggtgaagacatatataataaaggcaaaaccagatcacaatgatcccttcttttcttggggatgggaaattgaagattgcaaaggctgcaagatagactggagaagaggaaaagatgttactgtgacaactacccagagtcgcacaactgctactggagaaattgaaatccagccaagagtggttcctaatgcatcattcttcaacttctttagtcctcctgagattcctatgattgggaagctggaaccacgagaagatgctatcctggatgaggactttgaaattgggcagattttacatgataatgtcatcctgaaatcaatctattactatactggagaagtcaatggtacctactatcaatttggcaaacattatggaaacaagaaatacagaaaataagtcaatctgaaagatttttcaagaatcttaaaatctcaagaagtgaagcagattcatacagccttgaaaaaagtaaaaccctgacctgtaacctgaacactattattccttatagtcaagtttttgtggtttcttggtagtctatattttaaaaatagtcctaaaaagtgtctaagtgccagtttattctatctaggctgttgtagtataatattcttcaaaatatgtaagctgttgtcaattatctaaagcatgttagtttggtgctacacagtgttgatttttgtgatgtcctttggtcatgtttctgttagactgtagctgtgaaactgtcagaattgttaactgaaacaaatatttgcttgaaaaaaaaagttcatgaagtaccaatgcaagtgttttatttttttcttttttccagcccataagactaagggtttaaatctgcttgcactagctgtgccttcattagtttgctatagaaatccagtacttatagtaaataaaacagtgtattttgaagtttgactgcttgaaaaagattagcatacatctaatgtgaaaagaccacatttgattcaactgagaccttgtgtatgtgacatatagtggcctataaatttaatcataatgatgttattgtttaccactgaggtgttaatataacatagtatttttgaaaaagtttcttcatcttatattgtgtaattgtaaactaaagataccgtgttttctttgtattgtgttctaccttccctttcactgaaaatgatcacttcatttgatactgtttttcatgttcttgtattgcaacctaaaataaataaatattaaagtgtgttatactataaaaatctagcc

SEQ ID NO: 18193 - DNA, 2731 bp, Homo sapiens
aacgaaattaacgggaggtctgactgcaaggggagggggctcgcgatctaaaacgagaagagatctcggggtctcatactgcgccattcggctgcggtacatctcggcactctagctgcagccgggagaggccttgccgccaccgctgtcgcccaagcctccactgccgctgccacctcagcgccggcctctgcatccccagctccagctccgctctgcgccgctgctgccatcgccgctgccacctccgcagcccgggcctccgccgccgccactcaagcatccgtgagtcattttctgcccatctctggtcgcgcggtctccctggtagagtttgtaggcttgcaagatggcagaagcagattttaaaatggtctcggaacctgtcgcccatggggttgccgaagaggagatggctagctcgactagtgattctggggaagaatctgacagcagtagctctagcagcagcactagtgacagcagcagcagcagcagcactagtggcagcagcagcggcagcggcagcagcagcagcagcagcggcagcactagcagccgcagccgcttgtatagaaagaagagggtacctgagccttccagaagggcgcggcgggccccgttgggaacaaatttcgtggataggctgcctcaggcagttagaaatcgtgtgcaagcgcttagaaacattcaagatgaatgtgacaaggtagataccctgttcttaaaagcaattcatgatcttgaaagaaaatatgctgaactcaacaagcctctgtatgataggcggtttcaaatcatcaatgcagaatacgagcctacagaagaagaatgtgaatggaattcagaggatgaggagttcagcagtgatgaggaggtgcaggataacacccctagtgaaatgcctcccttagagggtgaggaagaagaaaaccctaaagaaaacccagaggtgaaagctgaagagaaggaagttcctaaagaaattcctgaggtgaaggatgaagaaaaggaagttcctaaagaaattcctgaggtaaaggctgaagaaaaagcagattctaaagactgtatggaggcaacccctgaagtaaaagaagatcctaaagaagtcccccaggtaaaggcagatgataaagaacagcctaaagcaacagaggctaaggcaagggctgcagtaagagagactcataaaagagttcctgaggaaaggcttcaggacagtgtagatcttaaaagagctaggaagggaaagcctaaaagagaagaccctaaaggcattcctgactattggctgattgttttaaagaatgttgacaagctcgggcctatgattcagaagtatgatgagcccattctgaagttcttgtcggatgttagcctgaagttctcaaaacctggccagcctgtaagttacacctttgaatttcattttctacccaacccatacttcagaaatgaggtgctggtgaagacatatataataaaggcaaaaccagatcacaatgatcccttcttttcttggggatgggaaattgaagattgcaaaggctgcaagatagactggagaagaggaaaagatgttactgtgacaactacccagagtcgcacaactgctactggagaaattgaaatccagccaagagtggttcctaatgcatcattcttcaacttctttagtcctcctgagattcctatgattgggaagctggaaccacgagaagatgctatcctggatgaggactttgaaattgggcagattttacatgataatgtcatcctgaaatcaatctattactatactggagaagtcaatggtacctactatcaatttggcaaacattatggaaacaagaaatacagaaaataagtcaatctgaaagatttttcaagaatcttaaaatctcaagaagtgaagcagattcatacagccttgaaaaaagtaaaaccctgacctgtaacctgaacactattattccttatagtcaagtttttgtggtttcttggtagtctatattttaaaaatagtcctaaaaagtgtctaagtgccagtttattctatctaggctgttgtagtataatattcttcaaaatatgtaagctgttgtcaattatctaaagcatgttagtttggtgctacacagtgttgatttttgtgatgtcctttggtcatgtttctgttagactgtagctgtgaaactgtcagaattgttaactgaaacaaatatttgcttgaaaaaaaaagttcatgaagtaccaatgcaagtgttttatttttttcttttttccagcccataagactaagggtttaaatctgcttgcactagctgtgccttcattagtttgctatagaaatccagtacttatagtaaataaaacagtgtattttgaagtttgactgcttgaaaaagattagcatacatctaatgtgaaaagaccacatttgattcaactgagaccttgtgtatgtgacatatagtggcctataaatttaatcataatgatgttattgtttaccactgaggtgttaatataacatagtatttttgaaaaagtttcttcatcttatattgtgtaattgtaaactaaagataccgtgttttctttgtattgtgttctaccttccctttcactgaaaatgatcacttcatttgatactgtttttcatgttcttgtattgcaacctaaaataaataaatattaaagtgtgttatactataaaaatctagcc

SEQ ID NO: 18194 - DNA, 2466 bp, Homo sapiens
aacgaaattaacgggaggtctgactgcaaggggagggggctcgcgatctaaaacgagaagagatctcggggtctcatactgcgccattcggctgcggtacatctcggcactctagctgcagccgggagaggccttgccgccaccgctgtcgcccaagcctccactgccgctgccacctcagcgccggcctctgcatccccagctccagctccgctctgcgccgctgctgccatcgccgctgccacctccgcagcccgggcctccgccgccgccactcaagcatccgtgagtcattttagccgcttgtatagaaagaagagggtacctgagccttccagaagggcgcggcgggccccgttgggaacaaatttcgtggataggctgcctcaggcagttagaaatcgtgtgcaagcgcttagaaacattcaagatgaatgtgacaaggtagataccctgttcttaaaagcaattcatgatcttgaaagaaaatatgctgaactcaacaagcctctgtatgataggcggtttcaaatcatcaatgcagaatacgagcctacagaagaagaatgtgaatggaattcagaggatgaggagttcagcagtgatgaggaggtgcaggataacacccctagtgaaatgcctcccttagagggtgaggaagaagaaaaccctaaagaaaacccagaggtgaaagctgaagagaaggaagttcctaaagaaattcctgaggtgaaggatgaagaaaaggaagttcctaaagaaattcctgaggtaaaggctgaagaaaaagcagattctaaagactgtatggaggcaacccctgaagtaaaagaagatcctaaagaagtcccccaggtaaaggcagatgataaagaacagcctaaagcaacagaggctaaggcaagggctgcagtaagagagactcataaaagagttcctgaggaaaggcttcaggacagtgtagatcttaaaagagctaggaagggaaagcctaaaagagaagaccctaaaggcattcctgactattggctgattgttttaaagaatgttgacaagctcgggcctatgattcagaagtatgatgagcccattctgaagttcttgtcggatgttagcctgaagttctcaaaacctggccagcctgtaagttacacctttgaatttcattttctacccaacccatacttcagaaatgaggtgctggtgaagacatatataataaaggcaaaaccagatcacaatgatcccttcttttcttggggatgggaaattgaagattgcaaaggctgcaagatagactggagaagaggaaaagatgttactgtgacaactacccagagtcgcacaactgctactggagaaattgaaatccagccaagagtggttcctaatgcatcattcttcaacttctttagtcctcctgagattcctatgattgggaagctggaaccacgagaagatgctatcctggatgaggactttgaaattgggcagattttacatgataatgtcatcctgaaatcaatctattactatactggagaagtcaatggtacctactatcaatttggcaaacattatggaaacaagaaatacagaaaataagtcaatctgaaagatttttcaagaatcttaaaatctcaagaagtgaagcagattcatacagccttgaaaaaagtaaaaccctgacctgtaacctgaacactattattccttatagtcaagtttttgtggtttcttggtagtctatattttaaaaatagtcctaaaaagtgtctaagtgccagtttattctatctaggctgttgtagtataatattcttcaaaatatgtaagctgttgtcaattatctaaagcatgttagtttggtgctacacagtgttgatttttgtgatgtcctttggtcatgtttctgttagactgtagctgtgaaactgtcagaattgttaactgaaacaaatatttgcttgaaaaaaaaagttcatgaagtaccaatgcaagtgttttatttttttcttttttccagcccataagactaagggtttaaatctgcttgcactagctgtgccttcattagtttgctatagaaatccagtacttatagtaaataaaacagtgtattttgaagtttgactgcttgaaaaagattagcatacatctaatgtgaaaagaccacatttgattcaactgagaccttgtgtatgtgacatatagtggcctataaatttaatcataatgatgttattgtttaccactgaggtgttaatataacatagtatttttgaaaaagtttcttcatcttatattgtgtaattgtaaactaaagataccgtgttttctttgtattgtgttctaccttccctttcactgaaaatgatcacttcatttgatactgtttttcatgttcttgtattgcaacctaaaataaataaatattaaagtgtgttatactataaaaatctagcc

SEQ ID NO: 18195 - DNA, 423 bp, Homo sapiens
ctgtgatattacaaataaaatccaaaagttgtaagttcttatttttggagagaaaacgtcatttcacttatgctcatagcatttctttcagtaccttttctgatttattaaaaatttacatctgaaagacatacaaaataaaacctcagtactttctacatgtgttttctgtacacactaaataatactggaggaaattacacatctaagacttaacagacatgcaaggtaattggagaattaaactctagtgaaggagtcaataagtaacataaataatactagtactctaaacatataatgtgactagatagtgtgatcattgtggtcagtatctggcttaagctaaacaaaaagctttagaaaagttcattttcacttggttaatttccttactgggtacatggttgatgaattcagttc

SEQ ID NO: 18196 - DNA, 1501 bp, Homo sapiens
  misc_feature (1319)..(1319): n is a, c, g, or t
agaatgggtatctcaggctgtgagtaatttgatatagaacttttcacctccaggtcagtgggaacacagtaggagcaagggaagggcagaggggcttatttcatataagggcttcttgtcgcctgaactatggttgaagttccctcacagaacagagcagctggtcacagctctgcccaggcatttctgtgtctgcatcttcctgctgtacttgcatatcaagaagcatttcagaccacaggaatgcaggattccaaggcgccaatttaccttggaatttgaaaagatgatggaaatgatgttaaagaaaaagaaaattcgagtgattttcttatttgaggtcaaaatgggtcataaagcagtggagacaactcgcaaaatcaacaacacatttggttcaggaactgctaacaaatgtacagtgcagtggtggttcaagaagttttgcaaaggagaggagagccttgaaaacgaggaaaacagtggctggctataggaagttgacaatgaccaactgagagcaaccatggaagctgatcctcttacaactgcgtgagaagttgccaaggaactcagcgttgagcattctagagtctttcagcatttgaagcaaattgggaaggtgaaaaagctggataagtggatgcctcatgagatgagtgaaaatttaaaaaaaaataaaataaaaaacaaaattgtcattttgaagtgtcatcttctcttactctaagcaacaacaacaaatcatttctcaatcagtttgtgacgttcaatgaaatgtggattttatacgacaactggtgatgaccagctcagtggctagaccaagaagctccaaaacacttcccaaagccaaacttggaccaaaaaaaggtcatgttcgctgtttggtggtctgctgctggtctgatccactattgctttctgactcccggcgaaaccattacatctgagaagtatgctcagcaattcaaagagatgaccgaaaacttcaacccctgcagtcagcaatggtcaacagaaagggcccaattctccacgacaatgcatgatcgcacattacacaactaaagcttcaaaagttgaactaactgggctacgaagttttgcctcatccaccatattcacctgacctcccgccaaccgactaccacttcttcaatcatctcgacaactttttgcaaggaaaacacttccacaaccagtagaatgcaaaaagtgctttccaagagttcactgaatcctgaagcacggatttttatgctacaggaataaacaaacttatttttcattggtaaaaatgtgttgattgtaatggntcctattttgattaatgaagatgtgtttgagcctagttataatgatttaaaattcacgatccaaaaccgcaattacttttgcatcagcctaatatgaggaagtaatagttgaacagaataattctttcctggaagtctggcattttgcctggggagaaggatcattaaaaacttaaacattt

SEQ ID NO: 18197 - DNA, 1504 bp, Homo sapiens
  misc_feature (1322)..(1322): n is a, c, g, or t
cagactatatggtgcagctgactggtggaagagatgaggctgagaagacacgaaaggcttatgggaacacagtaggagcaagggaagggcagaggggcttatttcatataagggcttcttgtcgcctgaactatggttgaagttccctcacagaacagagcagctggtcacagctctgcccaggcatttctgtgtctgcatcttcctgctgtacttgcatatcaagaagcatttcagaccacaggaatgcaggattccaaggcgccaatttaccttggaatttgaaaagatgatggaaatgatgttaaagaaaaagaaaattcgagtgattttcttatttgaggtcaaaatgggtcataaagcagtggagacaactcgcaaaatcaacaacacatttggttcaggaactgctaacaaatgtacagtgcagtggtggttcaagaagttttgcaaaggagaggagagccttgaaaacgaggaaaacagtggctggctataggaagttgacaatgaccaactgagagcaaccatggaagctgatcctcttacaactgcgtgagaagttgccaaggaactcagcgttgagcattctagagtctttcagcatttgaagcaaattgggaaggtgaaaaagctggataagtggatgcctcatgagatgagtgaaaatttaaaaaaaaataaaataaaaaacaaaattgtcattttgaagtgtcatcttctcttactctaagcaacaacaacaaatcatttctcaatcagtttgtgacgttcaatgaaatgtggattttatacgacaactggtgatgaccagctcagtggctagaccaagaagctccaaaacacttcccaaagccaaacttggaccaaaaaaaggtcatgttcgctgtttggtggtctgctgctggtctgatccactattgctttctgactcccggcgaaaccattacatctgagaagtatgctcagcaattcaaagagatgaccgaaaacttcaacccctgcagtcagcaatggtcaacagaaagggcccaattctccacgacaatgcatgatcgcacattacacaactaaagcttcaaaagttgaactaactgggctacgaagttttgcctcatccaccatattcacctgacctcccgccaaccgactaccacttcttcaatcatctcgacaactttttgcaaggaaaacacttccacaaccagtagaatgcaaaaagtgctttccaagagttcactgaatcctgaagcacggatttttatgctacaggaataaacaaacttatttttcattggtaaaaatgtgttgattgtaatggntcctattttgattaatgaagatgtgtttgagcctagttataatgatttaaaattcacgatccaaaaccgcaattacttttgcatcagcctaatatgaggaagtaatagttgaacagaataattctttcctggaagtctggcattttgcctggggagaaggatcattaaaaacttaaacattt

SEQ ID NO: 18198 - DNA, 1401 bp, Homo sapiens
cctcaaaggttttaatttctcaggtctggagagatcgcagaaattctgatgcaggggtctgagaaacatacttagggagataatccaagagaattggacctgcttttcagtctgctgacaagtggataccactttactccagctacccagtgcccacgagcccctgcttggacatctgtcctctttagagtctgtgcctgaaagcctatgccccatatttgagagatgaagctgtagtgtgggaggggagtggggcttgcttaatggttgccttcttggttagccagcttcagagtttccattatggcctgtaaagaggtctttttacctgcagtgtcttccatcgatattctgcctcatatacactctacttctgcctcaaggcccagtatgaatctgaagtcgaagtgacttttgtagcccatacttggttcctgctcacaacttctctatgaatgatgatgggtcttctggtttttcttttgccttgtatggctgtctgattagcttccattgggctgattttatctctgaaattatattgtaagcatcatgaaggttgtggggtctgcatggtgttgggcatacagttatcgatgattatggataacttggttcaccgtgatgtttctggggtggagtgaccactgtttgatacctggtttgacagatatcaaaaccatggcaataagggtctagaattggcttgatctccacagtatctcttagatgcaaagatgttttaggtatagggctttgagtatcagtgccatcaaatagtacttccagggggaaccccagacaagtctgggtcctaagtgaaaccagaggttttagccagaaataaaccagcatcaggaagggagctggtcaaacactgttccactgcatcagtgggtggcagaggttgctggcaggacagagttagctggcatcagtcatggcagaagatgactcataaggctagttgaatgtgtgtgtatgagtttgtgtgtgtcagagacagagagaaaaaagattcttacttcaaacggcattcttcctgtgtctcccgaggatgtattttttcccctcagatgtttctttttttctacataatagtcaatgttcaagattgtgtaaaaaaaaaaaattaggaaataatccaagaacccaatattcaaaagggcctgggcagactgtcagcattttgtcaatggctctttctagcctgggttgcttgtgtggtagcatgccagatctatccaacaagattgccacttgctttgcctgttctttgctctcagtctaaataacttctcaattcattctagtccttttaaattttcatggcttgctgcatttcgttagctcacttaaaatgagaacatggaatcaatacagtacaaccacagacccaaa

SEQ ID NO: 18199 - DNA, 599 bp, Homo sapiens
cctcaaaggttttaatttctcaggtctggagagatcgcagaaattctgatgcaggggtctgagaaacatacttagggagataatccaagagaattggacctgcttttcagtctgctgacaagtggataccactttactccagctacccagtgcccacgagcccctgcttggacatctgtcctctttagagtctgtgcctgaaagcctatgccccatatttgagagatgaagctgtagtgtgggaggggagtggggcttgcttaatggttgccttcttggttagccagcttcagagtttccattatggcctgtaaagaggtctttttacctgcagtgtcttccatcgatattctgcctcatatacactctacttctgcctcaaggcccagtatgaatctgaagtcgaagtgacttttgtagcccatacttggttcctgctcacaacttctctatgaatgatgatgggtcttctggtttttcttttgccttgtatggctgtctgattagcttccattgggctgattttatctctgaaattatattggtaccatatgagtgtacttgtgagtttggagaaaacactaacacttaagtctggc

SEQ ID NO: 18200 - DNA, 205 bp, Homo sapiens
tatgtaactaattcagtggggtatatcagttagctcaggggtggacaaatttccagtgaaacaagatatagagcctagaaagaaacctatccatatctgaagacctggcttatgacagagctggagatgatgctgagtggaaagaaaatgaacttcacagtacttggctctggagcaaatggttatccacgtggaaaaacatgaa

SEQ ID NO: 18201 - DNA, 338 bp, Homo sapiens
ggcatggagaaattggaatccttgtgcattattcacgggattctgagattatgcaaccactatggaaatgtggtggttgcttaaggaattaaatatagaactatcacatgatccagaaatctctcttctgggtagatatgcaaaatagttgaaaccagggtcttgaagagatatttgcatactcaacttcacagcattagtcacaagagccaagaggtaggagcaagcctagtgtccacggatggatgaatggataaacaaaatgtggtatatccatacaatggaatataattcaaccttaaaaaggaaggaactataaatgttgtcttttttatatt

SEQ ID NO: 18202 - DNA, 730 bp, Homo sapiens
cttcctttgaactgcttccttcctttggttttgaaacttgttccagtcttctgtttttttcatgtaatttcttttaaaggatattttaaattgttaatacagtgcctgctttttgtatcaagtgtaccttatgcagatgtctaaagaaaaagtaattccaccaatacttccatctctcttgaggcaagcagtgtgtgcgctgttcacgttgctgaaatgtttcctccatactcacacacacatgggtttttctgcacatggactcataaccagcggtgcttcgttaagctccattctggactcagaggaatgctaagcctcttgaggtgacggtctggagctcaccttgtgattagtgtgttgtgcctctgggacttgatattggtctctgccagagagactgagttgccttctatccatctgttcttgtttccgcttaaatgaacttttcaaaatgtaagccttaccatgtcatgctcctgtgtgcggcacggtcactctgtgtagaatgtcatcgctgctttattcccctgtagcagttacccccattcattctgtatgtttagctgttgctgtccctctctgcccacaggaatataaattccacagggagagcgtctgttgtggtccctgctgtggccccaggacccgtggcaaagagtaggcatgcagtaaacttaggtgaaaaactgaatgaaacccccggctgaactgaaattacctcagtgaa

SEQ ID NO: 18203 - DNA, 172 bp, Homo sapiens
gagtgagctgaaccatacatgcttgtagtaaagattgtatgtatgtcatatatgtatatctatatataatatatctacccatgattatacgttgtctataaagccccttcacacttttttttaacctcatagcagctcagcaggtcagtttaatatgatcattatttttcag

SEQ ID NO: 18204 - DNA, 476 bp, Homo sapiens
acagaattggtcttgaattccaaacctgctatttacattctgtttcacaaggtgagataatgtatgaaaaattgcttaaggcagtgtcttcctcccacaaagaaaaggcagctacagatgcagttatttgctattatgcaattcagtgagaggccattgtagaggatattctccaaaactccctgacaatgagtcacttcctgattgataatttcacatagctgcattcttaggagctcacttgggaacctaaaccatggagaagttaagattttgtctcagaagtctcctctgagacataggtcctctgagacacaggctactttaaggaaaagaaaaaaaatcacctgggttctgttcctgactactgctgactagctgtgctgtatggagtgggttcactttcctttccttttctttctttcttttttttttcttccagccggggtgacagagtgagactctgtctcaaaaca

SEQ ID NO: 18205 - DNA, 405 bp, Homo sapiens
tgctctcaaatccccttttccacacttgaacaaaactctattgtcaacataaaagaacaagtcaaagagctataaactccccctctaaacttggccttggtgttctcactttttctgtgatagtatatgagaaaaatgaatataatgttgccctgataggaagtttaatgaattttaaaagaaagcaatgttgcttttataaaatataaaatttattatttttcttgggtggggagacagtgtctctctgttgcccagactggagtgcaatggtgcaatttcagctcaccgcgatatctgcctcccaggttcaagcgatccttctgcctcagcctcccgagtagttgggactataggcgtgcaccaccacacccagctttctatttttagtagagacggggtttc

SEQ ID NO: 18206 - DNA, 212 bp, Homo sapiens
gtttgaatttgctaagttaaaagggatatcactttgatgacatgggattacattattttcctgttgatttattaagtatttatatgtcctttgaaatttttttggcggtggcattctttttattttaatatataaggttttgttactttttgataaacagtctttttacatacaaaatttattactgtttgccatatttatagcaaacatag

SEQ ID NO: 18207 - DNA, 349 bp, Homo sapiens
gctggagagagcggggtttgggtactgcgcctgctgggatctggaattcgccttacgttccctggatgtgcggatgtctgtttttaacagcatgctgctatggttcctaaggagagaattcgatcggcctgtgcttacgagttggtttattttttatttatttcgtgctccgggaacacagcctcaggcaccttctctccctcccacctgtgtctggaatctctccatcgtgcccctcctctcctactcactctgtcccttgactcaaatgcctctccttcgttcctcttcttacttctcctagacactttttccccccagcggtggtggtggtgattatcctttccgg

SEQ ID NO: 18208 - DNA, 354 bp, Homo sapiens
taattaggcggatgtgatggtacacactggttgtctcaactactagggaggctgaggcaggagaatcacttgagcccaggcgtctgaggctgcagtgagctatgatcatgtcactgcactccagcctgggtgacagcgagaccctgtctcttaaaaaaaaaaacagaatttctaaaactcaacaaaattcaaaattgggcaaaagaatagatatttctccaaagaagaaacacaaatggccaataagctcacaaaaagatgctcagcatcactagttatgatgaaaatgtaagtcaaaatcacaattagagaagattcttcattataatttattaattaggagggctttcatag

SEQ ID NO: 18209 - DNA, 364 bp, Homo sapiens
gcaactgacctccagggcagacatggggcccaggaagcctgattacatctgtattgtatccagaggaacaaacagggcccagaaaggttgccactaaaagtatggcaaaaaccacaattacttttgcaccaacctaatactaactactctctagggctgctgtgaggatttagtgaattaatacatgtaaaagactcagcattgtgcactcactactattattactgttaactttagatacttgcggttagtatccaaaacatatcaaaaagtgactacttggttttaagtacatcaaattatgccttctaaaaaatattgtaatattttaacagttttttccataaatttgctttttcaaatt

SEQ ID NO: 18210 - DNA, 370 bp, Homo sapiens
tgtcaacatggatggacactctacttgtgcgtatgtatgtggggtatgtgtgcttagtaatatctgggtccaagttggattctgaaagtgaacccaaatcctaccttcttttacacttttttctcccaagatctaaactcttactactcaaaactatgacctgcagcccagtggcatcagcatcacctagaagcttattaggaatgcagagttccaggcctacccaagccctgattcagattctgcattttgagaagatgcctaggtgactcctatccacattaaagtttgagaagccttgctcatgtcggtattgaaaaatccttgccgacttgacaagaaggcaataatataattagtgtgtgtagca

SEQ ID NO: 18211 - DNA, 386 bp, Homo sapiens
ctcttcaggtggactctatcagtgtctgtgtctcacggtagctgtcatagcattgtggagttactcttcgtttggaaacagcaattaagaaatttgagggattatccatagactcaaaatggttagaggtcaggtagtattctgtgacacacacttagggttagagtaagtcagaatggtttaaggttcggaaagagaagataccaaggttcctgcagataccaaggaaagagaatcttagtcttgtaatgtatgagccttcaaatattgtggatattaaatgagttgttacatgtggagtgctcacaatagtcccgggtacagagtaagagatcagtgaacatcaatagttagaattatttctgtctatgaagtgatactgaaca

SEQ ID NO: 18212 - DNA, 1753 bp, Homo sapiens
ttttcacaatgggtttgccgccagaacacaggtgttgtgaaaactacccctaaaagccaaaatgggaaaggaaaagactcatatccacattgtcgtcattggacacgtagattcgtacaagtccaccactactggccatctgaactacaaatgtggtagcatcaacaaaagaaccattgaaaaaattgagaaggaggctgctgagatgggaaagggctccttcaagtaggcctgggtcttggataaactgaaagctgagcgtgaacgtggtatcaccattaatacctccttgtggaaatttgagaacagcaagtgctacgtgactatcattgatgccctaggacacagagacttaaccacagagacttcatcaaaaacatgattacagggacatctcaggctgactgtgctgtcctgattgttgctgctggtgttggtgaatttgaagctggtatctccaagaatggacaaacctaggagcatgcccttttggcttacacactgggtgtgaaacaactaattgtcggtgttaacaaaatggattccactgagccaccctacagccagaagagatatgaggaaattgttaaggaagtcaacacttaaattaagaaaattggctacaaccccgacacagaagcatttgtgccaatttctggttggaatggtgacaacatgctggagccaagttttaacatgccttggttcaagggacgaaaatcctcctgtaaggatggcaataccagtggaaccatgctgcttgaggctctggactacatcctaccaccaactcatccaactaacaagcccctttgcctgcctctccaggatgtctacaaaaattggtggtattggtactgttcctgttggccgagtggagactggtgttctcaaacctggtatggtggtcacctttgctccagtcaacattaaaactgaagtaaaatctgtcgaaatgcaccatgaagctttgagtgaaactctttctggggacaatgtgggcttcaatgtcaagaatgtgtctgtcaaggatgttcgtcatggcaatgatgctggtgacagcaaagatgacccaccaatggaagcggctggcttcactgctcaggtgattatcctgaaccatccaggccaaataagtgctggctatgccctgtatggattgccacacggctcacatgcatgcaagtttgctgagctgaaggaaagattgatcgccgtttggtaaaagctggaagatggccctaaattctgaagtctggtgatgctgccattgttgatatggttcctggcaagcccatgtgtgttgagagcttctcagactatccacctttgggtcgctttgctgttcgtgatatgagacagacagttgcggtgggtgtcatcaaagcagtggacaagaaggctgctggagctggcaaggtcaccaagtctgcccagaaagctcagaaggctaaatgaatattatccctaatacctgccaccccactcttaatcagtggtggaagaacggtctcagaactgtttgtttcaattggccatttaagtttagtagtaaaagactggttaatgataacaatgcatcgtaaaaccttcagaaggaaaggagaatgttttgtggaccactttggttttcttttttgcgtgtggcagttttaagttattagtttttaaaatcagtactttttaatggaaacaacttgaccaaaaatttgtcacagaattttgagacccattaaaaaagttaaatgagaaa

SEQ ID NO: 18213 - DNA, 451 bp, Homo sapiens
aactgggggagtacagccagtaaactgtgctttaatagcgttccaggtgattctgatggtcccaaagtgtgagacttagtgtgctaggtcagttgtttgcactttgcggtttgatccaatgaccttctgcatcagaatcacctgggcctaatgaatcagaatttatgggtcaagggtcttggaaatagatctgagtcacttgcacagtgttctaaggctcttctctggcactgtgctagaaaagattgtagtggctttgctcccatgaggaatagaaacatcaaataaaatgttagtgttccggctgccatacatacagatcttttatttctttggcctgttgatactttttagaaactaaaaatttagtagtatgttaataattatacttactagtaattggcttttacctgtgttaacatttcagaatttaagaattaggttatgttag

SEQ ID NO: 18214 - DNA, 313 bp, Homo sapiens
ataatcacatgactactgacttttcagcatgcaggagaaaaagcaaatatttccactgttgaaaggttttattggagaaacttgatgaatacaatgacttcatggcttagtgaagacaaccacggtggttaaaatacagtgaaccctcatttagctgtatccattcaaagtatttgagcatctcctatgtataatgtcaatttatttgatgctggttaaatgtgtaacaagttacttaaaaccaactgtaataccaaaaagtcattgaacacacttctaaagtatactgcctgaataaaaggtatctataaaa

SEQ ID NO: 18215 - DNA, 295 bp, Homo sapiens
ctggtctctactcctgtctttttctctctacagcctattctccatacggcaaccacagtgattcttttaaaatagaagccagtcatgttattctctgctcagaactctgtaatgtgtcctcatttcactgaaaacaaaaatctaagtccttatagtttcctacaaagccctttatgatctgattttctgcatccccttcctccttctgacctcatctcccaccattctcctcctccatcccttactgacttctttgctgttccttgaaaatgtcagatatgctcccatcaaaagg

SEQ ID NO: 18216 - DNA, 487 bp, Homo sapiens
catcagaacagaccagcttatccggttataaatctaggataacatgatgagcttcagagccaggggttgagctctcctgggactcctcccctccaaaggatgtgttccattgccaaacattaaaagctccgaattcttgttttctcgccaaaaggtattgtagacatgatggcagtgaaattatttttttcgcatttaaagttacccttaataaaatcactttcttcaggtggtgtaccaagttagtaaaacatacctgtttgaatctatattccatcaaccatgaacttatgcctggggatcaaaaatttcttaaaacccaccaggcgtgatcctaatacttttttcacagtttctcggggtgtttcagtaggttaggattacctccaaagacatttaaatgatgtttctggttcaaacggaaatgaaaagcacataaaattgtaagacataagaattccaagaatttggcagaggtgaaaacaca

SEQ ID NO: 18217 - DNA, 281 bp, Homo sapiens
acgtcgacactggaagtcctagccagagtaatcaggcaaggaaaataaatacaggcatctaaacaggaaaagaagaagtaaaacaatctttgttcgttgacaatatgattttatacctagaaaaccataaacactctgacaaagttctcctagaactgataaatgacattaataaaatctgaggatacaaaaccaatgtacaaaattcaatagcatttctatagatgaataatatccaggctgataataaaatcaagaacataatctcacttaaaattgcc

SEQ ID NO: 18218 - DNA, 523 bp, Homo sapiens
ctgatttcagaatgtcaaggttctggttttgactctgtagcctgggccgagtcacggccagtgggtcccaattttcttgcctatacggtgaaagtttttgtaccacttgctttctgaagcgccttctggttccaggtttctgtaaggggtaaacgatttttgtgactctatgaacagtatttaacatgtatgggagtaaaaaggaagaacctgtttcctgttctccaacatttatttcttttaccccttgttaagttggtcatcaaattgaaaggttttaatgttctttcattctaggaaatggctgtgagattgtttctaagtatattaaaggtaatgtctcttttctaaacctttgcttttgctgataattgtggagagaagaaccagaacaggcactgaattcccattcctaaagccaacgctctaattcggcctccatttcattagctctgaccggaagcatgttgcctgcatctgtaaaaattataaatcaaaataaaataactttggcgactatttt

SEQ ID NO: 18219 - DNA, 494 bp, Homo sapiens
gcgagggataccagaaacctttaatccagatcattcctgttttccattcaattggtggtggtttgcctaggaccccaaaactgtacttgcagatgaacttactacttttcttcctaatggcatcttcagacttagaactaaatctcagacttcagttgcttcccttaataactgaaaatatactgcattatattccttgtccttcaaagtagcttttgatgtgttggcccaacgggtcttttcagaaataccgtgcgtggatgatttgtagtaaaactgagatgctgtatattttccaagtaccagattcacaaggaataatgcgataatgatgccttgttttctcaagctttcagacgtgccggcctagagctggcaacatgcaatctcgtactacttcatctgaattactgaaatgggagacttctgtctgcattctattactgatttccgtgtttcacaacctgcagtttcctagtcttcaggggtaaagg

SEQ ID NO: 18220 - DNA, 463 bp, Homo sapiens
caaatatgtataattattacatgtcaactaaaaagaggaacaaatatatcaataaagtatacaaaccttaagttgtacaacgcaatgaatatttaacacgcaagtataaatactcataaaaataccacacaggttaacatgtagaatattttaagcacttcatgagtctcccttgtaccccttcccagtttatacccccaaccgaagataatcatgcttctcaattctcatcatcatatattagttttcttatttctgcattttatataaatggatgtcctgctttgtatctaacatcatgtattcaacattatgattgtgggattcatcaaatttttgttgtttatttttttcattgctttgtgttattctagtgtatgaatttgcaagtgtttctttatctgttatcttttcatggacatttgatttgtgtccagtgttggacaatatgtataaagctgct

SEQ ID NO: 18221 - DNA, 342 bp, Homo sapiens
aaagaatctttaaatacggagtcgaaggcaaataatcaggagtgttactagcaaaccctgagcttcaaaacagaaattcgagcttccatggttgcttaaaaagatacaactttgcccttctggcttctggctcgtccacacatctgcatgtgccctaaggtccctctgctgcagagctctggcagcatctttgctttccagatccaaaacaaaaacacaaagaaaaggggaatcccgatcagaaccagaaatagaatgcgtattctcttaagaatgggttcgagggtgttcaagtactttaacatatgtcataataaagttcttctactgattgaaaggcac

SEQ ID NO: 18222 - DNA, 874 bp, Homo sapiens
acggcttatcaaagtcaagcactgtgtcacctggtaatgcaaacccttccagcatctctgcctttaggttttaggggggaatcgtcaaaacagacatgcagcccactacaaagtacttgaaagcaatagggcaccattcaagcacacgcctgcatttactgggctacgtttatttagggcattcaggtggctgtaattattgtgcataaatagttttctaaaaagcataaaactaaaaacttgatccatggaaacacagtgtggttttaggatggagatcggatttcactcacctcaaaataactcctggtgtttgcctccaagacccattaatttatgttatctcttgctctgtagcagtttggatttgtcacacttagcaaagtaatttggtttcccacaggttttgttctgttttatagaagcaagagaacggttttgtgtttcagagcatgaatacattccttcagaaatttagccagcatttcagaaggatatgaatttttatttttagctatttacacctgcctgaaaggttgatgctgctaaacattgatattacttgaaaagttgtgcccaaggcatattgcttctttcctagctaggaattgaaatgtttatgaagcttgctgaaaatttaccaggttaccaaaataagagtttatatctcttatgtagtgactaacagaaatagatttatgtattcaaccaaccgtccaatatttattaagccactaatatatgcattgaattatgctggatttggggtgacatcagattatacaacatacacttctcctgttccagttcccttttaacatgttattactgggcacttacagaatgacaaaatcacattaataagactcaggcc

SEQ ID NO: 18223 - DNA, 339 bp, Homo sapiens
agccctcctcaggggtttgtcctctagacccgtactcccaaactgtcaggcaggccttatctttcttcccaatttttggccaccttttaacatccccatcagtctcagtagcctcctcaacaaacaggtctaggagttatttcctccttattgaccccacggtacaggcagatgggttcctggcattccggatcttaactaaagccaaattttcccatagagtgacataaataataatatacgcccaagttttatagaagtatctttatacatgaaatgtttgagcaaaatgaatctgtaggttgatcaaggaacaaaataacctctttttttaattta

SEQ ID NO: 18224 - DNA, 119 bp, Homo sapiens
tccacccaaagcacacacttggttttttaaaaagaaaaaaatgaatacaaaatagtgacttttcctgtggaccatttcaatatgatttgaaccgtcaataccaaccccctaaccccagt

SEQ ID NO: 18225 - DNA, 791 bp, Homo sapiens
agttattctatgtcaggtattgctccaagtgctttatatgcaaatatatgtattaaatgtatgtaatagatgtttcacctcatttaatgcttgctacatggtctgtattaactagagtgggggctcaataactccaagcaatgcctttctattgcaacctgaagagggagattagaaatgtagaaaccatccattcatatctctccctcatttaatagctgaggacactaaggcccagagagtataatcatttggccaagggtacacagcatggcagtaggtgccagagccagggcagagtctcccaggctcacatcaaagggtcgtttctgtggagccaggaggtgacattgggatgaagggaaggctttccctcatccatagggttctcaggtcaaacccacccaaaccagccaggttgtgggcctcccaaaaaacaaaaaaaaatggtgtgaaacctttaataacagatggtccaaacctggggagaataagataaagctaacggtagttacagatgagacatgttagtgtaggatttgactgcatgtggtttgagggacatgcacaggcctcttgtcaactggattccacatactaaaggagtgtgctgggcagcccccgactcacaaacggggccatcagcctttcctagcaaggctttgtttcagaacttggcatgcattttcctataaaaacaaggtggtaacctgtgatttggttctcccgccaacccacaaagccctgtttaaccctagcagacctgggccttcttattaatggtggtttct

SEQ ID NO: 18226 - DNA, 178 bp, Homo sapiens
ggaaaattcattttagtttttaatctgaactgtctcagctggggatgtggtatggcagagaggtgtatgcccataatttaataaaggaatacttatttttgtatgtttataagattgcatctctttatgccagtctctcttcacttgttttgtaatgtaacgcgagctctttctagtt

SEQ ID NO: 18227 - DNA, 366 bp, Homo sapiens
tcagtcatctactttgttctacatgttattcttaaggttataaataaatttagagaatcttcatagaaacaacctagcagtgttatttttagttttaaaaaaacaagaagctgataaaacaatgcttgttttctaataaagttaaaatgagaccagcctggatacaacatagtgagaccccacctctacaaaaaaatttttttaaatgagccggatggggtggtaagcacctgtagtcccagctacttgggaggctgaggtaggagagtcacttgtatttgagaggtcaaggttgcagtgagccatgatcatgccactacactcaagcctgggcatcagaaacagaccctatctttaaaaaaaaaa

SEQ ID NO: 18228 - DNA, 252 bp, Homo sapiens
ggcttcctcacctcttaaataagaacttggactggatgtatttaaacctggctgcaagtcagcaatttccagggagcttcagaaatacagatttcccagacccaggaacctgtatttttaggaaagtctccaagagattctgatgcagccagtcaccaggtagggcccacttgactcagtggtgacctgagttcctttgaattctcatgtacctgaattcatgtaaaaggatgagctcaagttgctaaactt

SEQ ID NO: 18229 - DNA, 426 bp, Homo sapiens
ggctctttcttctgcattcattgaaatcatttcaaagttttctctatgctaggaattagatattttatcagtgtttgttttgttctttgatatttccattcttactattgaaattatctttgtccttggtttttatttcttaatttctctaacctttttcatctagtcctgttgtgtcaccatttcatccttgagctcttttttatttcatgcagtaattcagcactctgcatctgtgctcactctccttaactctagtttccatagagcagcagaggatcccatggagctgacgatcagatcatgccactttctctgctcaactcctgcagtggcactgggtgcagtgggctcacatctgtaatcccaccatttttggaagccaaggctggaggatcacttgaggccaggagctcgagaccagcc

SEQ ID NO: 18230 - DNA, 394 bp, Homo sapiens
gaggtgggaagactgcttgagtccaagagtttgaggttacagtgagctatgatcacgccacttgcactccagcctgggcaacagaagaagaaaaataaaaaataaaacagatggcaatggattatagcacttcatataaggccatgagcctacaatgctatcagaaggaaaaaagatggtgagaggtagggagttgtgaatacagagagaaatctcttctttacagagagaaagaatttcagctaataagtgtagaaacaataatacaattagacaaatcaccattttgctacctctcccacctctccataataactacttcaggcaaggatcatcaaagatgctaaaacaaatggacaacaggttattgggaaagaggttattcctcctacct

SEQ ID NO: 18231 - DNA, 368 bp, Homo sapiens
ttctttatttaaagaaaacaaatgtttattaataaatgagaaatgctaaagatcattgactatcttgagggaccagagagctcagaattgctgcctctttcagttatttgggcatggcattgatgaagtactgaacaaaatacaccaacgtggcagtaaatcttatctgcccttaccttccctccctcataattttctctttctttctgtttcaactgttttacttcttcttcactcatcttcttaatttttgtttttgggtcagaaagaagcaactctggttgctttgaacccattccccaagatagtccatctccatgacctcccaactctgatcagttcccctgaacctctgccccacattccac

SEQ ID NO: 18232 - DNA, 1501 bp, Homo sapiens
aataagctagtagaggcgggggtgaatcggacgagggctttcgctttctgccatgactgtgaggcctccccagccatgtggaactggtgcagcagaagacccccagacggccctggcactgaacttcggctctacgttgatgaagaagaagtctgatcctgagggtcccgcgctgctcttccctgagagtgaactttccatccggatagacaagagtgagaatggtgaggcatatcagagaaagaaggcggcagccactggccttccagagggtcctgctgtccctgtgccttctcgagggaatctggcacagcccggcggcagcagctggaggaggatcgcactgctcatcttggccatcactatacacaacgttccagagggtctcgctgttggagttggatttggggctatagaaaagacggcatctgctacctttgagagtgccaggaatttggccattggaatcgggatccagaatttccccgagggcctggctgtcagccttcccttgcgaggggcaggcttctccacctggagagctttctggtatgggcagctgagcggcatggtggagcccctggccggggtctttggtgcctttgccgtggtgctggctgagcccatcctgccctacgctctggcctttgctgccggtgccatggtctacgtggtcatggacgacatcatccccgaagcccagatcagtggtaatgggaaactggcatcctgggcctccatcctgggatttgtagtgatgatgtcactggacgttggcctgggctagggctgagacgcttcggaccccgggaaaggccatacgaagaaacagcagtggttggcttctatgggacaacaagcttctttcttcacattaaaacttttttccttcctctcttcttcatctcattatcctgattgactctgattataatagaaccatttttactttgctttgagggagatttttgatttaatggggaattttaaggtgtcatggaaatacagattctttgttttggccactgaatggactctctcttcagtgggattatcaaggaacttcagatcagggaaatctccacttcgggaccttctatctgcctcccaactcctcaaggtcacctatagaagcgagctaccaaaagacgtctcctaagcattttggtggcctagtgactcagggcagagtggccagcacacctctcatccgcccctcctgctccatcactgctgagcctctccccatctagaatgttggaactggagcatcataaagatagcaagctaccttccaaggccgagccagcccagagaggagcatgtcttcctttacctccccctaaggagatactacatgggagggggacacagaaaaagggaaggaaattggctagtctggctttttttttttttttttttaaaggcaaagattgacattattgaaggaaaggggatgaggacaactgtgaactcacagtgagccctgtggaaagaagag

SEQ ID NO: 18233 - DNA, 1013 bp, Homo sapiens
gaagtgactgcgggagtggagccggcgagagagtggcagcgggggctgatggaagtgcagtgggggctggagagggcaccctactgtatccagcatgctccaaggccacagctctgtgttccaggccttgctggggaccttcttcacctgggggatgacagcagctggggcagctctcgtgttcgtattctctagtggacagaggcggatcttagatggaagtcttggctttgctgcaggggtcatgttggcagcttcctattggtctcttctggccccagcagttgagatggccacgtcctctgggggcttcggtgcctttgccttcttccctgtggctgttggcttcacccttggagcggcttttgtctacttggctgacctcctgatgcctcacttgggtgcagcagaagacccccagacggccctggcactgaacttcggctctacgttgatgaagaagaagtctgatcctgagggtcccgcgctgctcttccctgagagtgaactttccatccggatagacaagagtgagaatggtgaggcatatcagagaaagaaggcggcagccactggccttccagagggtcctgctgtccctgtgccttctcgagggaatctggcacagcccggcggcagcagctggaggaggatcgcactgctcatcttggccatcactatacacaacgttccagtagagacaagggtgttgctgtgttggccagggtggcctcgaactgctggcctcaggagaacctcctgcttcagcctcccatagtgctgagattataggtgtaagccactgtacccaacctaccactattcctgaatactctcatcaccctgtaaagaaaccccacactctttgagcagtacctctgaggaaaaaaagaaactgcatgcttattagcagtcactccccattcctccctccctccagcccctgcactaatctactttgtctctacagtttccctaaccgggactgactttcatttaaacggtatcatgta

SEQ ID NO: 18234 - DNA, 889 bp, Homo sapiens
gagatagttatcagtcgtcccgttggatttcgtcacgggggctgtaagatgtgcctttcgctttctgccatgactgtgaggcctccccagccatgtggaactggtgcagcagaagacccccagacggccctggcactgaacttcggctctacgttgatgaagaagaagtctgatcctgagggtcccgcgctgctcttccctgagagtgaactttccatccggataggtagagctgggcttctttcaggcaagctctttgctgcagacactgagctgagtcaggcaatatggacgtgggggctggtggtaggatgaatagtgagagaaatgccagcactgtcctatccctccgaatcactcaccctactactgcatggagctaaactggcatctggcccagcaccttcatttctcatttgttgtccaaaccacatgcttagtctacagaagacaagagtgagaatggtgaggcatatcagagaaagaaggcggcagccactggccttccagagggtcctgctgtccctgtgccttctcgagggaatctggcacagcccggcggcagcagctggaggaggatcgcactgctcatcttggccatcactatacacaacgttccaggtttccatttagctgcaagaaacagcactgtatttttcaaagcactagaaaattctgtggccagtccagaaagacaaaacatagcaccagtgtggcaagaagtggagctaatgcagcattaatgatcctggatgtttctgcactttcttattagaatttaccattcacctctaagcttcagctctgcagtgccccctatttgggattattgagcaatgtttaacgggaaagaaatgatgtctgttctccagccagtgactctgagtaa

SEQ ID NO: 18235 - DNA, 841 bp, Homo sapiens
ttttcatgtatcatgaaatagtcattgttttttcaattacttacaaaatacaaaaatcattcctaggttgcaggccatagagaagaaggcagcagccatttggcccccatgacttagtttccctgggtttaagctgctgttacgatgattttctttgactggcagcctcatgcagtcctacttaatgcagtgacagtgatggtgatgttccttatggggaaatattcctaacccctcttgcttttcttacatctatttcagagggtctcgctgttggagttggatttggggctatagaaaagacggcatctgctacctttgagagtgccaggtaagccagcatcctgggaccctagagcatggttctgcacccaggggtgctctgggtgtgcgtgtcacctgggtgggctgtctgtgcattattgttcagcaccccagccccacaggaccaagactgatggaggccacatggggtccggtgaaggccatccctgagagaggagtctcctaagagaggagtctttcaactgagctattaagtgggtgatgatcattttggaaacaaagcatggatagaatcgcaagctgtactctaagcacttcaaaggtgtgaagactaatgacaaaaaacaaaggcagccgctgacactcttcaggcctttcctttttgaagccctccctttgtctttcttgatgctagggtcccttcgtttccctctctctttccacctgctcctggaaaggccctttggtggtgggcttgtcatcctatggcctgttcttaagaggtgatgttcccagggacctgtatccagagcatccttccttctcactgaacaca

SEQ ID NO: 18236 - DNA, 731 bp, Homo sapiens
tttatttcagtgtaccgggactggtgtgtaatttgtatttatgtggccgcttggtagtacacattcccagccatgtggaactggtgcagcagaagacccccagacggccctggcactgaacttcggctctacgttgatgaagaagaagtctgatcctgagggtcccgcgctgctcttccctgagagtgaactttccatccggatagacaagagtgagaatggtgaggcatatcagagaaagaaggcggcagccactggccttccagagggtcctgctgtccctgtgccttctcgagggaatctggcacagcccggcggcagcagctggaggaggatcgcactgctcatcttggccatcactatacacaacgttccagagggtctcgctgttggagttggatttggggctatagaaaagacggcatctgctacctttgagagtgccaggaatttggccattggaatcgggatccagaatttccccgagggcctggctgtcagccttcccttgcgaggggcaggcttctccacctggagagctttctggtatgggcagctgagcggcatggtggagcccctggccggggtctttggtgcctttgccgtggtgctggctgagcccatcctgccctacgctctggcctttgctgccggtgccatggtctacgtggtcatggacgacatcatccccgaagcccagatcaggttggagaaccttccctccctgtctg

SEQ ID NO: 18237 - DNA, 1837 bp, Homo sapiens
gaagtgactgcgggagtggagccggcgagagagtggcagcgggggctgatggaagtgcagtgggggctggagagggcaccctactgtatccagcatgctccaaggccacagctctgtgttccaggccttgctggggaccttcttcacctgggggatgacagcagctggggcagctctcgtgttcgtattctctagtggacagaggcggatcttagatggaagtcttggctttgctgcaggggtcatgttggcagcttcctattggtctcttctggccccagcagttgagatggccacgtcctctgggggcttcggtgcctttgccttcttccctgtggctgttggcttcacccttggagcggcttttgtctacttggctgacctcctgatgcctcacttgggtgcagcagaagacccccagacggccctggcactgaacttcggctctacgttgatgaagaagaagtctgatcctgagggtcccgcgctgctcttccctgagagtgaactttccatccggataggtagagctgggcttctttcagacaagagtgagaatggtgaggcatatcagagaaagaaggcggcagccactggccttccagagggtcctgctgtccctgtgccttctcgagggaatctggcacagcccggcggcagcagctggaggaggatcgcactgctcatcttggccatcactatacacaacgttccagagggtctcgctgttggagttggatttggggctatagaaaagacggcatctgctacctttgagagtgccaggaatttggccattggaatcgggatccagaatttccccgagggcctggctgtcagccttcccttgcgaggggcaggcttctccacctggagagctttctggtatgggcagctgagcggcatggtggagcccctggccggggtctttggtgcctttgccgtggtgctggctgagcccatcctgccctacgctctggcctttgctgccggtgccatggtctacgtggtcatggacgacatcatccccgaagcccagatcagtggtaatgggaaactggcatcctgggcctccatcctgggatttgtagtgatgatgtcactggacgttggcctgggctagggctgagacgcttcggaccccgggaaaggccatacgaagaaacagcagtggttggcttctatgggacaacaagcttctttcttcacattaaaacttttttccttcctctcttcttcatctcattatcctgattgactctgattataatagaaccatttttactttgctttgagggagatttttgatttaatggggaattttaaggtgtcatggaaatacagattctttgttttggccactgaatggactctctcttcagtgggattatcaaggaacttcagatcagggaaatctccacttcgggaccttctatctgcctcccaactcctcaaggtcacctatagaagcgagctaccaaaagacgtctcctaagcattttggtggcctagtgactcagggcagagtggccagcacacctctcatccgcccctcctgctccatcactgctgagcctctccccatctagaatgttggaactggagcatcataaagatagcaagctaccttccaaggccgagccagcccagagaggagcatgtcttcctttacctccccctaaggagatactacatgggagggggacacagaaaaagggaaggaaattggctagtctggctttttttttttttttttttaaaggcaaagattgacattattgaaggaaaggggatgaggacaactgtgaactcacagtgagccctgtggaaagaagag

SEQ ID NO: 18238 - DNA, 1498 bp, Homo sapiens
gtgttagggcgcggttatttcgtcggggacgggtcatgtatttctggcgtgattggtcaggcctccccagccatgtggaactggtgcagcagaagacccccagacggccctggcactgaacttcggctctacgttgatgaagaagaagtctgatcctgagggtcccgcgctgctcttccctgagagtgaactttccatccggatagacaagagtgagaatggtgaggcatatcagagaaagaaggcggcagccactggccttccagagggtcctgctgtccctgtgccttctcgagggaatctggcacagcccggcggcagcagctggaggaggatcgcactgctcatcttggccatcactatacacaacgttccagagggtctcgctgttggagttggatttggggctatagaaaagacggcatctgctacctttgagagtgccaggaatttggccattggaatcgggatccagaatttccccgagggcctggctgtcagccttcccttgcgaggggcaggcttctccacctggagagctttctggtatgggcagctgagcggcatggtggagcccctggccggggtctttggtgcctttgccgtggtgctggctgagcccatcctgccctacgctctggcctttgctgccggtgccatggtctacgtggtcatggacgacatcatccccgaagcccagatcagtggtaatgggaaactggcatcctgggcctccatcctgggatttgtagtgatgatgtcactggacgttggcctgggctagggctgagacgcttcggaccccgggaaaggccatacgaagaaacagcagtggttggcttctatgggacaacaagcttctttcttcacattaaaacttttttccttcctctcttcttcatctcattatcctgattgactctgattataatagaaccatttttactttgctttgagggagatttttgatttaatggggaattttaaggtgtcatggaaatacagattctttgttttggccactgaatggactctctcttcagtgggattatcaaggaacttcagatcagggaaatctccacttcgggaccttctatctgcctcccaactcctcaaggtcacctatagaagcgagctaccaaaagacgtctcctaagcattttggtggcctagtgactcagggcagagtggccagcacacctctcatccgcccctcctgctccatcactgctgagcctctccccatctagaatgttggaactggagcatcataaagatagcaagctaccttccaaggccgagccagcccagagaggagcatgtcttcctttacctccccctaaggagatactacatgggagggggacacagaaaaagggaaggaaattggctagtctggctttttttttttttttttttaaaggcaaagattgacattattgaaggaaaggggatgaggacaactgtgaactcacagtgagccctgtggaaagaagag

SEQ ID NO: 18239 - DNA, 1816 bp, Homo sapiens
gaagtgactgcgggagtggagccggcgagagagtggcagcgggggctgatggaagtgcagtgggggctggagagggcaccctactgtatccagcatgctccaaggccacagctctgtgttccaggccttgctggggaccttcttcacctgggggatgacagcagctggggcagctctcgtgttcgtattctctagtggacagaggcggatcttagatggaagtcttggctttgctgcaggggtcatgttggcagcttcctattggtctcttctggccccagcagttgagatggccacgtcctctgggggcttcggtgcctttgccttcttccctgtggctgttggcttcacccttggagcggcttttgtctacttggctgacctcctgatgcctcacttgggtgcagcagaagacccccagacggccctggcactgaacttcggctctacgttgatgaagaagaagtctgatcctgagggtcccgcgctgctcttccctgagagtgaactttccatccggatagacaagagtgagaatggtgaggcatatcagagaaagaaggcggcagccactggccttccagagggtcctgctgtccctgtgccttctcgagggaatctggcacagcccggcggcagcagctggaggaggatcgcactgctcatcttggccatcactatacacaacgttccagagggtctcgctgttggagttggatttggggctatagaaaagacggcatctgctacctttgagagtgccaggaatttggccattggaatcgggatccagaatttccccgagggcctggctgtcagccttcccttgcgaggggcaggcttctccacctggagagctttctggtatgggcagctgagcggcatggtggagcccctggccggggtctttggtgcctttgccgtggtgctggctgagcccatcctgccctacgctctggcctttgctgccggtgccatggtctacgtggtcatggacgacatcatccccgaagcccagatcagtggtaatgggaaactggcatcctgggcctccatcctgggatttgtagtgatgatgtcactggacgttggcctgggctagggctgagacgcttcggaccccgggaaaggccatacgaagaaacagcagtggttggcttctatgggacaacaagcttctttcttcacattaaaacttttttccttcctctcttcttcatctcattatcctgattgactctgattataatagaaccatttttactttgctttgagggagatttttgatttaatggggaattttaaggtgtcatggaaatacagattctttgttttggccactgaatggactctctcttcagtgggattatcaaggaacttcagatcagggaaatctccacttcgggaccttctatctgcctcccaactcctcaaggtcacctatagaagcgagctaccaaaagacgtctcctaagcattttggtggcctagtgactcagggcagagtggccagcacacctctcatccgcccctcctgctccatcactgctgagcctctccccatctagaatgttggaactggagcatcataaagatagcaagctaccttccaaggccgagccagcccagagaggagcatgtcttcctttacctccccctaaggagatactacatgggagggggacacagaaaaagggaaggaaattggctagtctggctttttttttttttttttttaaaggcaaagattgacattattgaaggaaaggggatgaggacaactgtgaactcacagtgagccctgtggaaagaagag

SEQ ID NO: 18240 - DNA, 1742 bp, Homo sapiens
gagatagttatcagtcgtcccgttggatttcgtcacgggggctgtaagatgtgcctttcgctttctgccatgactgtgaggcctccccagccatgtggaactggtgcagcagaagacccccagacggccctggcactgaacttcggctctacgttgatgaagaagaagtctgatcctgagggtcccgcgctgctcttccctgagagtgaactttccatccggataggtagagctgggcttctttcaggcaagctctttgctgcagacactgagctgagtcaggcaatatggacgtgggggctggtggtaggatgaatagtgagagaaatgccagcactgtcctatccctccgaatcactcaccctactactgcatggagctaaactggcatctggcccagcaccttcatttctcatttgttgtccaaaccacatgcttagtctacagaagacaagagtgagaatggtgaggcatatcagagaaagaaggcggcagccactggccttccagagggtcctgctgtccctgtgccttctcgagggaatctggcacagcccggcggcagcagctggaggaggatcgcactgctcatcttggccatcactatacacaacgttccagagggtctcgctgttggagttggatttggggctatagaaaagacggcatctgctacctttgagagtgccaggaatttggccattggaatcgggatccagaatttccccgagggcctggctgtcagccttcccttgcgaggggcaggcttctccacctggagagctttctggtatgggcagctgagcggcatggtggagcccctggccggggtctttggtgcctttgccgtggtgctggctgagcccatcctgccctacgctctggcctttgctgccggtgccatggtctacgtggtcatggacgacatcatccccgaagcccagatcagtggtaatgggaaactggcatcctgggcctccatcctgggatttgtagtgatgatgtcactggacgttggcctgggctagggctgagacgcttcggaccccgggaaaggccatacgaagaaacagcagtggttggcttctatgggacaacaagcttctttcttcacattaaaacttttttccttcctctcttcttcatctcattatcctgattgactctgattataatagaaccatttttactttgctttgagggagatttttgatttaatggggaattttaaggtgtcatggaaatacagattctttgttttggccactgaatggactctctcttcagtgggattatcaaggaacttcagatcagggaaatctccacttcgggaccttctatctgcctcccaactcctcaaggtcacctatagaagcgagctaccaaaagacgtctcctaagcattttggtggcctagtgactcagggcagagtggccagcacacctctcatccgcccctcctgctccatcactgctgagcctctccccatctagaatgttggaactggagcatcataaagatagcaagctaccttccaaggccgagccagcccagagaggagcatgtcttcctttacctccccctaaggagatactacatgggagggggacacagaaaaagggaaggaaattggctagtctggctttttttttttttttttttaaaggcaaagattgacattattgaaggaaaggggatgaggacaactgtgaactcacagtgagccctgtggaaagaagag

SEQ ID NO: 18241 - DNA, 1432 bp, Homo sapiens
gttccgtttttccctattcggttcatcttatatgcaaacgagttctcgatagttgagcgtaagcaggcatcaggttacaggcctgctgcctctcagggtctcctagtagaaagactacagatgtttccctgtggggttctacaagagtgagaatggtgaggcatatcagagaaagaaggcggcagccactggccttccagagggtcctgctgtccctgtgccttctcgagggaatctggcacagcccggcggcagcagctggaggaggatcgcactgctcatcttggccatcactatacacaacgttccagagggtctcgctgttggagttggatttggggctatagaaaagacggcatctgctacctttgagagtgccaggaatttggccattggaatcgggatccagaatttccccgagggcctggctgtcagccttcccttgcgaggggcaggcttctccacctggagagctttctggtatgggcagctgagcggcatggtggagcccctggccggggtctttggtgcctttgccgtggtgctggctgagcccatcctgccctacgctctggcctttgctgccggtgccatggtctacgtggtcatggacgacatcatccccgaagcccagatcagtggtaatgggaaactggcatcctgggcctccatcctgggatttgtagtgatgatgtcactggacgttggcctgggctagggctgagacgcttcggaccccgggaaaggccatacgaagaaacagcagtggttggcttctatgggacaacaagcttctttcttcacattaaaacttttttccttcctctcttcttcatctcattatcctgattgactctgattataatagaaccatttttactttgctttgagggagatttttgatttaatggggaattttaaggtgtcatggaaatacagattctttgttttggccactgaatggactctctcttcagtgggattatcaaggaacttcagatcagggaaatctccacttcgggaccttctatctgcctcccaactcctcaaggtcacctatagaagcgagctaccaaaagacgtctcctaagcattttggtggcctagtgactcagggcagagtggccagcacacctctcatccgcccctcctgctccatcactgctgagcctctccccatctagaatgttggaactggagcatcataaagatagcaagctaccttccaaggccgagccagcccagagaggagcatgtcttcctttacctccccctaaggagatactacatgggagggggacacagaaaaagggaaggaaattggctagtctggctttttttttttttttttttaaaggcaaagattgacattattgaaggaaaggggatgaggacaactgtgaactcacagtgagccctgtggaaagaagag

SEQ ID NO: 18242 - DNA, 1275 bp, Homo sapiens
gaagtgactgcgggagtggagccggcgagagagtggcagcgggggctgatggaagtgcagtgggggctggagagggcaccctactgtatccagcatgctccaaggccacagctctgtgttccaggccttgctggggaccttcttcacctgggggatgacagcagctggggcagctctcgtgttcgtattctctagtggacagaggcggatcttagatggaagtcttggctttgctgcaggggtcatgttggcagcttcctattggtctcttctggccccagcagttgagatggccacgtcctctgggggcttcggtgcctttgccttcttccctgtggctgttggcttcacccttggagcggcttttgtctacttggctgacctcctgatgcctcacttgggtgcagcagaagacccccagacggccctggcactgaacttcggctctacgttgatgaagaagaagtctgatcctgagggtcccgcgctgctcttccctgagagtgaactttccatccggatagacaagagtgagaatggtgaggcatatcagagaaagaaggcggcagccactggccttccagagggtcctgctgtccctgtgccttctcgagggaatctggcacagcccggcggcagcagctggaggaggatcgcactgctcatcttggccatcactatacacaacgttccagagggtctcgctgttggagttggatttggggctatagaaaagacggcatctgctacctttgagagtgccaggtaagccagcatcctgggaccctagagcatggttctgcacccaggggtgctctgggtgtgcgtgtcacctgggtgggctgtctgtgcattattgttcagcaccccagccccacaggaccaagactgatggaggccacatggggtccggtgaaggccatccctgagagaggagtctcctaagagaggagtctttcaactgagctattaagtgggtgatgatcattttggaaacaaagcatggatagaatcgcaagctgtactctaagcacttcaaaggtgtgaagactaatgacaaaaaacaaaggcagccgctgacactcttcaggcctttcctttttgaagccctccctttgtctttcttgatgctagggtcccttcgtttccctctctctttccacctgctcctggaaaggccctttggtggtgggcttgtcatcctatggcctgttcttaagaggtgatgttcccagggacctgtatccagagcatccttccttctcactgaacaca

SEQ ID NO: 18243 - DNA, 1073 bp, Homo sapiens
gaagtgactgcgggagtggagccggcgagagagtggcagcgggggctgatggaagtgcagtgggggctggagagggcaccctactgtatccagcatgctccaaggccacagctctgtgttccaggccttgctggggaccttcttcacctgggggatgacagcagctggggcagctctcgtgttcgtattctctagtggacagaggcggatcttagatggaagtcttggctttgctgcaggggtcatgttggcagcttcctattggtctcttctggccccagcagttgagatggccacgtcctctgggggcttcggtgcctttgccttcttccctgtggctgttggcttcacccttggagcggcttttgtctacttggctgacctcctgatgcctcacttgggtgcagcagaagacccccagacggccctggcactgaacttcggctctacgttgatgaagaagaagtctgatcctgagggtcccgcgctgctcttccctgagagtgaactttccatccggatagacaagagtgagaatggtgaggcatatcagagaaagaaggcggcagccactggccttccagagggtcctgctgtccctgtgccttctcgagggaatctggcacagcccggcggcagcagctggaggaggatcgcactgctcatcttggccatcactatacacaacgttccagacgtgtttgcttcaccttctgccatgattgtaagtttcctgaggcctccccagctgtgtgaaactagggtctcgctgttggagttggatttggggctatagaaaagacggcatctgctacctttgagagtgccagggtcttgaacttggtttcctgccctggacttaacctgccttcctgacaccgactgacttcacctctccccatgccctcatgtcatgtcttatctgttcctattgtggatccgggattccttggcctgtcccttggcctgctgctgatcatatctccactctgacccacaatatagattttcaaggtaaaaatttttttaaaaaatgtttcactctgttgtctagtaaaatacatgaatgtgta

SEQ ID NO: 18244 - DNA, 1008 bp, Homo sapiens
gaagtgactgcgggagtggagccggcgagagagtggcagcgggggctgatggaagtgcagtgggggctggagagggcaccctactgtatccagcatgctccaaggccacagctctgtgttccaggccttgctggggaccttcttcacctgggggatgacagcagctggggcagctctcgtgttcgtattctctagtggacagaggcggatcttagatggaagtcttggctttgctgcaggggtcatgttggcagcttcctattggtctcttctggccccagcagttgagatggccacgtcctctgggggcttcggtgcctttgccttcttccctgtggctgttggcttcacccttggagcggcttttgtctacttggctgacctcctgatgcctcacttgggtgcagcagaagacccccagacggccctggcactgaacttcggctctacgttgatgaagaagaagtctgatcctgagggtcccgcgctgctcttccctgagagtgaactttccatccggatagacaagagtgagaatggtgaggcatatcagagaaagaaggcggcagccactggccttccagagggtcctgctgtccctgtgccttctcgagggaatctggcacagcccggcggcagcagctggaggaggatcgcactgctcatcttggccatcactatacacaacgttccagagggtctcgctgttggagttggatttggggctatagaaaagacggcatctgctacctttgagagtgccagggtcttgaacttggtttcctgccctggacttaacctgccttcctgacaccgactgacttcacctctccccatgccctcatgtcatgtcttatctgttcctattgtggatccgggattccttggcctgtcccttggcctgctgctgatcatatctccactctgacccacaatatagattttcaaggtaaaaatttttttaaaaaatgtttcactctgttgtctagtaaaatacatgaatgtgta

SEQ ID NO: 18245 - DNA, 709 bp, Homo sapiens
aataagctagtagaggcgggggtgaatcggacgagggctttcgctttctgccatgactgtgaggcctccccagccatgtggaactggtgcagcagaagacccccagacggccctggcactgaacttcggctctacgttgatgaagaagaagtctgatcctgagggtcccgcgctgctcttccctgagagtgaactttccatccggataggtagagctgggcttctttcagacaagagtgagaatggtgaggcatatcagagaaagaaggcggcagccactggccttccagagggtcctgctgtccctgtgccttctcgagggaatctggcacagcccggcggcagcagctggaggaggatcgcactgctcatcttggccatcactatacacaacgttccaggtgaggtcttgcccgtgagcgtgacagccactgcctgaaggtttccatttagctgcaagaaacagcactgtatttttcaaagcactagaaaattctgtggccagtccagaaagacaaaacatagcaccagtgtggcaagaagtggagctaatgcagcattaatgatcctggatgtttctgcactttcttattagaatttaccattcacctctaagcttcagctctgcagtgccccctatttgggattattgagcaatgtttaacgggaaagaaatgatgtctgttctccagccagtgactctgagtaa

SEQ ID NO: 18246 - DNA, 337 bp, Homo sapiens
cttcctagcacccacggaggtcttggcctcggccagggactcccattgtgtgagcacctattccagacagcagccttcatgtgctttcttggtttttcaggaatttggccattggaatcgggatccagaatttccccgagggcctggctgtcagccttcccttgcgaggggcaggcttctccacctggagagctttctggtgagtgctgcccaagggcaaggccatgtcacagcatcctccatgtgggcttctttcaacaaaacagtgatgtgcttttgcactgccatgctcagatatgacgtagaatggcatgcatccatgtgctagggttgagcc

SEQ ID NO: 18247 - DNA, 858 bp, Homo sapiens
agaaggagggctcgggcaggctctgccactcagatcaccatgtacagcttcatgggtggtggcctgttctgtgcctgggtggggaccatcctcctggtggtggccatggcaacagaccactggatgcagtaccggctgtcagggtccttcgcccaccagggcctgtggcggtactgcctgggcaacaagtgctacctgcagacagacagcatcgcatactggaatgccacccgggccttcatgatcctgtctgccctatgcgccatctccggcatcatcatgggcatcatggccttcgctcatcagcctaccttctcccgcatctcccggcccttctctgctggcatcatgtttttttcctcaacccttttcgtcgtgttggccttggccatctacactggagtcaccgtcagcttcctgggccgccgctttggggactggcgcttttcctggtcctacatcctgggctgggtggcagtgctcatgacgttcttcgcagggattttctacatgtgcgcctaccgggtgcatgaatgccggcgcctgtctacaccccgctgagcccaaatgtgtcccccaacttcatctggaagttaaagtgaggccactgaagaggaggaggagggtctagaggcctgaaatcctggttcctaggggaatgagggggctcagttctggactgtgggtttgtggggggaggctgactcctggtcctaggctggaaggaggaagaatagggcccatgggagggagctgagaagactcaagtccccgtctgcctggcaggttgttagaaaaatggactatccattagagcaactttctggggcctaataaaactgatgtgaaactactaaa

SEQ ID NO: 18248 - DNA, 984 bp, Homo sapiens
agaaggagggctcgggcaggctctgccactcagatcaccatgtacagcttcatgggtggtggcctgttctgtgcctgggtggggaccatcctcctggtggtggccatggcaacagaccactggatgcagtaccggctgtcagggtccttcgcccaccagggcctgtggcggtactgcctgggcaacaagtgctacctgcagacagacagcatcggtgagccccccggccagggtccaggccgcgcctggggaaagagcagggcggacctcggggcccaaggacacctgtattccagatggagaactctgcggctcaaagagggaaagggagcaacccaagcatactggaatgccacccgggccttcatgatcctgtctgccctatgcgccatctccggcatcatcatgggcatcatggccttcgctcatcagcctaccttctcccgcatctcccggcccttctctgctggcatcatgtttttttcctcaacccttttcgtcgtgttggccttggccatctacactggagtcaccgtcagcttcctgggccgccgctttggggactggcgcttttcctggtcctacatcctgggctgggtggcagtgctcatgacgttcttcgcagggattttctacatgtgcgcctaccgggtgcatgaatgccggcgcctgtctacaccccgctgagcccaaatgtgtcccccaacttcatctggaagttaaagtgaggccactgaagaggaggaggagggtctagaggcctgaaatcctggttcctaggggaatgagggggctcagttctggactgtgggtttgtggggggaggctgactcctggtcctaggctggaaggaggaagaatagggcccatgggagggagctgagaagactcaagtccccgtctgcctggcaggttgttagaaaaatggactatccattagagcaactttctggggcctaataaaactgatgtgaaactactaaa

SEQ ID NO: 18249 - DNA, 688 bp, Homo sapiens
agaaggagggctcgggcaggctctgccactcagatcaccatgtacagcttcatgggtggtggcctgttctgtgcctgggtggggaccatcctcctggtggtggccatggcaacagaccactggatgcagtaccggctgtcagggtccttcgcccaccagggcctgtggcggtactgcctgggcaacaagtgctacctgcagacagacagcatcgcatactggaatgccacccgggccttcatgatcctgtctgccctatgcgccatctccggcatcatcatgggcatcatggccttcgtgggtggcagtgctcatgacgttcttcgcagggattttctacatgtgcgcctaccgggtgcatgaatgccggcgcctgtctacaccccgctgagcccaaatgtgtcccccaacttcatctggaagttaaagtgaggccactgaagaggaggaggagggtctagaggcctgaaatcctggttcctaggggaatgagggggctcagttctggactgtgggtttgtggggggaggctgactcctggtcctaggctggaaggaggaagaatagggcccatgggagggagctgagaagactcaagtccccgtctgcctggcaggttgttagaaaaatggactatccattagagcaactttctggggcctaataaaactgatgtgaaactactaaa

SEQ ID NO: 18250 - DNA, 1343 bp, Homo sapiens
tgcccagatcggcagccgctgctgcggggagaagcagtatcgtgcagggcgggcacgctggtcttgcttacagttgggcttcggtgggtttgaagcacacattagggggaaatggctctgttcctgcaggtttgcgcagtctgggtttcttaggtttagggggttgggtgggtttctctgggggtgcggtgggaagcggatcagttcggataacggccctgagcaagagtctctgtcccgctcccggcctgacgcggggcttccagcggacaccaccgacgattttataggttcagaaagtgtgtctcagaggagttagagaagaccgattaatagatgacagtgctaaagcctggatctcctgaatcctggatgaaagtgtcctaagttagattcctgggaagaaaattctgagacacattctgcaggatgattattagggctcatccttggtttcaacacccatagaaggaagggggaagaagaaatcgaacagagagacagaagtcgagatgcatttcaggccaggactcttggctgaacccacaggagctctggagctagaatggcccttcagagttgtcctgagttggtctgagatggccagttctttatattcctgcatgggatagtcactggatgtccaccccaggaaggggtgtggccaagacagtccctaaaatgcccgccagcactccctacacctggagcgacaagaccaacatcacagggggaatgcactgggtgatggatcacagcgttcatcccagaagatgaggatacagaattggctgacaactacgttctaaatgtcagtgttctccaaaattcatatgttgaaacttaattcccaatgtgatggcattaggaagtggggcctttgggggagggactataggtcatgagggtgtaaccctcatcaatgggattagtgtccagagagctgccttgcccttccaccatgtgaggacatagtgagaaggtgccatctatgaactaggaagtgggcgcttaccaccagacacccactcttctggcaacttgatcttgaatttcccagcctccagaactctgagaaatcaatttctgttaattataagctacccagtcgatagcattttgttaaagctgctggaactaaactaagacactgacgctttctgcgacaaaaagatagagtgagtctctatagcataccatgtaacagatgtttttggaaaaataacctcatttcatatgtttcctcaagataaaaagaatgtcataacaacaaatgagaaaatagttgctttagaaatattgcaccctatggagagagtattttggattttggttttttgttt

SEQ ID NO: 18251 - DNA, 1332 bp, Homo sapiens
agggtgtgtgccgcgcgcgggaaacgccgttctccgctccaggcgtcggcgggcggtggcgagagcagattttataggttcagaaagtgtgtctcagaggagttagagaagaccgattaatagatgacagtgctaaagcctggatctcctgaatcctggttctgggatacatgtgcagaatgtgcaggtttgttaataggcatacgtgtgccatggtggtttgctgccccttcaacccgtcatctagattttaagccccgcatgcattagtttgggggaagttctatgaaatctaagttgatgaacattattccccctgctgataccaaaagtcctgacttgtaaggaggacaaagctgagatgaaagtgtcctaagttagattcctgggaagaaaattctgagacacattctgcaggatgattattagggctcatccttggtttcaacacccatagaaggaagggggaagaagaaatcgaacagagagacagaagtcgagatgcatttcaggccaggactcttggctgaacccacaggagctctggagctagaatggcccttcagagttgtcctgagttggtctgagatggccagttctttatattcctgcatgggatagtcactggatgtccaccccaggaaggggtgtggccaagacagtccctaaaatgcccgccagcactccctacacctggagcgacaagaccaacatcacagggggaatgcactgggtgatggatcacagcgttcatcccagaagatgaggatacagaattggctgacaactacgttctaaatgtcagtgttctccaaaattcatatgttgaaacttaattcccaatgtgatggcattaggaagtggggcctttgggggagggactataggtcatgagggtgtaaccctcatcaatgggattagtgtccagagagctgccttgcccttccaccatgtgaggacatagtgagaaggtgccatctatgaactaggaagtgggcgcttaccaccagacacccactcttctggcaacttgatcttgaatttcccagcctccagaactctgagaaatcaatttctgttaattataagctacccagtcgatagcattttgttaaagctgctggaactaaactaagacactgacgctttctgcgacaaaaagatagagtgagtctctatagcataccatgtaacagatgtttttggaaaaataacctcatttcatatgtttcctcaagataaaaagaatgtcataacaacaaatgagaaaatagttgctttagaaatattgcaccctatggagagagtattttggattttggttttttgttt

SEQ ID NO: 18252 - DNA, 480 bp, Homo sapiens
tattagtcccagaagatttatgttaggaaagtgagttatatgagccagtgacttgtctggattagaggtggtaaaccatcagcctataaaaaagaaaatacggtttgtgggcacgttttgtttagtctgcagggtattgatccactaagggatttttttcaaaaacataagctgatttctacaaagataaacaatgaaccagcattagggtgatggagacatttgtgtgttccacttttctgcatgacataatcggctgcagcaaaggagcagctgccttttatgggtttgtggtcaagcgagtttaaacacctggtgctttttacccctctgcactgggctcctacagacatttctatgtatttatgatcctagtcgtgatgtttacttagatttccttttggttctgtgattctttgtatttatcgtatgtttctcttgccctcactcactttttaatgcgtatgtatgtgtgtggcc

SEQ ID NO: 18253 - DNA, 952 bp, Homo sapiens
ggtgagatctagcctcttgacctgagagccgagagtggatcgctgggctgggctaacggcgacggagagcgcgccctcgctgactccgggcgcgcccagcagtagcaccgcccgcgcccgcccctggacacttgtaagtttcgatttccgatttccgcggaaccgagtcccgcgccgcggcagagccagcacagccagcgcgccatggcggacccggaggtgtgctgcttcatcaccaaaatcctgtgcgcccacgggggccgcatggccctggacgcgctgctccaggagatcgcgctgtctgagccgcagctctgtgaggtgctgcaggtggccgggcccgaccgctttgtggtgttggagaccggcggcgaggccgggatcacccgatcggtggtggccaccactcgagcccgggtctgccgtcgcaagtactgccagagaccctgcgataacctgcatctctgcaaactcaacttgctgggccggtgcaactattcgcagtccgagcggaatttatgcaaatattctcatgaggttctctcagaagagaacttcaaagtcctgaaaaatcacgaactctctggactgaacaaagaggaattagcagtgctcctcctccaaagtgatcctttttttatgcccgagatatgcacaagttataagggagaaggtcggcagcagatttgtaccaggagccacgagtcagacccacttcgtgaccccctcaccgaaggaacgcgttccaactgcctccgtccatactggtggcgaacgctcgccacgcaggaccagggtacccatgtccaaccgtattcggcggcattcaaaacccggcaaacctcgcgcgacggttggtgccaacgcgccccgcgcacatccgagcggacgaccaaacaccgcgcaggcacacaacgagcgccacagggcccaggtcaccgccacatcacga

SEQ ID NO: 18254 - DNA, 665 bp, Homo sapiens
aaatattaaatcatgttatatcaagtattttccagaaatacaaatatgaaaaggaagaattcatcattgtgatctttaattttgtggtcttcattgtttggggacaatataattgtaactcaaattatgctgcgtcaaatcattaaattaatacatttgtatatgcatgctcatatatgcacaaattgaaatatataaaaattcaaaacacacttgggtaataataaaaatctttaaggttgccataaacacaaacacacatacacacaactaagcaatcaaaaaacactagagccaggcacagtggcacatgctcatagttccagccgaaaggagaggttgagcccaggagctcgaatgaagcctggacagcataacaaaattccatttacaaaaaaaaacaaaaaacaaaaaaaacccactaaaacaacctaatcaaaaatttataaatttgaaaataatctctattaagactttgataaaatttaaaaatgctataaagacacaagtgttatacattaaggatgtaataatttgcatataggttaaaatgcaatgttttaaagaagataattcaaatagctagttctttgaaaagatcaataaaatggaaaagctgctgaaaagaaaattagaaaaagaaagaaagtaagggtatataacat

SEQ ID NO: 18255 - DNA, 467 bp, Homo sapiens
tatttctgagtaactaacattcaccctttacttttacttgcactgattggattttttaaacaccataaacattgtatttgtcccccactcccaaaagagagcaccttcatattgcttccattgctatgtctgagataggattcactttcatgtctttattcagggcacagagtgctagtcccatctggatatttttcaagttccgcagacatctttaagaattatgactgatcctaccaaaagatcggaacagcatattggcaggttacagggtttttatgagaatatatgagatcatctagtgactttacttttaaggtaggtagagtataagtacatagagaggccaggcgcagtgcatcatgcctgtaatcccagcactttggaaggccgaggcgggcagatcacgaggtctggagatcgagaccatcctggctagcacggtgaaaccctgcctctactaaaaa

SEQ ID NO: 18256 - DNA, 504 bp, Homo sapiens
ctcagttctagatgttgtagtatatatagaaaatgtatttaacatatataaatagggcgttagcctccgggacccaaatgtttagttagagatatgaggcccacgtaaaagaaaaccagcaaactaagtggcccaagtgaggccaaactggcagcacagagcccagtggaacaggccactctagtaattcttgagttcgtgagtataggccgggcacagtgactcacacctgtaatcccagcacttttggaggctgaagtgggaggactgcctgaacccaggagtttgagaccagcttggataatatagcaagatcctgtctctctctacaaaataaaaatttagaaaaattagctgggcagagtagtgcctgcctgtggtaccagctattcaggaaggtgaggtgggaggattgcatgagccccagaggttgaggctgcagtgaaacattattacaccactatactccagcttgggtgacacagcaagaccctatctcaaaat

SEQ ID NO: 18257 - DNA, 569 bp, Homo sapiens
ccaccgtcagccaggagaggcctgcagaatcagcctgtgcacctctctgacgataagcagagatgctggtttagagacttgctactcacggggaagtccttgggcctcctgtactcacattacctggaacttcttggaaattcagaatctcaggccccaacccagacggactgaatcaaaatcttcattgtggtaagaccctcggtgacacacaggcctgggaagcacaggttagcgtgtcaccttgggcaaagctctcagcattgtgagcctctgttttctactctgtaaaggaggcatgaatatctacatcatcagtttgccatgagtattgaaaaataatgtcttagaagcacagggcagagcctggcatgtagtttgtgctcagtgcacagcagacaagaaaccacatgcaccagacctgggcgggcgtcggcagcccaccctgagcaaccatgggtggccctcttgtctctcgggacaagaaatgcttctttagaaatgcttctttcctttctaaaatgaaagttttggacagtatttcctttcatttaaaaatttcatctgtg

SEQ ID NO: 18258 - DNA, 454 bp, Homo sapiens
atgatacagataatcaagtccattttctatgaaacaagagtttttaagtggcaaattttatagacaaaatgtagaaagtataaagtagactcatgagtggggctaacgccagggtcggaatgctttctcttggttaggtcttccagcaaaaccaatcaaccaatacacatggaaaatgcatcatacaaacttttcagatcagagctggggctttgccttgtgtcagccgacgaagaactcccaaggccgttctggattgaatctcagcgtagagatatgtaatatgccaccaactttcctcccttctaccggctcctttgaaagagagtccttcacaagcagttcaaggaaaaagcacattaacaatgacaatttacacttaccagctggggtggtgaaggttaaaggcaaaccaaagtaaactgacaatgataaagaacttaaaagcctatgc

SEQ ID NO: 18259 - DNA, 338 bp, Homo sapiens
gcccagcatctcaaggctcttggttttcctctctacttctcctctctaccaagctgtctttgagggtaaaagtataggctcttctactgtgatttagctttttgtgattccattcattcatttgcatgccagctctgagccaggcactggctgggcagctgagacgcaggggtaattttggaagctcagaagagaagcacaaaatcccatgctgagtgccataatcccatgatcgtaggggcagaggagtacgaagagtaaccaagaaagactctcctggccacagggttaagggtgaatgaaggaaggcttcccctagcctggggagatgaggtggg

SEQ ID NO: 18260 - DNA, 542 bp, Homo sapiens
tttggtgtctgagaagatgcagcttctccagtctctgcaactgacggcaggaagatgggagcactcagcttcagtgttcagaagcagatttaggccaattgccataccttacgttctggagggatccaccctgacctgagcaggtgaggtcacagaaaggcttgctgtccatcacagggacaggattacagcctgctcagaagcatgttgtggtccagctcttgtgtcacttaaaaagactccagctcttctctaatattgaattcaactaatatcacagagagatgttcttaatcttctagacaaacacactgccatcagtattccccagaggccacaaacacaccctggaaccataatgccaccagtagctctaggagaacttgcaggctaatgtgcctgttgctcattgtttttaggctacatatgaaaatggaccagtttgcaataaaaatataatgcaatgatgattatcagagcattttgtatactagggaattttttaagttatctgaacatcaaattaaatataatgacaatga

SEQ ID NO: 18261 - DNA, 485 bp, Homo sapiens
atacttgattgtaaagatattattgtttgcaaatctttgtggagttttttgggggccaaattgaagcattaactcaaaagaatggcccttttcttttattgttatgttcttttcattttatttatttgctttcatacattttctaattaattttatgtttttaccaataccagccccatcactggggttctggtgaccacttaattttactgtgaagtagaagccagatgatggataagtcaagccccaatataataaagccaccttaactagttaaactgatattatagagcttagctctgactccagatatacatatataccattactttatagaacaactctctctggaatagccgtgttctctttaagccaggtatgatggtgcatgcctgtagtccagctactggggaggctgaggtgggaggattacttgagcctaggagttcaaggccaacctgggcaacactgaaaaactttgtctc

SEQ ID NO: 18262 - DNA, 873 bp, Homo sapiens
ggttctatttacacttagttatcaaagctagtcattttttaaaggaggatcatctggcttgattaaattaagtttccttaaagccacaaataaatgaaaacctacttgcacttagatgctttaaaatactgactctgactgggtgtggtggctcacacctgtaatcccagcactttgggaggccgaggcaggcagatcacttgaggtcaggagtttgagaccagcctggtcaacatggtaaaaccccccatctctaccaaaaatacaaaaaattatccaggcatgttggcacatgcctgtcatcccagctgaggcaggagaatcacttgaacctgaggcagaggttgcagtgagccgagatcagtgtgagattctgttgaaaaaaaaaattcaacttgatccaaaacaggagcaggctgcctccatggtatattcatgtcatgccagagcaagagcaagggagaatacaaggaaataaggcagacatgatagctctcctcagacaattgaaggactgtcatgatgaaggagcaattagatttactggtttagttccagaagatagattaagaacttttatttagtgatggaggacaaattttggcttgataaggaaattttgactcatttgaggaccccaaagtggaatgaactgaattgttaggcagtaaattttggccatattgttcatatagaggttagatgaccgtttgcacaagggtcggatgaggttttagacattaaattgggttcaacctgcaaggagaagcaggcagatttaggaaaagtcaattcgccctttttctgtcatatgattctgtggcactattaaattcattattatttttctaggcacctctgtcaattttaccc

SEQ ID NO: 18263 - DNA, 417 bp, Homo sapiens
ctgcctctctacagcttcatcttgctttcttcactctgctgtctctgtctgtgctccagctgcacaggcatatgcagttcctacgatatgcctccctctacaccgccacagggtctttgcacatgcagattctttagcctgtggaactgcttgctctacctgctcatctcccagttgcctccctacacctggccattctcccatatccctgctttactctgttgagaaccttcatattccagcttgaacacagttttctgggaagccttacctaatcccccaggttaaaccatgttccctttataaatccccacagcatcaggattctttcctcaactgtttttaaatacagtcagcccttcgtgtctgtgggttccccatctgtggattcaaccaacagcagatcaaaaatatttg

SEQ ID NO: 18264 - DNA, 160 bp, Homo sapiens
ccagcacagctcaccaccagcacaggccaccaccagcaccatcagcacaggccaccaccagcacagctcaccgtaccagcacaggccaccaccagcacaggccaccaccagcacaggtcaccaccagcacaggtcacaccagcacagctcaccaccagca

SEQ ID NO: 18265 - DNA, 183 bp, Homo sapiens
tgctcaactaaggattgtgagagttgagagcttgattgaacacttaagtttcataaagattacttcaaaaatatttagtatcaacaaaaatagaggtctgtattgtaggtttaaaaactcatttttaaataattatttggtggtaattcattatactaaacttctcagtttctttttattcag

SEQ ID NO: 18266 - DNA, 546 bp, Homo sapiens
tttttgacttacagcattttcaactcacaatgggtttattgggacgtagccccatcataagtggaggagctcctgtgctgtgtgtgaatggcctagcaccgtgcctggtgtacaacagacaccatcagtggttcattccctccccttttgcataaggaatcccccctctcgctgggtggagtctgtcaccttggtcttcaggctgttcctgaagttggtcatgagtgcatggtccttttgccggctcttgttgatgttttcgatcagctcctgggctctcttctgcaggatgtcaatgcttgagtccagagaggagaagtagagtcccgacttcccttccaggaccgtcagctggcaactggcactggaggtggcgacacaagggcaagaaacctgacttctcagagtacaggaagcggccaggtgtagtcgctcatgcctgtaatctcagcactttgtaggccgaggtgggcggatcacaaggtcaggagttcgagaccagcctggcaacatggtgaaacctcgtctctagtaaaaacaaaaaaa

SEQ ID NO: 18267 - DNA, 860 bp, Homo sapiens
tttttgacttacagcattttcaactcacaatgggtttattgggacgtagccccatcataagtggaggagctcctgtgctgtgtgtgaatggcctagcaccgtgcctggtgtacaacagacaccatcagtggttcattccctccccttttgcataaggaatcccccctctcgctgggtggagtctgtcaccttggtcttcaggctgttcctgaagttggtcatgagtgcatggtccttttgccggctcttgttgatgttttcgatcagctcctgggctctcttctgcaggatgtcaatgcttgagtccagagaggagaagtagagtcccgacttcccttccaggaccgtcagctggcaactggcactggaggtggcgacacaagggcaagaaacctgacttctcagagtacaggaagcggccaggtgtagtcgctcatgcctgtaatctcggcctccaaaagtgctgggattacaggcgtgagccactgcgcccagcctgatgctttcttaagtgaccttcctgtcattaacctgctgcatccctttcccaacctactgggtgatgttgaccgcctggggctacagtgtacctgcacctccttgctcccaccaggtgaggtgaatacctgttgaattatatttaaagagcatttaaagaaatgcgcacacacaaaaagttgttggtcccatgttgtacatgtaactgtaattatgtaattcaaatattgtgttaacaagtgaaatagtggcagaagagtgacagctatctaaaaagctaaacagaatgaaaaattttgagtaatatgtaatgttccgtaacttcataatattcaatgtaataaaatggaacttcagttggg

SEQ ID NO: 18268 - DNA, 820 bp, Homo sapiens
ccctcatgaaaaatttggagaagatatcagagttagtggttaacaggaaagatacttaaatttttcgtgaatttacttcccaacagaataactacaaaacaaaatttgaagaggagtccaaggcattttctggttccatacttttttcattctcctgttggataccatttctcctgtctgatccaatgctgagctcagtggtaatgaagtgccacattgtgaaaggggagcctagaacggggctgccagagagacagtctgtaattgaaagttctttcaagagaaggacttctatcaggtctgctgagggaataggagctccacctgctgacttttttatgtttgctgactctgaaagaatgcaaaacatgaagaaattgaatggtgttatttcttttgtaatttctcagtggaaatattgttttcaaaattattgataagatgtaccagtctaaccagggctttcaagaagaaaatgcaatctatagcttgttttaagagtggggattatgttggcttccctgggccagtctaaataattactttaatctggaacaacatataaattcataaattgttgccaccacgactcttagggaatcctcgacttttcaaacattgcctctctcagccataaatttacactgcgccactcgcccatgtgtgttttgttttaagaagctgtagtctcttgttacatgtagtttggaagaaatgctagatgtttttgatctaaagaagaaagatcaagtcctagtcaaactttagtattttaaagggcatagacattatttgagtatatgtcgtctgcgtttcagaa

SEQ ID NO: 18269 - DNA, 356 bp, Homo sapiens
ccctcatgaaaaatttggagaagatatcagagttagtggttaacaggaaagatacttaaatttttcgtgaatttacttcccaacagaataactacaaaacaaaatttgaagaggagtccaaggcattttctggttccatacttttttcattctcctgttggataccatttctcctgtctgatccaatgctgagctcagtggtaatgaagtgccacattgtgaaagggtaagagaactggtacaaagcgtaccagggaacaaatgaattagtacacctgtcacgtctcactcttgaaggatggcaccttctttgttaattgaaaagaaatgtaaaatgggagaaatagcaaaaaaaa

SEQ ID NO: 18270 - DNA, 444 bp, Homo sapiens
tgagatggagtctcactttgttgcccaagctggagtgtggtggcacaatcttggctcactgcaatctctgcctccctggttaaagcgattctcttgcctcagcctcccaagcagctgggattacaggcacatgccagtacccttggctaacttttttgtatttttgtagagacagggttttactatgttggccaggctggtctcaaactcctgacctcaagtaatctgcctgccttggcctcccaaagtgctgggattataggtgtgagccactgtgcccggccctcactgaaactttgaactcctaaactcatgtgatcttctcgcctcagcccctgagtagctaggactatagacaaaagccaccacacccagctaatttaaaaaattttttgtagaggtaggatctcattatgttgcccagggttagtcttacaggactgt

SEQ ID NO: 18271 - DNA, 739 bp, Homo sapiens
catctacggagcccagcaggcgtgccaggcaatggggagtctttatcacactgactgcttcacctgcgactcgtgtgggagacgactccgtgggaaggcgttctacaacgtgggtgagaaagtgtactgccaggaggacttcctgtactccgggttccagcagacggccgacaaatgcagcgtgtgtggacatctcatcatggaaatgatcctgcaggccctgggcaagtcctaccacccaggctgcttccggtgctccgtgtgcaatgagtgcctggacggggttcccttcaccgtggacgtggagaacaacatctactgcgtgcgagactatcacacggtttttgcaccaaaatgcgcctcctgtgcccgtcctatcctccctgcacagggctgcgagacaaccatccgtgtggtgtccatggacagagactaccacgtggcatgttaccactgtgaggactgcgggctgcagctgagcggggaggagggacgccgttgctatcccctggcgggccacctactgtgtcgtcgttgccacctgcggcgcctccaacctgggcctcttccctcacccactgtgcacgtcactgagctctgagcaggggaaaacccgtccctgggccggggtgggtgtgggtgtggagggagggcccgcgtgggtggccctggtcagcgtcaggggagctccctccaatcagtttcccaccgagctgctgtctgcaggggccggaccccc

SEQ ID NO: 18272 - DNA, 539 bp, Homo sapiens
attcggcacgatgagagacagggtttcaccgtgttggctgggctggtctcgaactcctgaccgaagcgatgatccagccgcctcagcctcccaaagtgctgggattacaggtgtgagcccctgcgcccggcggaagagtcttcatgttgttttgcggcaccctgcagatctgcccctcccctccgtccctcccccgtcccgtgacctctgatgtgcgcttgtctgctgactctggggctgggggctgtgttcttccctaggactgcgggctgcagctgagcggggaggagggacgccgttgctatcccctggcgggccacctactgtgtcgtcgttgccacctgcggcgcctccaacctgggcctcttccctcacccactgtgcacgtcactgagctctgagcaggggaaaacccgtccctgggccggggtgggtgtgggtgtggagggagggcccgcgtgggtggccctggtcagcgtcaggggagctccctccaatcagtttcccaccgagctgctgtctgcaggggccggaccccc

SEQ ID NO: 18273 - DNA, 972 bp, Homo sapiens
attaacccatttattataggccagtgatgtctcaaagagtagaggagcgtctactggtctttcaactccttcagtcttctgatggcggactttaccgtgacagcggaagtggtattgtacgtccaggcaccgccagccactgtcttcatgcaggaaccacagtgccagatccccacagctcgtctcttcatcttggttttgccacagaaagagcaagtgtacttggcgtgctggctgatttcaattttcttcaccattttccggagggaggccccatagcgggtcccgtatttaccgacgatcccgactttctgggtacgttgggccatgtcgccgcccacgcgtccggagaaagtgtactgccaggaggacttcctgtactccgggttccagcagacggccgacaaatgcagcgtgtgtggacatctcatcatggaaatgatcctgcaggccctgggcaagtcctaccacccaggctgcttccggtgctccgtgtgcaatgagtgcctggacggggttcccttcaccgtggacgtggagaacaacatctactgcgtgcgagactatcacacggtttttgcaccaaaatgcgcctcctgtgcccgtcctatcctccctgcacagggctgcgagacaaccatccgtgtggtgtccatggacagagactaccacgtggcatgttaccactgtgaggactgcgggctgcagctgagcggggaggagggacgccgttgctatcccctggcgggccacctactgtgtcgtcgttgccacctgcggcgcctccaacctgggcctcttccctcacccactgtgcacgtcactgagctctgagcaggggaaaacccgtccctgggccggggtgggtgtgggtgtggagggagggcccgcgtgggtggccctggtcagcgtcaggggagctccctccaatcagtttcccaccgagctgctgtctgcaggggccggaccccc

SEQ ID NO: 18274 - DNA, 419 bp, Homo sapiens
aagaggccagtacaggaaggcatggcagaagctgttccctgtctgccccgaggtgtgcacacagggagagagggcctgatacttgggctacgtcagtgggttcctgtgggtgcccctgtgcttgtgcccttggcctctggtcactcagctgatcacttctggtttcctttatttctctagggtttttgcaccaaaatgcgcctcctgtgcccgtcctatcctccctgcacaggtaggagccactcacccagagatgatcaggtgcctggcccagccggctgctgtcctgtctagcctgggtctagcccaggtcttgggcgacagtgggagggatgagcaggtgcttctccgcagatctttcagggctgagggatgtgtgttgtgcttgtgtacgtggggtacagctgtcccctggcaca

SEQ ID NO: 18275 - DNA, 327 bp, Homo sapiens
tgggattataggcatgaaccactgcacccagtccaagaatttaattctttgaaaatatttacacttttttgctcaaaattctcctatggcaaaaatacagagttctgccctgagggcctttgcacctctggttccttcagcctagcatggactttctttttttttcagagacagactctcattctgtcacccaggctggagtgcagtggtgtagtcacagctcattgcagccttgaactcctagactcaagtgatcctccttcctcaccctcccaaattgctgggattacacacatgaaccaccattcctgaccttgtactttgttt

SEQ ID NO: 18276 - DNA, 278 bp, Homo sapiens
aaaaatacaaacagggttgagaatcactaatttactagccccagatgagtcaatcactagttaaacgaaacctgcagaacttttagtccattgtttctaaatctttttttgaccagagcccctctttttagttaacattgtgaaattctgaaggaacttaaaagctgacctacaatatactgcttttgtacacaatagaataatagcagtgacaattttattagaaggtttattgtcttgcatttcaaaaacagcctattaaataagtttgtttttaa

SEQ ID NO: 18277 - DNA, 569 bp, Homo sapiens
atgagaaaacagcagaacgccagctttgcaggtacctccacagcactgccgggctgggaacagggccagtgcttgcaccagcgctggagggggccacagcagagtaaagacagagtctgccatgcaggagtgcttcgcaggtcaggcactgctctgagtgctttgtgttaacctgccccccgccccctaacttgggaaaggtgttaaagaaggagagaacgccctcaatggtgtgtcctttgcatacacacctttgcatgcatctgatgtgcccaggctgtgttttattgttctagcaatttattgttacaaaacagattgctgccatcaatttgtctcaggtccttctagcacatctgacagggactagtgtctagagccatgaggacagagaccagaagggacaagaaggagtgggcagagggaatggaaggtagagttaggcccagagagccccaggctgctgcccagacctccacgcctgtgccggatgtggtgttggcatccatagcagtctcgcaaagttgttctcattttccaaataaggaaactgaggcccagggagaggt

SEQ ID NO: 18278 - DNA, 388 bp, Homo sapiens
ggcgacctggaggtacagataccaaccaggaggcccgaccaaaagcagatcaaataggagtgacagagttcagagctgcctgggacaaagttttaaattttattttcactgcaacccataggaagataaacattttatatcatgacccagcacacacacacactcaaagcaaaacttatcacaaaacactatttctttattgtggatgaactcacatgtttttcattccattaaaaaaaaatgctggttgctgcccactaagttgacttcatagtgggccataacccacagttttcaaacttattagggagctcatttagggaaataaaacagcaggattatatccttggtttgatgtgggggttggggagcaagaatcctgacatgg

SEQ ID NO: 18279 - DNA, 465 bp, Homo sapiens
ccgctgtcttttggtgggaacttctcagccagggcgttagtgggcatgataactcaagctcaggtcttgagcacacccactacggactcttgcaagagggagagttgaggaaaatggttctaaaacctcagtaattagaagagacagcctttggccgggtgtggtggctcacgcctgttatcccagcactttgggaggcctaggcgggcggatcacgaggtcaagagatcaagaccatcctggccaacatggtgaaaccccatctctactaaaaatgcaaaaattagctgggtgcgatagcagatgcctgtaatcccagctactcaggaggctgaggcaggagaatcgcttgaacccgggaggcggagcttgcagtgagcagggatccccgggaggcggagcttgcagtgagcagggatcgcgccactgccctccagcctgggcaacagagcgagactccatctc

SEQ ID NO: 18280 - DNA, 2471 bp, Homo sapiens
acttaactagaattctagttaagatggtgatcccatggcttatttgcaaacaggaaggataaagagatcagcgttttagtcatggagctcatctttgcccattcctactcatttgctttttcataggagttttttgttgttaaacagtttctctcaagccacatgcattctatgctggctgaaaattaatagtgatgtagatgttcatccgacaagcttttccccatgtgattggttttagccagagtttatcacaggtacaaaattaggcggtatgactgtgcatgttctctagctgatgttgaaacttgtactgtcttgatcatttaaaactatgtttttgtaaatatcaggtttagtccgctttcgggaatatctgcatgctatggaaagagagaaaaaaaggatagataatgaggaatttggtttaaaagtgtgataaaaatccttggcattctttgttctgatattaattgtatttaaataagtcaacccaatgtaactcattccagatcttagtccagctgccctgttcagcctgatgccttttaaaggtttaaaggtgttaatgttttccttttcaacatggcaaacattttttaaaacctttttggcacaatggtgccactgtcctcatagtgttatttctttggtcatgaattttcaggcccttccagtaagaggagaaaggcacttaactggttaacagccccattattatacattgctctaaggaaaaaaaaaaaaaaaaaactttgaatatatcaagaatgggctattccagaggcttctcctcaggagaaactatgcactaggttcccaccaaatacaatgtgacctttttttcccctttctctgtacacaccccagatatgtgccaagcaaatgagaatgagggccgttgacaattaaagcataaagaagctagtcaccagattgagatggacatgctgctaactgctgacagcttgacctgagcagtcctaacttgtatctggtctgttagcattgggttagattgactaacagagtaaataaaattcacctgtcataagacacgctacatctgctatcatcaagaaacaaatcatccagaagaaactttttttcatcctgtggtcacacccttttcttaagagcttcttttttaaaattatgacaaacgaatttcattctttaaaatcacttatcttctcccaaacttgaagtatttaaattaggtggttttgcttttccctctcattgtttattttttggggatggatctaaatgagtaagatgagcaataaaagataccagaaagactggagggatcacagtgttttcatcagaactaagtagagggtcggttcctgccctggttttggggtagctagaaaaggaaatcatgaatgcactggaaatgttggctcgagagaaaagactggcatagctctgcctcgcagtgggtgagagcgtattgatcgtagggacctgcagagttcctatgaccaggtgagtcggctctgaggaaggggttaggaaagcaagtacagctgcatgaaatagctgaagttcctttggggtcaggaagagccgacaattgtggggttttggttgcttttgctttgtttttgagtgggaagtgttgctggaatcccctgagaaccgaaagatgccaggggtcagcaaggctatagaaaaggccagtggtaacacctcgttttcatcctaacagaggagtaggtgcgaatggcaccagcatggatcgttcctttcttgatcattactcatgcttgccactgtagcaacacaacaaagccatgattgtaattaatactaggctaaagaccttgatcaaaatgggagctcatttactgttctatgaggtatgtaagtaacttctcttcacattttccctcagagataaaccacacgtggtagtcttgtttgcgttagtactaaggtcatgtttgatctgtcccagacgagtcgcatatttcctgtagctggagtgttgctcaccataaatggtcattttcaaaaagtattgtgtaaatccagctgtacaactgaccagtgagttatctgtcatcactgttgcccacatacccgtccttccttgtgtagtttcatcatcctcatccttcccacatcttgcgcaaaatgattttctgtgctcattcggcaataactatgttattcggcatactgtctttttggcatttgttgaaaaatccaaatgcttttaatccaaaagattaatccaaatcttttttaatccaaatgattttaatccaaatccaaataacaggaggttaaaaaaaaaaaaaaaactaagcatttttacatgtacactgaattggatcagcattattgttcattataatgctatatatatttttggagcaacatactatagttgtcataaaactatctttattcttctcctctaaagtgctgttgtaaattcatttgacctttactgcagg

SEQ ID NO: 18281 - DNA, 456 bp, Homo sapiens
gcttctagaaatttagaatatgaaacacttcatagaagagttggaaattcagaatattaaattcttagagggttggaagataaagttgagaaaactcccacggaggaggacaaaaagagttgtaaagtgggagaaaataagaaaactagaggatcacacttgcatgcacgttcaacatatgaaaagtaagaatttgctgggcgcagtggctcacgcctgtaatcccagcactttgggtggtcgaggtgggcggatcacctgaggtcaggaattcaagaacagcctggccaacatggtaaaaccctgtctctgctaaaaatacagaaattagcagggcatgttggtatgcacccgtaatcccagcaaatcgcttgaacctgggaggtggaggttgcagtgagccgaggtggcgctactgtgctccagcctgtgcaacagagcgagacactgtctcaa

SEQ ID NO: 18282 - DNA, 1852 bp, Homo sapiens
aagacgatcctggctaacatggtgaaaccccgtctctactaaaaatacagaaaataagccgggcgtggtggcgggcacctgtagttccagctactcaggaggctgaggcaggagaatggcgtgaacctgggaggcagaggttgtgatgagccgagaccatgccactgcactccagcctgggcaacagagcgagactccatctcaaaaaatagataaataaaataaatttcttccatgtctttttatagcttgacagctcatttctttttagcacagaataacatcccttcattgcacacactgtgtaaagaatgactcctgcttatacacaggacagcttactcaggacagcaacatgatctggtcactgtctaaacaacttgtgcaagataaggtgacttaaatgctatctgagagcagtggtgctgtcacactataggtgacacagctcaggtcccataatctgccttgaaacatttcttcctacactcctcgtatttgctgtgatttataatccgtgctgccctgggtggccaatggtgcttaatgctgtgaacatggcatcttagcccgcacacacaggttcagattctggctttcagatgtgctttctctgtgagttagggatagatatgtaaacctcttcagccctttgttttggtatgaaaaggtgcgataatttacctcaagaggatttacatcaattagtgctgttagagaccttagtaacttgcatagcatttagtatgctttgaaaagttacctttatgaataagatatgtcaagtgtctgtcatgtttcttatgagattgacctttgccttcattatatcttacatattttcttttttgtaattttttttttcatatcaacatttctctgactctacataataaaatgttaaagcacacagctttcattatatgtattttttggccatagaactggaaaactagatgacatttcctagtcagggagtttctctatatactgctgtcatataactgcaggcatgaaattatttcagactcccctcctaattcttcatctttatagtaatgtgcatttacctgaagctgatatttctttctgtagttcataagcagtaattctttagaatttcactgacaattttgtgtaattgtggttgttcattaacttgcctgttagattttcacaggttactaaagtgttttatttatttttgtaatgatttacagatgatggtttttcagtatatattatgcaatagaaccaccatgcacaaattgttaatgctgcaaaatgcacattctacatgggtgtaagtagttttataacaagtactcacatttgcaatttgtaaatattcaaaattttattaaattcttccgaattttttctttcagtgttttgtttgcaattatgaattgtcatttttaaatattttttattagataagcttgagctgtgccttaccttttgtgtgtaataattatgtactaaataatgcattactatttgtttatcttcatatatgagactaccatatagctatgccaatttacgtgttccttggagtggtggtggaaaaatacctcttctttcagagtttatgtggatttacatagtatgagtgttttagctatagggtgttttaaactgtgcttaaaataatttgttacatgttttgttactgtgttactttattgaggacagctagtccctttgtgttgttaaacgtttaaagacagttgagaagcttcataactctgttcattgtaaatcttagctttcttgtaatatgtattttaataaaatatttaccttgcaactctaaaaagtcgacgcggccgcgaatttagtagtagta

SEQ ID NO: 18283 - DNA, 1558 bp, Homo sapiens
aagacgatcctggctaacatggtgaaaccccgtctctactaaaaatacagaaaataagccgggcgtggtggcgggcacctgtagttccagctactcaggaggctgaggcaggagaatggcgtgaacctgggaggcagaggttgtgatgagccgagaccatgccactgcactccagcctgggcaacagagcgagactccatctcaaaaaatagataaataaaataaatttcttccatgtctttttatagcttgacagctcatttctttttagcacagaataacatcccttcattgcacacactgtgtaaagaatgactccttgtgagttagggatagatatgtaaacctcttcagccctttgttttggtatgaaaaggtgcgataatttacctcaagaggatttacatcaattagtgctgttagagaccttagtaacttgcatagcatttagtatgctttgaaaagttacctttatgaataagatatgtcaagtgtctgtcatgtttcttatgagattgacctttgccttcattatatcttacatattttcttttttgtaattttttttttcatatcaacatttctctgactctacataataaaatgttaaagcacacagctttcattatatgtattttttggccatagaactggaaaactagatgacatttcctagtcagggagtttctctatatactgctgtcatataactgcaggcatgaaattatttcagactcccctcctaattcttcatctttatagtaatgtgcatttacctgaagctgatatttctttctgtagttcataagcagtaattctttagaatttcactgacaattttgtgtaattgtggttgttcattaacttgcctgttagattttcacaggttactaaagtgttttatttatttttgtaatgatttacagatgatggtttttcagtatatattatgcaatagaaccaccatgcacaaattgttaatgctgcaaaatgcacattctacatgggtgtaagtagttttataacaagtactcacatttgcaatttgtaaatattcaaaattttattaaattcttccgaattttttctttcagtgttttgtttgcaattatgaattgtcatttttaaatattttttattagataagcttgagctgtgccttaccttttgtgtgtaataattatgtactaaataatgcattactatttgtttatcttcatatatgagactaccatatagctatgccaatttacgtgttccttggagtggtggtggaaaaatacctcttctttcagagtttatgtggatttacatagtatgagtgttttagctatagggtgttttaaactgtgcttaaaataatttgttacatgttttgttactgtgttactttattgaggacagctagtccctttgtgttgttaaacgtttaaagacagttgagaagcttcataactctgttcattgtaaatcttagctttcttgtaatatgtattttaataaaatatttaccttgcaactctaaaaagtcgacgcggccgcgaatttagtagtagta

SEQ ID NO: 18284 - DNA, 753 bp, Homo sapiens
atcaattagtgctgttagagaccttagtaacttgcatagcatttagtatgctttgaaaagttacctttatgaataagatatgtcaagtgtctgtcatgtttcttatgagattgacctttgccttcattatatcttacatattttcttttttgtaattttttttttcatatcaacatttctctgactctacataataaaatgttaaagcacacagctttcattatatgtattttttggccatagaactggaaaactagatgacatttcctagtcagggagtttctctatatactgctgtcatataactgcaggcatgaaattatttcagactcccctcctaattcttcatctttatagtaatgtgcatttacctgaagctgatatttcaaaatttagtgattctcaacatattatttttcctattgtgtgtcccttctgttttttctgtagttcataagcagtaattctttagaatttcactgacaattttgtgtaattgtggttgttcattaacttgcctgttagattttcacaggttactaaagtgttttatttatttttgtaatgatttacagatgatggtttttcagtatatattatgcaatagaaccaccatgcacaaattgttaatgctgcaaaatgcacattctacatgggtgtaagtagttttataacaagtactcacatttgcaatttgtaaatattcaaaattttattaaattcttccgaattttttctttcagtgttttgttt

SEQ ID NO: 18285 - DNA, 428 bp, Homo sapiens
aactttctggattagttgtaggttgcaactgtggcctgtagcctgactctacttccccacttctctcctgctacaacacacaccttaggaaggcagtttgattactgatgcagcggtccccagaaagggattgagcttttgcaggaagttcattggatgatgatcgggaaagaggttatagaaaaccattttgaaaatttaggatttctgttgtttgtttgttcgtttgtttgtttgtttgtttgttttgagacagggtctcactctgttgcccaggctggagtgcagtggcgccatcttgactcactgcaacctctacctcccgggttcaagcaattgtcctgcctcggcctcccaaagtgctggcattacaggcatgagcaatcgtgccccgcttcttttcttgatatataagctggtaacaaaca

SEQ ID NO: 18286 - DNA, 439 bp, Homo sapiens
tagcatgttccaggacatgtatctttttttttttaaagggcataggcagaaggagaggaaaagcagttcagagtactaaggggctatgattggaagggtgtcaagaactagctctctcaccctcaaaaggcctccctggcccagcctgtcctgcctaaattctctaatcagagtgcaggtcactggggagtgaagattctcaacctcactcacctctttcacccctccacatctgcccaccccatctccactatttagtgcaaaggctcctgggaacagcgacattctaaactgttaacagctgaagccttccaaaggattctgtcccccagtgacagttggctgaagactgtgaaagagaaagagcggtccttcagggttgggagaccaagagggaagggaaattactagcctcaggaagaagcagactcccagcctg

SEQ ID NO: 18287 - DNA, 369 bp, Homo sapiens
ggtaactgtagtcttgtagtataattcaaagtccagtcatgtgatacctccagatttgttcaaaaacttttgcttaggatagctttggctattcgggctcttttttgattccatattaattttaggatttttttttctaattctgtgaaaaatgatgttggtattttgatggaaattgcattgaatctgtagatttctttaggcagtatggtcattttcacaatattgatccttctaatccatgagcatgggatgcatttccatttgtgtcatctgtgatttcttttagcagtgttttgtagttctccttgtggagatcttttacctcccgcattacatatgttcttaggtattttattttttttcctg

SEQ ID NO: 18288 - DNA, 335 bp, Homo sapiens
tataagctgtggtctgtgggaaaacatatgtgttagatacaaccttgcctagaaacttgcgggtttattccagcctaggaattttccttctcttttcctcccttttcttcatacttaagaacccatgaaactagtgttctaaatagtacttaagccaatttctttgaataattttttttttttacatttttattttaaaaatgagacagaggctgggcgcggtggctcacacctgtaatcccagcactttgggaggctgaggcaggcgcatcacttgaggtcaggagtttgagaccagcctggccaacatggtgaaaacctgtctctactaaaga

SEQ ID NO: 18289 - DNA, 444 bp, Homo sapiens
atattttatggtagtagatgatagactagtatctacatatgtttttatatttgatgcatttatgacattcttaattcttttgatatttttcatgtttttcaaattgttgcaaatctcctccaaattttccaatataatttattgaaaaaaatcagcatataagcggacctgcacggttcatccccatgctgttaggccaggcgtggtggctcacgcctgtaatcacttttggaggcccaggtgagaggagtgcttaaagccaggagttcaagaccattctgggcaacaaagtgacaccccatctctacaaagaagataaattagctgggagctgtggtgcatgccagcttcccaactacacaggaagctagggcaagaggatcattggagcccaggagtttgagaggctgcagtgagctgtaattgtgacactgcactccagcc

SEQ ID NO: 18290 - DNA, 698 bp, Homo sapiens
tgagacgtggaggttgcagtgagccaagattgtgccactgcactccagcctaggcgacagagcgagactctgtctcaaaaaaaaaaaaaaaaagaaaaaaaagaatgccttattagcaaaggactaggtggtatagagaaaaatatttacattgtcgtaataatgtaaataatgacattgggccaggaacagtggcttatgcctataatcccaacactttgggaggccaaggcatgtggatcacctgagatcaggagttcgagaccagcctgaccaacatggtgaaagcccatctgtactaaaaatacaaaaattagctaggcgtggtggcaggcacctgtaatcccagctactcaggaggctgaggcaggagaatcgcttgaacccaggaggcagaggttgcagtgagccaaaaccatgccattgcactccagcctgggccacaagagcaaaattctgtgtcaaaaaaaataaaaataaaaataatgacattggttttcaacttttagaatcagcctacagacaaagcatggaatgatataatttttaaattatagggaaataaaacttggactcagccaggtgcggtggcccacacctgtaatctcagcactttgggaggccgaggcgggtgtatcacgaggtcaggagtttgagaccagcctggccaagatggtgaaacctcatctctactaaaa

SEQ ID NO: 18291 - DNA, 351 bp, Homo sapiens
atctggaaaagccactgttcagtgggttcctgctgctgagttgaaaacttaggggaggcagctgctgctgtgataaacacgagagccaccgtcgccgggtggtgcttagctctaggaactgctggcttcacagagctgaatgctaaatatggcatttgagaaactccagtcagcagcagatgtgaaaagcatgtttcaagtccccatttgtgccctggtattcacagagcagtcagcctgtcctcacataggtacatgtggaggagtggagatcagaactgcacgcaccacagtgcacaaccttcagaaatacgagtgcccatcatttctcttggagcctggcaaacaggt

SEQ ID NO: 18292 - DNA, 271 bp, Homo sapiens
gaggtgtgaatcaggtcatgtgtaaggacaattcataaggcagtggcatgtgggatagattgctggaaactaagaccataaaggcaggccattgcactggcccaggaaagaggcagtgagatcctgtgccacagtggtagccatagagtatggaagagaagccattagaatccatgggctcaggactacgaactggagactggctggtcccacaggctcaaagccacttgcagtttgtaaggggcaactatgaaaacaaacaaacaaatac

SEQ ID NO: 18293 - DNA, 435 bp, Homo sapiens
ctacttacagtgctcttactttatgaaagatgtgacattcagcattttggggaagcagagacatgactccgactcttcaggagctcaacaatgggagaggcatgccccaggttgtctgtgtttgagaggcagggaagtctgtgccaagttctttctgttcatggttactggaattctcacctctagcatctgatttctttctttcctgtgtgagctacctcccatgggcattaaaaatcaagtctctgacaccactccgcatcttcaaagaaaacaaatcatttacagaattttaatcagataaagagaggagaaggctgggcacagtggctcatgcctgtaatgccagcaacttgggaggccaaggcaggaagatcacttgagcctaagagtttgagaccagcctgggcaacttagtaggactcccatctctac

SEQ ID NO: 18294 - DNA, 385 bp, Homo sapiens
aatccatgtttcttggaagacccttcataattgtgaaccttacttacctttctagccatatttcttaccagttctccctaattctctgttgcagctactgggaattgtttataattcctagaatgttaagtgtttttcatatctaagttttgacacgtgccttgaatgcctttcttccttatcttctccctacttatacctggttcctgcaggactcatatcagtcatcatcatcatctccagaagccttctctcactccatgaaggctgtattaaatccttctattaagttcgcccatcatgtctgtagaaccgaatgatagcatttattttacggtattatgattgcctatttacttgactcccctcctaaatagtaagctcc

SEQ ID NO: 18295 - DNA, 1773 bp, Homo sapiens
ggcctttgtctcgctccagccagagctcagggtccatcttcattgcttagtatcctctgctctagtagttcccggtgactgtcgcagcctctgttgccctctgacttgcagatgctgtgagatccagagctaagactccacgacatcccggaagccgaaaaatgctatgtcttctcattacactgaagaccttttgccagaacagtgcatgcaagattcattccaaaaagtgatactgagaagatatggaagctgtggacttgaggatttacacttaaggaaggatggggaaaatgtgggtgagtgtaaggatcaaaaagaaatttataatggacttaaccaatgtttgtcaactctacctagcaaaattttcccatataataaatgtgtgaaagtctttagtaaatcatcaaatctaaatagagaaaacataagacatactacagagaaacttttcaaatgtatgcaatgtggcaaagtctttaaatctcactcaggcctttcttatcataagataattcacactgaagagaaactctgcatatgtgaggaatgtggcaaaacctttaagtggttctcataccttactaaacataagagaattcacactggagagaaaccatacaaatgtgaagaatgtggcaaagcttttaactggtgctcgagtcttactaaacataagagaatccatactggtgagaaaccctacaaatgtgaagaatgtggaaaagcctttcactggtgttcaccctttgttagacataagaaaattcatacaggagaaaaaccctatacatgtgaagactgtggcagagcgtttaaccggcactcacatctcaccaaacataagacaattcacactggaaagaaaccctacaaatgtaaagaatgtgggaaagcctttaaccactgctcactacttactatacatgagagaacccatacgggagagaaaccctataaatgtgaagaatgtggcaaagcttttaactcatcatcaattcttactgaacataaggtaattcatagcggagagaaaccctacaaatgtgaaaaatgtgacaaagtctttaagaggttctcataccttactaaacacaagagaattcacactggagagaaaccctacaaatgtgaagaatgtggcaaagcttttaactggtcctcaatccttactgaacataagagaattcatactggagagaaaccctacaactgtgaagaatgtggaaaagcctttaatcggtgctcacaccttactagacataagaaaattcatactgccgtcaaacgctataaatgtgaagaatgtggcaaagcttttaaacggtgctcacatcttaatgaacataagagagttcaaagaggagagaaatcctgcaagtataaaaaatgtggggaagcttttaatcactgctcaaaccttactacgtaagaatttttactaaagagaaatcctacaaatgtaaagaatgtggcaaattccataaatcttgctcaaggcattgaaatcacaagataattcatactggagagaaacactacaaatgtgaagaatgtggggaaagtcttcaaccattgctgacagcttattgcacagaagaaaattcatgctgagaaaaattctgattttaaagaatgtggcaaagcatttaataactactatgaacttactcatcagaggttttgtgctagataaaagcaatgtaagtgtaatgatacacattacatttatctgtggaaagatgtcaccaaataaaagccttagagtac

SEQ ID NO: 18296 - DNA, 451 bp, Homo sapiens
ggcctttgtctcgctccagccagagctcagggtccatcttcattgcttagtatcctctgctctagtagttcccggtgactgtcgcagcctctgttgccctctgacttgcagatgctgtgagatccagagctaagactccacgacatcccggaagccgaaaaatgaatcagtctcagtgtttcctgtttggattgccatgaggacatcaacccagagtgactgtagaccctcttcccagcacctgagagtctttgagacatttgaggttgttgtgtgcagactgggatgggagttgttccagttttcacttgggtgaaaaaaaaggagagctggagactgatcaaccaattactttcatttcatatggcgattagaaaaacagatgaggcaatcataatctctgcaatccaggaactgtgtctgtggcaaatgaataaatggctgaatttca

SEQ ID NO: 18297 - DNA, 586 bp, Homo sapiens
gggatattttgttaatttcatatttcagctatgtcttctcattacactgaagaccttttgccagaacagtgcatgcaagattcattccaaaaagtgatactgagaagatatggaagctgtggacttgaggatttacacttaaggaaggatggggaaaatgtggataattcacactgaagagaaactctgcatatgtgaggaatgtggcaaaacctttaagtggttctcataccttactaaacataagagaattcacactggagagaaaccatacaaatgtgaagaatgtggcaaagcttttaactggtgctcgagtcttactaaacataagagaatccatactggtgagaaaccctacaaatgtgaagaatgtggaaaagcctttcaaccattgctgacagcttattgcacagaagaaaattcatgctgagaaaaattctgattttaaagaatgtggcaaagcatttaataactactatgaacttactcatcagaggttttgtgctagataaaagcaatgtaagtgtaatgatacacattacatttatctgtggaaagatgtcaccaaataaaagccttagagtac

SEQ ID NO: 18298 - DNA, 337 bp, Homo sapiens
cctcccgggttcgtgccattctcctgcctcagcctcccgagcagctgagactacaggcgcccgccaccatgccccactaattttttgtattttttagtagaaacggggtttcaccgtgttagccaggatggtcttgatctcctgacctcgtgatccacccgcctcggcctcccaaatgctgcatgagatagatgttcagagtaatagtcttgtgcattattcaaattttagtaaattgttttaccaattgcacattagatagtatagtggattttgtaatgcttttcttagactgtgtgaacttagtttcaataaaacaattatttttaatgtgtta

SEQ ID NO: 18299 - DNA, 1996 bp, Homo sapiens
ggcctttgtctcgctccagccagagctcagggtccatcttcattgcttagtatcctctgctctagtagttcccggtgactgtcgcagcctctgttgccctctgacttgcagatgctgtgagatccagagctaagactccacgacatcccggaagccgaaaaatggaactgttgacattcagggatgtgaccatagaattctctctggaggagtgggagtttctgaaccctgctcagcagagtttgtataggaaagtgatgctagagaactacagaaacctggtctctctgggtcttactgtttctaagccagaactgattagccgtctggagcaaagacaggagccctggaatgtgaagagacatgagaccatagccaaacccccagctatgtcttctcattacactgaagaccttttgccagaacagtgcatgcaagattcattccaaaaagtgatactgagaagatatggaagctgtggacttgaggatttacacttaaggaaggatggggaaaatgtgggtgagtgtaaggatcaaaaagaaatttataatggacttaaccaatgtttgtcaactctacctagcaaaattttcccatataataaatgtgtgaaagtctttagtaaatcatcaaatctaaatagagaaaacataagacatactacagagaaacttttcaaatgtatgcaatgtggcaaagtctttaaatctcactcaggcctttcttatcataagataattcacactgaagagaaactctgcatatgtgaggaatgtggcaaaacctttaagtggttctcataccttactaaacataagagaattcacactggagagaaaccatacaaatgtgaagaatgtggcaaagcttttaactggtgctcgagtcttactaaacataagagaatccatactggtgagaaaccctacaaatgtgaagaatgtggaaaagcctttcactggtgttcaccctttgttagacataagaaaattcatacaggagaaaaaccctatacatgtgaagactgtggcagagcgtttaaccggcactcacatctcaccaaacataagacaattcacactggaaagaaaccctacaaatgtaaagaatgtgggaaagcctttaaccactgctcactacttactatacatgagagaacccatacgggagagaaaccctataaatgtgaagaatgtggcaaagcttttaactcatcatcaattcttactgaacataaggtaattcatagcggagagaaaccctacaaatgtgaaaaatgtgacaaagtctttaagaggttctcataccttactaaacacaagagaattcacactggagagaaaccctacaaatgtgaagaatgtggcaaagcttttaactggtcctcaatccttactgaacataagagaattcatactggagagaaaccctacaactgtgaagaatgtggaaaagcctttaatcggtgctcacaccttactagacataagaaaattcatactgccgtcaaacgctataaatgtgaagaatgtggcaaagcttttaaacggtgctcacatcttaatgaacataagagagttcaaagaggagagaaatcctgcaagtataaaaaatgtggggaagcttttaatcactgctcaaaccttactacgtaagaatttttactaaagagaaatcctacaaatgtaaagaatgtggcaaattccataaatcttgctcaaggcattgaaatcacaagataattcatactggagagaaacactacaaatgtgaagaatgtggggaaagtcttcaaccattgctgacagcttattgcacagaagaaaattcatgctgagaaaaattctgattttaaagaatgtggcaaagcatttaataactactatgaacttactcatcagaggttttgtgctagataaaagcaatgtaagtgtaatgatacacattacatttatctgtggaaagatgtcaccaaataaaagccttagagtac

SEQ ID NO: 18300 - DNA, 2157 bp, Homo sapiens
ggcctttgtctcgctccagccagagctcagggtccatcttcattgcttagtatcctctgctctagtagttcccggtgactgtcgcagcctctgttgccctctgacttgcagatgctgtgagatccagagctaagactccacgacatcccggaagccgaaaaatggaactgttgacattcagggatgtgaccatagaattctctctggaggagtgggagtttctgaaccctgctcagcagagtttgtataggaaagtgatgctagagaactacagaaacctggtctctctgggtcttactgtttctaagccagaactgattagccgtctggagcaaagacaggagccctggaatgtgaagagacatgagaccatagccaaacccccaggctagattacagccttaccattttgtgtaaaaagaagagcaacatattaataagtttccctagtattatatgaggagtcatgagaattgttgtaaattcaacatctattcattggtggatgtatattttctttttgtgagagaaacacttgtgatttgaagctatgtcttctcattacactgaagaccttttgccagaacagtgcatgcaagattcattccaaaaagtgatactgagaagatatggaagctgtggacttgaggatttacacttaaggaaggatggggaaaatgtgggtgagtgtaaggatcaaaaagaaatttataatggacttaaccaatgtttgtcaactctacctagcaaaattttcccatataataaatgtgtgaaagtctttagtaaatcatcaaatctaaatagagaaaacataagacatactacagagaaacttttcaaatgtatgcaatgtggcaaagtctttaaatctcactcaggcctttcttatcataagataattcacactgaagagaaactctgcatatgtgaggaatgtggcaaaacctttaagtggttctcataccttactaaacataagagaattcacactggagagaaaccatacaaatgtgaagaatgtggcaaagcttttaactggtgctcgagtcttactaaacataagagaatccatactggtgagaaaccctacaaatgtgaagaatgtggaaaagcctttcactggtgttcaccctttgttagacataagaaaattcatacaggagaaaaaccctatacatgtgaagactgtggcagagcgtttaaccggcactcacatctcaccaaacataagacaattcacactggaaagaaaccctacaaatgtaaagaatgtgggaaagcctttaaccactgctcactacttactatacatgagagaacccatacgggagagaaaccctataaatgtgaagaatgtggcaaagcttttaactcatcatcaattcttactgaacataaggtaattcatagcggagagaaaccctacaaatgtgaaaaatgtgacaaagtctttaagaggttctcataccttactaaacacaagagaattcacactggagagaaaccctacaaatgtgaagaatgtggcaaagcttttaactggtcctcaatccttactgaacataagagaattcatactggagagaaaccctacaactgtgaagaatgtggaaaagcctttaatcggtgctcacaccttactagacataagaaaattcatactgccgtcaaacgctataaatgtgaagaatgtggcaaagcttttaaacggtgctcacatcttaatgaacataagagagttcaaagaggagagaaatcctgcaagtataaaaaatgtggggaagcttttaatcactgctcaaaccttactacgtaagaatttttactaaagagaaatcctacaaatgtaaagaatgtggcaaattccataaatcttgctcaaggcattgaaatcacaagataattcatactggagagaaacactacaaatgtgaagaatgtggggaaagtcttcaaccattgctgacagcttattgcacagaagaaaattcatgctgagaaaaattctgattttaaagaatgtggcaaagcatttaataactactatgaacttactcatcagaggttttgtgctagataaaagcaatgtaagtgtaatgatacacattacatttatctgtggaaagatgtcaccaaataaaagccttagagtac
